(19) United States
(12) Patent Application Publication
(10) Pub. No.: US 2011/0105347 A1
(43) Pub. Date: May 5, 2011

(54) CORN POLYMORPHISMS AND METHODS OF GENOTYPING

(75) Inventors: Kunsheng Wu, Ballwin, MO (US); John LeDeaux, Creve Coeur, MO (US); David Butruille, Des Moines, IA (US); Anju Gupta, Ankeny, IA (US); Richard Johnson, Urbana, IL (US); Sam Eathington, Ames, IA (US); Jason Bull, Wildwood, MO (US); Marlin Edwards, Urbana, CA (US)

(73) Assignee: Monsanto Technology LLC, St. Louis, MO (US)

(21) Appl. No.: 12/600,544

(22) PCT Filed: May 16, 2008
(86) PCT No.: PCT/US08/06321

§ 371 Date: Jun. 2, 2010

Related U.S. Application Data
(60) Provisional application No. 60/930,609, filed on May 17, 2007.

(51) Int. Cl. C40B 30/04; C40B 40/06; C07H 21/04

(52) U.S. Cl. 506/9; 506/16; 536/23.1

(57) ABSTRACT

Polymorphic corn DNA loci useful for genotyping between at least two varieties of corn. Sequences of the loci are useful for providing the basis for designing primers and probe oligonucleotides for detecting polymorphisms in maize DNA. Polymorphisms are useful for genotyping applications in corn. The polymorphic markers are useful to establish marker/trait associations, e.g. in linkage disequilibrium mapping and association studies, positional cloning and transgenic applications, marker-aided breeding and marker-assisted selection, hybrid prediction and identity by descent studies. The polymorphic markers are also useful in mapping libraries of DNA clones, e.g. for corn QTLs and genes linked to polymorphisms.

### CROSS-REFERENCE TO RELATED APPLICATIONS

[0001] None.

### STATEMENT REGARDING FEDERALLY SPONSORED RESEARCH OR DEVELOPMENT

[0002] Not Applicable.

### INCORPORATION OF SEQUENCE LISTING AND TABLES

[0003] The sequence listing and a computer readable form (CRF) of the sequence listing are provided herein on CD-ROMs, each containing the file named “46-21(54824). SEQLIST.txt”, which is 7174544 bytes (measured in MS-Windows), all of which were created on May 15, 2007, are herein incorporated by reference. Two copies of Table 1 and Table 3 are also provided herein on CD-ROMs, containing the files named “Table 1” (Copy 1 and Copy 2), which is 15945592 bytes (measured in MS-Windows) and “Table 3” (Copy 1 and Copy 2), which is 115305 bytes (measured in MS-Windows), all of which were created on May 16, 2007, are herein incorporated by reference.

### BACKGROUND OF THE INVENTION

[0004] 1. Field of the Invention

[0005] Disclosed herein are corn polymorphisms, nucleic acid molecules related to such polymorphisms and methods of using such polymorphisms and molecules as molecular markers, e.g. in genotyping.

[0006] 2. Related Art

[0007] Polymorphisms are useful as molecular markers, also termed genetic markers, for genotyping-related applications in the agriculture field, e.g. in plant genetic studies and commercial breeding. Such uses of polymorphisms are described in U.S. Pat. Nos. 5,385,835; 5,437,697; 5,385,835; 5,492,547; 5,746,023; 5,962,764; 5,981,832 and 6,100,030.

[0008] In particular, the use of molecular markers in breeding programs has accelerated the genetic accumulation of valuable traits into a germplasm compared to that achieved based on phenotypic data only. Herein, “germplasm” includes breeding germplasm, breeding populations, collection of elite inbred lines, populations of random mating individuals, and biparental crosses. Molecular marker alleles (an “allele” is an alternative sequence at a locus) are used to identify plants that contain a desired genotype at multiple loci, and that are expected to transfer the desired genotype, along with a desired phenotype to their progeny. Molecular marker alleles can be used to identify plants that contain the desired genotype at one marker locus, several loci, or a haplotype, and that would be expected to transfer the desired genotype, along with a desired phenotype to their progeny.

[0009] The highly conserved nature of DNA, combined with the rare occurrences of stable polymorphisms, provide molecular markers which can be both predictable and discerning of different genotypes. Among the classes of existing molecular markers are a variety of polymorphisms indicating genetic variation including restriction-fragment-length polymorphisms (RFLPs), amplified fragment-length polymorphisms (AFLPs), simple sequence repeats (SSRs), single feature polymorphisms (SFPs), single nucleotide polymorphisms (SNPs) and insertion/deletion polymorphisms (Indels).

[0010] Molecular markers vary in their stability and genomic abundance. SNPs are particularly useful as molecular markers because they are more stable than other polymorphisms and are abundant in plant genomes (Bi et al. Crop Sci. 46:12-21 (2006), Kornberg, DNA Replication, W.H. Freeman & Co., San Francisco (1980)). Because the number of molecular markers for a plant species is limited, the discovery of additional molecular markers is critical for genotyping applications including marker-trait association studies, gene mapping, gene discovery, marker-assisted selection and marker-assisted breeding. The discovery and identification of polymorphisms for use as molecular markers requires a substantial sequencing and bioinformatics effort, requiring large scale sequencing from two or more evolutionarily diverged lines or populations.

[0011] Evolving technologies make certain molecular markers more amenable for rapid, large scale use. In particular, technologies such as high-throughput screening for SNP detection indicate that SNPs may be preferred molecular markers.

### SUMMARY OF THE INVENTION

[0012] It is in view of the above problems that the present invention was developed. This invention provides a series of molecular markers for corn. These molecular markers comprise corn DNA loci which have been discovered by sequencing corn genomic DNA and identifying polymorphisms through computer analyses. These molecular markers are useful for a variety of genotyping applications. A polymorphic corn locus of this invention comprises at least 12 consecutive nucleotides which include or are adjacent to a polymorphism which is identified herein, e.g. in Table 1 or Table 3. As indicated in Table 1 the nucleic acid sequences of SEQ ID NO: 1 through SEQ ID NO: 6552 comprise one or more polymorphisms, e.g. single nucleotide polymorphisms (SNPs) and insertion/deletion polymorphisms (Indels). As indicated in Table 3, certain polymorphisms identified herein have also been mapped to certain maize chromosomes.

[0013] The invention first provides for libraries of nucleic acid molecules that comprise at least two distinct sets of nucleic acid molecules wherein each of said distinct sets of nucleic acid molecules permits typing of a corresponding corn genomic DNA polymorphism identified in Table 1 or Table 3. In certain embodiments of this aspect of the invention, the library comprises two or more distinct sets of nucleic acid molecules are arrayed on at least one solid support or on at least one microtiter plate. The distinct sets of nucleic acid molecules can be located in a separate and distinct well of a microtiter plate. The distinct sets of nucleic acids can also be located at a distinct interrogation position on the solid support.

[0014] Libraries where the nucleic acid molecules are combined in a single mixture are also contemplated. In still other embodiments of the invention, the libraries can comprise at least 8, at least 24, at least 96, or at least 384 distinct sets of nucleic acid molecules wherein each of the sets of nucleic acid molecules permit typing of a corresponding distinct corn genomic DNA polymorphism identified in Table 1 or Table 3. Libraries comprised of sets of nucleic acid molecules that permit typing of corn genomic DNA polymorphisms identified in Table 3 that are selected from the group consisting of SEQ ID NO: 2468, 5407, 287, 574, 3407, 5367, 4566, 2457, 5295, 4548, 5182, 5489, 2714, 2726, 375, 275, 1415, 885, 2067, 4773, 1708, 1479, 3507, 2765, and 1279 are also contemplated.

[0015] The distinct sets of nucleic acid molecules in the libraries can comprise a nucleic acid molecule of at least 12 consecutive nucleotides that include or are immediately adjacent to a corresponding polymorphism identified in Table 1 and wherein the sequence of at least 12 consecutive nucleotides is at least 90% identical to the sequence of the same number of nucleotides in either strand of a segment of corn DNA which includes or is immediately adjacent to said polymorphism. In other embodiments, the nucleic acid molecule is of at least 15 consecutive nucleotides or of at least 18 consecutive nucleotides. The nucleic acid molecules can further comprise a detectable label or provide for incorporation of a detectable label. This detectable label can be selected from the group consisting of an isotope, a fluorophore, an oxidant, a reductant, a nucleotide and a hapten. Detectable labels can be added to the nucleic acid by a chemical reaction or incorporated by an enzymatic reaction.

[0016] The distinct sets of nucleic acid molecules can also comprise: (a) a pair of oligonucleotide primers wherein each of said oligonucleotide primers comprises at least 15 nucleotide bases and permit PCR amplification of a segment of DNA containing one of said corresponding polymorphisms identified in Table 1 or Table 3, and (b). at least one detector nucleic acid molecule that permits detection of a polymorphism in said amplified segment in (a). In such distinct sets of nucleic acids, the detector nucleic acid comprises at least 12 nucleotide bases or comprises at least 12 nucleotide bases and a detectable label, and wherein the sequence of said detector nucleic acid molecule is at least 95 percent identical to a sequence of the same number of consecutive nucleotides in either strand of a segment of maize DNA in a locus of claim 1 comprising said polymorphism.

[0017] The invention also provides computer readable media having recorded thereon at least two corn genomic DNA polymorphisms identified in Table 1 or Table 3. In other embodiments, at least 8 of the corn genomic DNA polymorphisms identified in Table 1 or Table 3 are recorded on the computer readable media. Computer readable medium having recorded thereon at least two corn genomic DNA polymorphisms identified in Table 3 and a corresponding genetic map position for each of said corn genomic DNA polymorphisms are also provided. In other embodiments, at least 8 of the corn genomic DNA polymorphisms and corresponding genetic map positions are recorded on the computer readable media.

[0018] The invention also provides a computer based system for reading, sorting or analyzing corn genotypic data that comprises the following elements: (a) a data storage device comprising a computer readable medium wherein at least two corn genomic DNA polymorphisms identified in Table 1 or Table 3 are recorded thereon; b) a search device for comparing a corn genomic DNA sequence from at least one test corn plant to said polymorphism sequences of the data storage device of step (a) to identify homologous or non-homologous sequences; and, (c) a retrieval device for identifying said homologous or non-homologous sequences(s) of said test corn genomic sequences of step (b). In other embodiments, at least 96 corn genomic DNA polymorphisms identified in Table 1 or Table 3 are recorded on the computer readable medium in the computer based system. In still other embodiments, the data storage device can further comprise computer readable medium wherein phenotypic trait data from at least one of said test corn plants is recorded thereon. The data storage device can also further comprise computer readable medium wherein data associating an allelic state with a parent, progeny, or tester corn plant is recorded thereon. Computer based systems wherein a plurality of mapped corn genomic DNA polymorphisms identified in Table 3 are recorded on the computer readable medium and wherein the computer readable medium further comprises genetic map location data for each of said mapped polymorphisms are also contemplated.

[0019] Isolated nucleic acid molecules for detecting polymorphisms in corn genomic DNA identified in Table 1 and Table 3 are also provided. Isolated nucleic acid molecules for detecting a molecular marker representing a polymorphism in corn DNA identified in Table 1 or Table 3 that comprise at least 15 nucleotides that include or are immediately adjacent to the polymorphism and are at least 90 percent identical to a sequence of the same number of consecutive nucleotides in either strand of DNA that include or are immediately adjacent to said polymorphism are contemplated. Isolated nucleic acids of the invention can further comprise a detectable label or provides for incorporation of a detectable label. The detectable label can be selected from the group consisting of an isotope, a fluorophore, an oxidant, a reductant, a nucleotide and a hapten. The detectable label can be added to the nucleic acid by a chemical reaction or incorporated by an enzymatic reaction. The isolated nucleic acid can detect a polymorphism in Table 3 selected from the group consisting of SEQ ID NO: 2468, 5407, 287, 574, 3407, 5367, 4566, 2457, 5295, 4548, 5182, 5489, 2714, 2726, 375, 275, 1415, 885, 2067, 4773, 1708, 1479, 3507, 2765, and 1279.

[0020] Other isolated oligonucleotide compositions comprising more than one isolated nucleic acid that are useful for typing the corn polymorphisms of Table 1 or Table 3. Such isolated oligonucleotide compositions can be used to type the SNP polymorphisms by either Taqman® assay or Flap Endonuclease-mediated (Invader®) assays. In one embodiment the isolated nucleic acid composition is a set of oligonucleotides comprising: (a.) a pair of oligonucleotide primers wherein each of said primers comprises at least 12 contiguous nucleotides and wherein said pair of primers permit PCR amplification of a DNA segment comprising a corn genomic DNA polymorphism locus identified in Table 1 or Table 3; and (b) at least one detector oligonucleotide that permits detection of a polymorphism in said amplified segment, wherein the sequence of said detector oligonucleotide is at least 95 percent identical to a sequence of the same number of consecutive nucleotides in either strand of a segment of maize DNA that include or are immediately adjacent to said polymorphism of step (a). In the set of oligonucleotides, the detector oligonucleotide comprises at least 12 nucleotides and either provides for incorporation of a detectable label or further comprises a detectable label. The detectable label can be selected from the group consisting of an isotope, a fluorophore, an oxidant, a reductant, a nucleotide and a hapten. Isolated polynucleotide compositions for typing the disclosed polymorphisms with Flap Endonuclease-mediated (Invader®) assays are also provided. Such compositions for use in Flap Endonuclease-mediated assays comprise at least two isolated nucleic acid molecules for detecting a molecular marker representing a polymorphism in corn DNA, wherein a first nucleic acid molecule of the composition comprises an oligonucleotide that includes the polymorphic nucleotide residue and at least 8 nucleotides that are immediately adjacent to a 3′ end of said polymorphic nucleotide residue, wherein a second nucleic acid molecule of the composition comprises an oligonucleotide that includes the polymorphic nucleotide residue and at least 8 nucleotides that are immediately adjacent to a 5′ end of said polymorphic nucleotide residue, and wherein the polymorphism is identified in Table 1 or Table 3.

[0021] Various methods for genotyping corn plants to select a parent plant, a progeny plant or a tester plant for breeding are also provided. In one embodiment, the method of genotyping a corn plant to select a parent plant, a progeny plant or a tester plant for breeding comprises the steps of: a. obtaining a DNA or RNA sample from a tissue of at least one corn plant; b. determining an allelic state of at least one corn genomic DNA polymorphism identified in Table 1 or Table 3 for said sample from step (a), and c. using said allelic state determination of step (b) to select a parent plant, a progeny plant or a tester plant for breeding. This method of genotyping can be performed to type a mapped polymorphism identified in Table 3. The allelic state of polymorphisms can be determined by an assay permitting identification of a single nucleotide polymorphism in this genotyping method. Single nucleotide polymorphism assays used in this method can be selected from the group consisting of single base extension (SBE), allele-specific primer extension sequencing (ASPE), DNA sequencing, RNA sequencing, microarray-based analyses, universal PCR, allele specific extension, hybridization, mass spectrometry, ligation, extension-ligation, and Flap Endonuclease-mediated assays. In certain embodiments of this method, an allelic state of at least 8, at least 48, at least 96, or at least 384 distinct polymorphisms identified in Table 1 or Table 3 are determined.

[0022] The methods of genotyping can also further comprising the step of storing resultant genotype data for said one or more allelic state determinations on a computer readable medium and/or further comprise the step of comparing genotype data from one corn plant to another corn plant. Genotype data can also be compared to phenotypic trait data or phenotypic trait index data for at least one of said corn plants in certain embodiments of the methods that comprise those additional steps. Genotype data can also be compared to phenotypic trait data or phenotypic trait index data for at least two of said corn plants and determining one or more associations between said genotype data and said phenotypic trait data in certain embodiments of the methods that comprise those additional steps. In still other embodiments of methods wherein associations are determined for said phenotype trait data or phenotypic trait index data to said genotypic trait data, the genotypic trait data comprises allelic state determinations for at least 10 mapped polymorphisms identified in Table 3.

[0023] Methods of breeding corn plants are also contemplated. The methods of breeding corn plants comprise the steps of: (a) identifying trait values for at least one trait associated with at least two haplotypes in at least two genomic windows of up to 10 centimorgans for a breeding population of at least two corn plants; (b) breeding two corn plants in said breeding population to produce a population of progeny seed; (c) identifying an allelic state of at least one polymorphism identified in Table 1 or Table 3 in each of said windows in said progeny seed to determine the presence of said haplotypes; and (d) selecting progeny seed having a higher trait value for at least one trait associated with the determined haplotypes in said progeny seed, thereby breeding a corn plant. In certain embodiments of these breeding methods, trait values are identified for at least one trait associated with at least two haplotypes in each adjacent genomic window over essentially the entirety of each chromosome. The trait value can identify a trait selected from the group consisting of herbicide tolerance, disease resistance, insect or pest resistance, altered fatty acid, protein or carbohydrate metabolism, increased grain yield, increased oil, increased nutritional content, increased growth rates, enhanced stress tolerance, preferred maturity, enhanced organoleptic properties, altered morphological characteristics, other agronomic traits, traits for industrial uses, or traits for improved consumer appeal, or a combination of traits as a multiple trait index. In other embodiments of these breeding methods, progeny seed is selected for a higher trait value for yield for a haplotype in a genomic window of up to 10 centimorgans in each chromosome. In methods where the trait value is for the yield trait and trait values are ranked for haplotypes in each window; a progeny seed can be selected which has a trait value for yield in a window that is higher than the mean trait value for yield in said window. In still other embodiments of the method, the polymorphisms in the haplotypes are in a set of DNA sequences that comprises all of the DNA sequences of SEQ ID NO: 1 through SEQ ID NO: 6552.

[0024] Methods for selecting a parent, progeny, or tester plant for breeding are also provided. These methods for selecting a parent, progeny, or tester plant for plant breeding comprise the steps of: a) determining associations between a plurality of polymorphisms identified in Table 1 or Table 3 and a plurality of traits in at least a first and a second inbred line of corn; b) determining an allelic state of one or a plurality of polymorphism in a parent, progeny or tester plant; c) selecting the parent, progeny or tester that has a more favorable combination of associated traits. In certain embodiments, the parent, progeny or tester plant is an inbred corn line. A favorable combination of associated traits selected in the parent, progeny or tester can be a parent, progeny or tester that provides for improved heterosis.

[0025] Methods for improving heterosis are also provided. The methods for improving heterosis comprise the steps of: (a) determining associations between a plurality of polymorphisms identified in Table 1 or Table 3 and a plurality of traits in more than two inbred lines of corn; (b) assigning two inbred lines selected from the inbred lines of step (a) to heterotic groups, (c) making at least one cross between at least two inbred lines from step (b), wherein each inbred line comes from a distinct and complementary heterotic group and wherein the complementary heterotic groups are optimized for genetic features that improve heterosis; and (d) obtaining a hybrid progeny plant from said cross in step (c), wherein said hybrid progeny plant displays increased heterosis relative to progeny derived from a cross with an unselected inbred line.

[0026] Methods of genotyping corn to select a parent plant, a progeny plant or a tester plant for breeding wherein a plurality of distinct sets of nucleic acids are used to type a plurality of distinct polymorphisms that map to a plurality of genomic loci are also provided. These methods of genotyping a corn plant to select a parent plant, a progeny plant or a tester plant for breeding comprise the steps of: (a) obtaining a DNA or RNA sample from a tissue of at least one corn plant; (b) determining an allelic state of a set of corn genomic DNA polymorphisms comprising at least two polymorphisms identified in Table 1 or Table 3 for said sample from step (a), wherein said allelic state is determined with a set of nucleic acid molecules that provide for typing of said corn genomic DNA polymorphisms; and c. using said allelic state determination of step (b) to select a parent plant, a progeny plant or a tester plant for breeding. However, other embodiments of the method provide for determining the allelic state of at least 5, at least 10, or at least 20 polymorphisms identified in Table 1 or Table 3. The set of corn genomic DNA polymorphisms can comprise at least 2 polymorphisms selected from the group consisting of SEQ ID NO: 5407, 287, 574, 3407, 5367, 4566, 2457, 5295, 4548, 5182, 5489, 2714, 2726, 375, 275, 1415, 885, 2067, 4773, 1708, 1479, 3507, 2765, and 1279, and SEQ ID NO: 2468. The set of corn genomic DNA polymorphisms can also comprise at least 2 polymorphisms selected from the group consisting of SEQ ID NO: 2468, 5407, 287, 574, 3407, 5367, 4566, 2457, 5295, and 4548. Alternatively, the corn genomic DNA polymorphisms can also comprise at least 2 polymorphisms selected from the group consisting of SEQ ID NO: 2468, 5407, 287, 574, and 3407. In one embodiment, the set of corn genomic polymorphisms comprise the polymorphisms SEQ ID NO: 2468 and 5407. In this method, the set of corn genomic DNA polymorphisms can be associated with a trait values identified for at least one of yield, lodging, maturity, plant height, drought tolerance and cold germination. Genotyping methods where the set of corn genomic DNA polymorphisms are associated with a trait value for yield are particularly contemplated. In one embodiment, the polymorphisms associated with a trait value are selected from the group consisting of SEQ ID NO: 5407, 287, 574, 3407, 5367, 4566, 2457, 5295, 4548, 5182, 5489, 2714, 2726, 375, 275, 1415, 885, 2067, 4773, 1708, 1479, 3507, 2765, and 1279, and SEQ ID NO: 2468. Polymorphisms selected from the group consisting of SEQ ID NO: 5407, 287, 574, 3407, 5367, 4566, 2457, 5295, 4548, 5182, 5489, 2714, 2726, 375, 275, 1415, 885, 2067, 4773, 1708, 1479, 3507, 2765, and 1279, and SEQ ID NO: 2468 are associated with a trait value for yield.

[0027] Methods of genotyping corn to select a parent plant, a progeny plant or a tester plant for breeding wherein a plurality of distinct sets of nucleic acids are used to type a plurality of distinct polymorphisms that map to a plurality of genomic loci distributed across the genome of corn are also provided. In these methods, a set of at least 20 corn genomic DNA polymorphisms identify polymorphisms that are distributed across the genome of corn are typed. In certain embodiments of this method, the set of at least 20 corn genomic DNA polymorphisms that are typed identify polymorphisms that are distributed across a single chromosome of corn or are distributed across at least two chromosomes of corn. In still other embodiments of this method, the set of at least 20 corn genomic DNA polymorphisms identify polymorphisms that are distributed across all chromosomes of corn. When the 20 corn genomic DNA polymorphisms are distributed across all chromosomes of corn, they can be distributed such that at least 1 of the polymorphisms in the set maps to each chromosome arm of each chromosome such that at least 1 of said polymorphisms in said set maps to each chromosome arm. However, this method can also employ more polymorphisms, such that at least 10 of the corn genomic DNA polymorphisms in the set map to each chromosome arm. In other embodiments, at least 20 or at least 50 of the corn genomic DNA polymorphisms in the set map to each chromosome arm. In certain embodiments of the methods, at least one polymorphism maps to chromosome arm 1S and can be selected from the group consisting of SEQ ID NO: 381, 2339, 4410, 239, 1311, 4683, 4071, 3141, 5061, 2972, 1246, 5114, 3716, 57, 58, 1114, 5495, 5476, 1323, 2451, 765, 845, 5339, 5363, 1141, 4137, 3332, 3775, 1776, 2213, 3954, 1389, 870, 5441, 161, 1791, 5455, 5296, 783, 3868, 5230, 5156, 4709, 5163, 66, 1766, 4779, 2672, 5262, 589, 925, 2909, 4450, 5118, 669, 4979, 1553, 3927, 198, 2593, 5364, 1261, 4006, 111, 5090, 4740, 2699, 2666, 4357, 4738, 5036, 697, 901, 230, 5267, 939, 1219, 5356, 2290, 4283, 3062, 5320, 655, 2261, 5374, 1559, 1174, 2300, 3308, 4176, 3694, 3035, 3030, 3990, 4080, 5526, 316, 3578, 900, 2384, 5050, 5344, 2768, 167, 4939, 2931, 5315, 1844, 1020, 5150, 1547, 707, 1156, 4993, 1742, 5158, 5251, 1441, 5071, 105, 3425, 3426, 3817, 5504, 3918, 5227, 5152, 2950, 3877, 4675, 5214, 15, 2951, 4517, 5213, 4241, 4172, 5413, 1235, 4482, 3489, 5311, 3363, 3562, 4145, 728, 3395, 5225, 4449, 4914, 1308, 4500, and 1543. In other embodiments of the method, at least one polymorphism maps to chromosome arm 1L is selected from the group consisting of SEQ ID NO: 2835, 1301, 1374, 3766, 2624, 4571, 927, 4559, 5420, 3328, 1702, 5219, 606, 4124, 3100, 5223, 4091, 3292, 3900, 4814, 5383, 4354, 4533, 5355, 2119, 3574, 5200, 1513, 732, 5026, 2326, 4478, 2099, 1229, 1443, 2944, 2325, 5326, 2669, 4973, 5142, 5078, 2645, 3112, 2194, 3021, 2986, 4936, 1577, 4004, 88, 3913, 610, 4248, 4895, 4891, 489, 747, 5134, 4879, 5235, 1659, 5187, 5263, 3127, 5055, 1556, 4316, 660, 5431, 1348, 2900, 133, 269, 3355, 2243, 2991, 4584, 3686, 5047, 1843, 5272, 592, 4501, 5002, 1505, 1066, 549, 236, 2731, 1973, 2831, 1539, 5177, 4522, 5508, 4951, 2086, 120, 1466, 10, 1238, 402, 263, 89, 2811, 4013, 4015, 3944, 2706, 430, 639, 4983, 211, 3919, 5, 5182, 146, 955, 3339, 2817, 3485, 3587, 4171, 5416, 1627, 2093, 4093, 2217, 1956, 5310, 3261, 4753, 317, 1110, 4014, 5489, 5254, 5154, 3407, 1980, 5290, 563, 1073, 3833, 3512, 5367, 4156, 3782, 5498, 4468, 929, 4676, 3468, 3754, 4077, 5333, 1903, 1771, 2043, 5490, 4168, 487, 2426, 4250, 4648, 2142, 3058, 3449, 595, 3107, 3794, 2844, 1018, 2140, 5083, 507, 2299, 5524, 1871, 1885, 933, 1455, and 3440.

[0028] In other embodiments of the method, at least one polymorphism maps to chromosome arm 2S is selected from the group consisting of SEQ ID NO: 185, 3347, 5302, 4102, 4852, 802, 821, 1668, 5206, 5402, 4908, 2432, 3491, 1568, 4603, 5049, 2432, 4585, 4702, 3068, 4789, 4398, 4853, 4890, 621, 1506, 5039, 5029, 5179, 4907, 1204, 4669, 5451, 3872, 3390, 2649, 3325, 3982, 5481, 1447, 1726, 5130, 4322, 4149, 5104, 4994, 2979, 4643 5328, 2870, 2861, 1084, 5115, 11, 2684, 4586, 5063, 417, 2320, 5092, 4492, 2164, 2725, 4900, 4997, 5314, 1058, 3121, 5112, 4976, 5405, 4026, 5492, 2537, 1491, 4791, 434, 4580, 1032, 1352, 2563, 4003, 1226, 3697, 1859, 2635, 3080, 3110, 420, 5013, 3026, 5175, 4659, 5239, 4020, 938, 1813, 2313, 1223, 314, 3258, 3981, 1090, 4721, 5018, 4136, 3084, 1415, 4417, 2983, 3695, 2849, 1393, 2279, 5427, 1634, 885, 1826, 4563, 4697, 5183, 2827, and 4822.

[0029] In other embodiments of the method, at least one polymorphism maps to chromosome arm 2L is selected from the group consisting of SEQ ID NO: 375, 4781, 4929, 3474, 3497, 4579, 5008, 1008, 3825, 4220, 913, 2708, 3698, 275, 4048, 596, 4002, 1431, 5377, 4875, 2942, 5207, 5064, 3527, 1339, 4292, 1690, 2806, 4115, 4602, 4746, 5258, 5418, 4838, 3789, 5173, 3783, 809, 3890, 4213, 4442, 4231, 2506, 283, 3349, 1194, 4703, 4647, 3631, 951, 4402, 3356, 3803, 5245, 3805, 4236, 28, 4565, 5493, 1914, 1317, 4355, 5037, 724, 1253, 1388, 5464, 4307, 5249, 123, 5048, 2210, 2434, 4062, 1796, 2054, 1384, 4671, 2801, 1595, 1865, 2691, 3589, 3624, 2178, 4568, 550, 2734, 2303, 4808, 594, 2046, 1588, 324, 668, 2977, 4086, 4173, 5308, 431, 1994, 2294, 4674, 3405, 3404, 3708, 491, 241, 2524, 4299, 1210, 3010, 1062, 2710, 5271, 4416, 4170, 4453, 4399, 2678, 4446, 4327, 3540, 4521, 952, 1089, 5164, 3965, 4487, 737, and 1121.

[0030] In other embodiments of the method, at least one polymorphism maps to chromosome arm 3S is selected from the group consisting of SEQ ID NO: 762, 3024, 1349, 5525, 4574, 3078, 2608, 4553, 4114, 1160, 3717, 1399, 1936, 2787, 5159, 4047, 3756, 5470, 3636, 2846, 4288, 5457, 2543, 4649, 668, 658, 1893, 4938, 1786, 5376, 3953, 4105, 5447, 3006, 4679, 5081, 4493, 1151, 1333, 1887, 3551, 4162, 1823, 2688, 1179, 2732, 2547, 4942, 2492, 5358, 1708, 5102, 3069, 1074, 1479, 2687, 5515, 3735, 1322, 4911, and 4615.

[0031] In other embodiments of the method, at least one polymorphism maps to chromosome arm 3L is selected from the group consisting of SEQ ID NO: 1153, 1497, 3616, 1022, 2324, 5006, 2715, 1712, 3721, 5269, 469, 2398, 5188, 5497, 5140, 1493, 1778, 1270, 3085, 4860, 2912, 3736, 1093, 3730, 201, 2370, 4260, 3655, 4405, 2065, 1805, 2215, 4481, 3504, 3102, 4259, 4827, 4067, 3306, 4667, 5277, 4269, 3327, 55, 702, 2404, 3264, 4555, 4849, 5506, 2642, 896, 4751, 4340, 3891, 1279, 505, 4017, 5040, 3461, 3495, 1993, 93, 5088, 4556, 285, 4367, 2959, 877, 1643, 1456, 5289, 5467, 4856, 5473, 5387, 116, 3849, 5099, 4949, 1071, 2226, 2964, 3510, 3758, 4154, 5502, 1511, 1063, 5132, 5111, 4689, 436, 4813, 4952, 1218, 3586, 5294, 990, 4655, 2409, 4651, 522, 4421, 4096, 2020, 2090, 2366, 3482, 1953, 3133, 4893, 5395, 3383, 1350, 210, 4892, 1459, 2489, 5138, 5292, 5362, 1485, 2038, 3492, 243, 4519, 1312, 2594, 4972, 3706, 773, 4918, 3647, 573, 991, 5323, 3970, 4452, 2823, 3930, 4869, 5319, 4281, 3848, 4965, 4959, 831, 2003, 2073, 4100, 5015, 63, 2781, 4654, 4962, 5434, 4024, 356, 4199, 357, 5161, 5285, 5166, 1499, 2343, 390, 4345, 5432, 2123, 3555, 5192, 5208, 2836, 3013, 3943, 3976, 580, 4297, and 1631.

[0032] In other embodiments of the method, at least one polymorphism maps to chromosome arm 4S is selected from the group consisting of SEQ ID NO: 4232, 1449, 2901, 3966, 4054, 3657, 4541, 752, 3419, 1621, 1086, 5221, 5384, 4085, 1923, 5453, 4434, 5077, 5298, 1571, 3669, 5283, 5360, 987, 1411, 4690, 3348, 722, 5014, 4244, 4371, 5369, 3921, 5281, 5357, 2394, 3277, 5256, 2032, 3577, 1945, 3256, 5153, 1839, 872, 4382, 2523, 1146, 422, 5462, 2151, 4960, 2932, 5203, 4009, 4490, 5244, 2838, 1997, 4948, 1728, 2830, 4228, 5260, 2601, 3270, 4750, 5216, 5475, 4021, 5385, 1130, 4108, 4582, and 4629.

[0033] In other embodiments of the method, at least one polymorphism maps to chromosome arm 4L is selected from the group consisting of SEQ ID NO: 1057, 2619, 1798, 2017, 3894, 4641, 3672, 5000, 1508, 2754, 908, 1259, 3928, 5170, 2176, 638, 1867, 426, 4273, 5426, 458, 4576, 306, 1598, 23, 5056, 5423, 2486, 2427, 346, 2630, 4775, 371, 2301, 4368, 4486, 2677, 4401, 4947, 2955, 4294, 2770, 1292, 2087, 177, 2771, 4984, 4437, 619, 4747, 2615, 4588, 5409, 439, 4225, 2805, 3793, 5415, 5429, 611, 635, 1446, 2341, 3082, 4219, 5181, 5195, 760, 4147, 4188, 4957, 5388, 142, 4030, 631, 4280, 1785, 4314, 5523, 2887, 4955, 803, 4937, 5021, 3066, 4923, 169, 3159, 148, 5512, 5024, 237, 4331, 3389, 3595, 4772, 1636, 1996, 3064, 1808, 3710, 2465, 5057, 2168, 2898, 5445, 1425, 2317, 3952, 3033, 5252, 5334, 4423, 4444, 409, 5122, 5341, 4261, 2796, 4339, 3858, 3807, 1329, 5149, 4135, 2591, 4980, 4558, 1131, 5273, 4611, 3768, 5155, 5379, 3779, 156, 399, 1592, and 1790.

[0034] In other embodiments of the method, at least one polymorphism maps to chromosome arm 5S is selected from the group consisting of SEQ ID NO: 141, 4609, 5309, 2637, 3146, 1365, 1207, 4242, 4455, 3529, 5378, 2154, 454, 2522, 3041, 5107, 2079, 5242, 1205, 1542, 4798, 4023, 3045, 5284, 2832, 4940, 5196, 1518, 1324, 4157, 5229, 318, 5332. 3995, 1132, 3487, 5004, 5471, 4818, 443, 1014, 5435, 4699, 4670, 4666, 2129, 3950, 5119, 2935, 2284, 3922, 2592, 5141, 5430, 5069, 4566, 2610, 3152, 4832, 1963, 1866, 2256, 2692, 2457, 2933, 4943, 1958, 2461, 941, 4289, 1535, 3511, 4431, 4691, 4207, 4218, 2829, 3749, 2952, 1574, 4079, 492, 1404, 1976, 5232, 179, 520, 3269, 5191, 3905, 298, 3544, 251, 2761, 3370, 2729, 4321, 2586, 1529, 853, 1126, 3759, 3831, 4502, 5279, 2424, 3346, 3569, 4877, 4360, 2014, 2820, 2891, 3342, 1461, 3763, 157, 2611, 4701, 5259, 29, 3118, 1258, 2767, 1360, 4295, 1689, 3627, 4473, 5190, 4634, 5321, 532, 4597, 815, 3910, 3446, 4140, and 4950.

[0035] In other embodiments of the method, at least one polymorphism maps to chromosome arm 5L is selected from the group consisting of SEQ ID NO: 2292, 2800, 3386, 4183, 4989, 5124, 2698, 4304, 463, 5500, 3354, 4462, 4046, 836, 4971, 4164, 2714, 2726, 4146, 3906, 4165, 1946, 2006, 1369, 3936, 3566, 945, 4025, 1762, 528, 1465, 5211, 4652, 2621, 2812, 5176, 581, 4109, 1846, 2528, 2295, 5436, 2075, 3451, 287, 3300, 3399, 3095, 5297, 597, 1330, 64, 574, 328, 1252, 2663, 4810, 667, 3734, 780, 1091, 2311, 1899, 1760, 2748, 4864, 2002, 106, 3483, 4660, 2675, 5307, 295, 3765, 3822, 2885, 4403, 4326, 4591, 2696, 4301, 2545, 4293, 2733, 5454, 1464, 4365, 2143, 413, 325, 3857, 2314, 389, 385, 4523, 3505, 2271, 3787, 4692, 5075, 98, 99, 1334, 1358, 3361, 4419, 2402, 3770, 4894, and 5299.

[0036] In other embodiments of the method, at least one polymorphism maps to chromosome arm 6S is selected from the group consisting of SEQ ID NO: 1639, 2378, 3516, 4479, 4771, 138, 1094, 1878, 2348, 180, 4378, and 3901.

[0037] In other embodiments of the method, at least one polymorphism maps to chromosome arm 6L is selected from the group consisting of SEQ ID NO: 406, 1755, 1026, 1985, 225, 1538, 1661, 2400, 3053, 4041, 4082, 4469, 5117, 5147, 5168, 5212, 3732, 5128, 1247, 22, 2851, 3275, 3046, 394, 2535, 2588, 2788, 3861, 3884, 3273, 2527, 3888, 2155, 3162, 5074, 2380, 4144, 5414, 4344, 2374, 2441, 2491, 3583, 5220, 3582, 3644, 2016, 3254, 4313, 4257, 215, 5275, 4990, 3387, 4118, 4512, 4857, 716, 5127, 4862, 3844, 488, 4361, 5288, 4333, 5265, 4825, 152, 3338, 694, 3777, 5340, 743, 4296, 415, 1149, 1584, 2742, 4389, 3851, 1955, 2585, 5139, 2381, 2456, 2456, 2519, 3816, 4511, 3039, 506, 1731, 1775, 5359, 2643, 4870, 4996, 4828, 4886, 2549, 348, 2804, 4968, 448, 1419, 1075, 1968, 5488, 1675, 3509, 3500, 4831, 656, 119, 87, 4364, 3876, 4777, 5007, 1117, 4491, 3018, 2616, 4608, 51, 2852, 4792, 2609, 3924, 2629, 570, 1510, 898, 3693, 4619, 5053, 5370, 4422, 3898, 1974, 4549, 3297, 5469, 4650, 1995, 4637, 5424, 1800, 3089, 5032, 514, 4087, 4841, 165, 482, 794, 1198, 2221, 3892, 835, 2550, 3288, 5113, 2175, 5145, 3170, 4441, and 2288.

[0038] In other embodiments of the method, at least one polymorphism maps to chromosome arm 7S is selected from the group consisting of SEQ ID NO: 1562, 4982, 590, 1245, 5466, 195, 2177, 4613, 4267, 2089, 127, 3417, 4604, 5482, 5518, 1609, 5417, 3654, 1314, 4735, 5365, 4022, 1401, 1784, 2004, 2364, 3098, 2705, 5460, 3079, 5146, 734, 2249, 5253, 5143, 1147, 1684, 5228, 534, 1306, 1544, 4987, 452, 557, 1037, 3815, 5336, 4628, 4031, 2333, 4373, 3637, 1977, 4854, 651, 1534, 1901, 4059, 2507, 2589, 4445, 5178, 591, 738, 1099, 2172, 2453, 5066, 4466, and 4958.

[0039] In other embodiments of the method, at least one polymorphism maps to chromosome arm 7L is selected from the group consisting of SEQ ID NO: 2995, 3122, 3524, 4848, 2798, 4569, 115, 2372, 2373, 3059, 1434, 5084, 1602, 1484, 351, 2252, 3801, 1580, 2008, 3311, 2084, 5022, 1267, 2413, 4184, 600, 3576, 429, 1081, 2794, 1024, 1608, 4266, 4672, 377, 820, 3984, 1536, 2436, 5076, 5327, 423, 424, 2997, 5380, 1819, 5499, 2660, 4415, 2841, 5247, 2357, 2228, 5343, 4465, 5301, 1420, 4846, 1137, 1152, 4884, 1124, 509, 1277, 3824, 2428, 4967, 1162, 2328, 726, 38, 499, 208, 3856, 1921, 4927, 5035, 4599, 2727, 5098, 1228, 2908, 483, 4723, 5391, 4485, 1065, 2721, 2135, 663, 3882, 163, 2819, 2147, 3542, 94, 1942, and 95.

[0040] In other embodiments of the method, at least one polymorphism maps to chromosome arm 8S is selected from the group consisting of SEQ ID NO: 4383, 4426, 5268, 4985, 4988, 4632, 2562, 3360, 5479, 3651, 3550, 1630, 1965, 3635, 5348, 4276, 1209, 2868, 3475, 4830, 693, 3379, 5446, 5210, 3473, 4881, 2653, 3557, 975, 865, 566, 5261, 584, 3570, 5106, 5456, 2105, 2280, and 2845.

[0041] In other embodiments of the method, at least one polymorphism maps to chromosome arm 8L is selected from the group consisting of SEQ ID NO: 3875, 4536, 4757, 5510, 18, 1276, 5238, 5496, 273, 2078, 3357, 4922, 868, 3429, 5017, 3563, 3842, 2468, 1874, 2160, 640, 4099, 2477, 2626, 5407, 2963, 3457, 4790, 1569, 5237, 2007, 3796, 5110, 3973, 4622, 5031, 1072, 1429, 3674, 5291, 1002, 4595, 4358, 344, 3685, 2724, 3004, 2778, 2469, 264, 3139, 4192, 1332, 3798, 1611, 4944, 5016, 3855, 985, 4113, 1302, 44, 1982, 2664, 5067, 5400, 1725, 2793, 4303, 1978, 2719, 4324, 3546, 4673, 4392, 4040, 3865, 2455, 2797, 2883, 5516, 3469, 935, 5062, 1483, 1184, 1428, 4334, 847, 4513, 775, 884, 540, 376, 2704, 755, 1981, 882, 5503, 338, 3818, 3960, 4057, 1591, 1896, 917, and 4084.

[0042] In other embodiments of the method, at least one polymorphism maps to chromosome arm 9S is selected from the group consisting of SEQ ID NO: 404, 4166, 3980, 3899, 2982, 1164, 1013, 3937, 2270, 4456, 5329, 2923, 4323, 5038, 4963, 3031, 5129, 3853, 4748, 2452, 3400, 4435, 818, 3478, 5373, 1991, 311, 3860, 4741, 4755, 5046, 5480, 4995, 5520, 1088, 2459, 4132, 2150, and 891.

[0043] In other embodiments of the method, at least one polymorphism maps to chromosome arm 9L is selected from the group consisting of SEQ ID NO: 187, 1824, 3507, 4684, 2408, 4705, 2765, 3280, 272, 340, 1774, 2361, 2605, 2636, 3014, 3077, 5108, 5428, 1934, 3285, 3994, 889, 4210, 4286, 2617, 4472, 5030, 2360, 3499, 4524, 4902, 5513, 5459, 2766, 1637, 2483, 3086, 3978, 4531, 4767, 1596, 2921, 4055, 4915, 1653, 4732, 4677, 5452, 2928, 5372, 4974, 5350, 3733, 4195, 2131, 2976, 3545, 5033, 2329, 91, 4768, 2039, 90, 257, 2371, 3431, 1587, 2777, 4552, 4706, 5366, 562, 468, 4347, 2614, 498, 3135, 4966, 4888, 4328, 3155, 1769, 1288, 2274, 4904, 4766, 4845, 65, 1128, 2067, 2049, 25, 3108, 4773, 5160, 200, 5085, 1737, 4341, 2940, 4909, 256, 1952, 5051, 531, 708, 2096, 5419, 5521, 4451, 326, 5338, 4526, 5100, 2053, 2869, 2848, 3757, 5121, 2867, 1326, 4506, 5483, 1275, 3568, 930, 373, 4494, 5487, 1021, and 3983.

[0044] In other embodiments of the method, at least one polymorphism maps to chromosome arm 10S is selected from the group consisting of SEQ ID NO: 2281, 3571, 3724, 3939, 3521, 4776, 2792, 4010, 5392, 1926, 1930, 4532, 2138, 4899, 4921, 5352, 5093, 4128, 4657, 696, 366, 493, 3136, and 5345.

[0045] In other embodiments of the method, at least one polymorphism maps to chromosome arm 10L is selected from the group consisting of SEQ ID NO: 13, 2145, 2234, 5478, 242, 5443, 2780, 3052, 5458, 3130, 839, 1069, 3374, 4724, 5060, 5303, 1412, 1331, 1583, 2895, 5368, 2113, 4429, 274, 2602, 4711, 5257, 4498, 5501, 1116, 1294, 4460, 2206, 2240, 2444, 4377, 2735, 2741, 3009, 3649, 3850, 2494, 4507, 4717, 5422, 852, 2122, 3337, 4211, 1614, 2557, 4001, 4043, 5082, 1809, 2516, 2475, 3946, 1452, 1201, 2214, 3795, 3813, 5194, 5318, 2471, 3496, 1701, 3776, 3895, 4262, 5280, 5522, 3573, 1371, 5241, 3786, 1779, 3302, 4408, 5337, 2873, 3925, 1573, 1200, 2356, 2520, 5295, 2209, 1157, 2554, 5137, 3063, 858, 3908, 4548, 4338, 2816, 4876, 4285, 4961, 478, 4306, 5151, 4642, 3902, 1575, 2919, 3885, 3870, 3762, 3164, 5065, 4161, 4572, 5226, 1933, 3025, 3812, 4999, 1607, 4005, 411, 3687, 2536, 5042, 3420, 5394, 2570, 2813, and 4903.

[0046] Further features and advantages of the present invention, as well as the structure and operation of various embodiments of the present invention, are described in detail below with reference to the accompanying drawings.

### BRIEF DESCRIPTION OF THE DRAWINGS

[0047] The accompanying drawings, which are incorporated in and form a part of the specification, illustrate the embodiments of the present invention and together with the description, serve to explain the principles of the invention. In the drawings:

[0048] FIG. 1 is a genetic map of corn showing the density of mapped polymorphisms of this invention.

[0049] FIG. 2 is an allelogram illustrating results of a genotyping assay.

### DEFINITIONS

[0050] As used herein certain terms and phrases are defined as follows.

[0051] An “allele” refers to an alternative sequence at a particular locus; the length of an allele can be as small as 1 nucleotide base, but is typically larger. Allelic sequence can be amino acid sequence or nucleic acid sequence. A “locus” is a short sequence that is usually unique and usually found at one particular location in the genome by a point of reference; e.g., a short DNA sequence that is a gene, or part of a gene or intergenic region. A locus of this invention can be a unique PCR product at a particular location in the genome. The loci of this invention comprise one or more polymorphisms; i.e., alternative alleles present in some individuals.

[0052] An “allelic state” refers to the nucleic acid sequence that is present in a nucleic acid molecule that contains a genomic polymorphism. For example, the nucleic acid sequence of a DNA molecule that contains a single nucleotide polymorphism may comprise an A, C, G, or T residue at the polymorphic position such that the allelic state is defined by which residue is present at the polymorphic position. For example, the nucleic acid sequence of an RNA molecule that contains a single nucleotide polymorphism may comprise an A, C, G, or U residue at the polymorphic position such that the allelic state is defined by which residue is present at the polymorphic position. Similarly, the nucleic acid sequence of a nucleic acid molecule that contains an Indel may comprise an insertion or deletion of nucleic acid sequences at the polymorphic position such that the allelic state is defined by the presence or absence of the insertion or deletion at the polymorphic position.

[0053] An “association”, when used in reference to a polymorphism and a phenotypic trait or trait index, refers to any statistically significant correlation between the presence of a given allele of a polymorphic locus and the phenotypic trait or trait index value, wherein the value may be qualitative or quantitative.

[0054] A “distinct set of nucleic acid molecules” refers to one or more nucleic acid molecules that hybridize to DNA sequences that are include, are immediately adjacent to, or are within about 1000 base pairs of either the 5′ or 3′ end of a given corn genomic polymorphism. In certain embodiments, the distinct set of nucleic acid molecules will comprise a single nucleic acid sequence that includes or is immediately adjacent to a given polymorphism. In other embodiments, the distinct set of nucleic acid molecules will comprise one or more nucleic acid sequences that include or are immediately adjacent to the polymorphism as well as other nucleic acid sequences that are within about 1000 base pairs of either the 5′ or 3′ end of the polymorphism.

[0055] “Genotype” refers to the specification of an allelic composition at one or more loci within an individual organism. In the case of diploid organisms, there are two alleles at each locus; a diploid genotype is said to be homozygous when the alleles are the same, and heterozygous when the alleles are different.

[0056] “Haplotype” refers to an allelic segment of genomic DNA that tends to be inherited as a unit; such haplotypes can be characterized by one or more polymorphic molecular markers and can be defined by a size of not greater than 10 centimorgans. With higher precision provided by a higher density of polymorphisms, haplotypes can be characterized by genomic windows, for example, in the range of 1-5 centimorgans.

[0057] The phrase “immediately adjacent”, when used to describe a nucleic acid molecule that hybridizes to DNA containing a polymorphism, refers to a nucleic acid that hybridizes to DNA sequences that directly abut the polymorphic nucleotide base position. For example, a nucleic acid molecule that can be used in a single base extension assay is “immediately adjacent” to the polymorphism.

[0058] “Interrogation position” refers to a physical position on a solid support that can be queried to obtain genotyping data for one or more predetermined genomic polymorphisms.

[0059] “Consensus sequence” refers to a constructed DNA sequence which identifies SNP and Indel polymorphisms in alleles at a locus. Consensus sequence can be based on either strand of DNA at the locus and states the nucleotide base of either one of each SNP in the locus and the nucleotide bases of all Indels in the locus. Thus, although a consensus sequence may not be a copy of an actual DNA sequence, a consensus sequence is useful for precisely designing primers and probes for actual polymorphisms in the locus.

[0060] “Phenotype” refers to the detectable characteristics of a cell or organism which are a manifestation of gene expression.

[0061] “Phenotypic trait index” refers to a composite value for at least two phenotypic traits, wherein each phenotypic trait may be assigned a weight to reflect relative importance for selection.

[0062] A “marker” or “molecular marker” as used herein is a DNA sequence (e.g. a gene or part of a gene) exhibiting polymorphism between two or more plants of the same species, which can be identified or typed by a simple assay. Useful polymorphisms include a single nucleotide polymorphisms (SNPs), insertions or deletions in DNA sequence (Indels), single feature polymorphisms (SFPs), and simple sequence repeats of DNA sequence (SSRs).

[0063] “Marker Assay” refers to a method for detecting a polymorphism at a particular locus using a particular method. Methods for detecting polymorphisms include, but are not limited to, restriction fragment length polymorphism (RFLP), single base extension, electrophoresis, sequence alignment, allelic specific oligonucleotide hybridization (ASO), RAPD, allele-specific primer extension sequencing (ASPE), DNA sequencing, RNA sequencing, microarray-based analyses, universal PCR, allele specific extension, hybridization, mass spectrometry, ligation, extension-ligation, endonuclease-mediated dye release assays and Flap Endonuclease-mediated assays. Exemplary single base extension assays are disclosed in U.S. Pat. No. 6,013,431. Exemplary endonuclease-mediated dye release assays for allelic state determination of SNPs where an endonuclease activity releases a reporter dye from a hybridization probe are disclosed in U.S. Pat. No. 5,538,848.

[0064] “Linkage” refers to relative frequency at which types of gametes are produced in a cross. For example, if locus A has genes “A” or “a” and locus B has genes “B” or “b” and a cross between parent I with AABB and parent B with aabb will produce four possible gametes where the genes are segregated into AB, Ab, aB and ab. The null expectation is that there will be independent equal segregation into each of the four possible genotypes, i.e. with no linkage ¼ of the gametes will of each genotype. Segregation of gametes into a genotypes differing from ¼ are attributed to linkage.

[0065] “Linkage disequilibrium” is defined in the context of the relative frequency of gamete types in a population of many individuals in a single generation. If the frequency of allele A is p, a is p′, B is q and b is q′, then the expected frequency (with no linkage disequilibrium) of genotype AB is pq, Ab is pq′, aB is p′q and ab is p′q′. Any deviation from the expected frequency is called linkage disequilibrium. Two loci are said to be “genetically linked” when they are in linkage disequilibrium.

[0066] “Quantitative Trait Locus (QTL)” refers to a locus that controls to some degree traits that are usually continuously distributed and which can be represented quantitatively.

[0067] As used herein “sequence identity” refers to the extent to which two optimally aligned polynucleotide or peptide sequences are invariant throughout a window of alignment of components, e.g. nucleotides or amino acids. An “identity fraction” for aligned segments of a test sequence and a reference sequence is the number of identical components which are shared by the two aligned sequences divided by the total number of components in reference sequence segment, i.e. the entire reference sequence or a smaller defined part of the reference sequence. “Percent identity” is the identity fraction times 100.

[0068] As used herein, “typing” refers to any method whereby the specific allelic form of a given corn genomic polymorphism is determined. For example, a single nucleotide polymorphism (SNP) is typed by determining which nucleotide is present (i.e. an A, G, T, or C). Insertion/deletions (Indels) are determined by determining if the Indel is present. Indels can be typed by a variety of assays including, but not limited to, marker assays.

### DETAILED DESCRIPTION OF THE PREFERRED EMBODIMENTS

[0069] The following detailed description relates to the isolated nucleic acid compositions and related methods for genotyping corn plants. In general, these compositions and methods can be used to genotype corn plants from the genus Zea. More specifically, corn plants from the species Zea mays and the subspecies Zea mays L. ssp. Mays can be genotyped using these compositions and methods. In an additional aspect, the corn plant is from the group Zea mays L. subsp. mays Indentata, otherwise known as dent corn. In another aspect, the corn plant is from the group Zea mays L. subsp. mays Indurata, otherwise known as flint corn. In another aspect, the corn plant is from the group Zea mays L. subsp. mays Saccharata, otherwise known as sweet corn. In another aspect, the corn plant is from the group Zea mays L. subsp. mays Amylacea, otherwise known as flour corn. In a further aspect, the corn plant is from the group Zea mays L. subsp. mays Everta, otherwise known as pop corn. Zea or corn plants that can be genotyped with the compositions and methods described herein include hybrids, inbreds, partial inbreds, or members of defined or undefined populations.

[0070] Isolated Nucleic Acid Molecules—Loci, Primers and Probes

[0071] The corn loci of this invention comprise a series of molecular markers which comprises at least 20 consecutive nucleotides and includes or is adjacent to one or more polymorphisms identified in Table 1 or Table 3. Such corn loci have a nucleic acid sequence having at least 90% sequence identity, more preferably at least 95% or even more preferably for some alleles at least 98% and in many cases at least 99% sequence identity, to the sequence of the same number of nucleotides in either strand of a segment of corn DNA which includes or is adjacent to the polymorphism. The nucleotide sequence of one strand of such a segment of corn DNA may be found in a sequence in the group consisting of SEQ ID NO: 1 through SEQ ID NO: 6552. It is understood by the very nature of polymorphisms that for at least some alleles there will be no identity to the disclosed polymorphism, per se. Thus, sequence identity can be determined for sequence that is exclusive of the disclosed polymorphism sequence. In other words, it is anticipated that additional alleles for the polymorphisms disclosed herein may exist, can be easily characterized by sequencing methods, and can be used for genotyping. For example, one skilled in the art will appreciate that for a single nucleotide polymorphism where just two polymorphic residues are disclosed (e.g. an “A” or a “G”) can also comprise other polymorphic residues (e.g. a “T” and/or a “G”).

[0072] The polymorphisms in each locus are identified more particularly in Table 1 or Table 3. SNPs are particularly useful as genetic markers because they are more stable than other classes of polymorphisms and are abundant in the corn genome. SNPs can result from insertions, deletions, and point mutations. In the present invention a SNP can represent a single indel event, which may consist of one or more base pairs, or a single nucleotide polymorphism. Polymorphisms shared by two or more individuals can result from the individuals descending from a common ancestor. This “Identity by descent” (IBD) characterizes two loci/segments of DNA that are carried by two or more individuals and were all derived from the same ancestor. “Identity by state” (IBS) characterizes two loci/segments of DNA that are carried by two or more individuals and have the same observable alleles at those loci. When a large set of crop lines is considered, and multiple lines have the same allele at a marker locus, it is necessary to ascertain whether IBS at the marker locus is a reliable predictor of IBD at the chromosomal region surrounding the marker locus. A good indication that a number of marker loci in a segment are enough to characterize IBD for the segment is that they can predict the allele present at other marker loci within the segment. The stability and abundance of SNPs in addition to the fact that they rarely arise independently makes them useful in determining IBD.

[0073] For many genotyping applications it is useful to employ as markers polymorphisms from more than one locus. Thus, one aspect of the invention provides a collection of nucleic acid molecules that permit typing of polymorphisms of different loci. The number of loci in such a collection can vary but will be a finite number, e.g. as few as 2 or 5 or 10 or 25 loci or more, for instance up to 40 or 75 or 100 or more loci.

[0074] Another aspect of the invention provides isolated nucleic acid molecules which are capable of hybridizing to the polymorphic maize loci of this invention. In certain embodiments of the invention, e.g. which provide PCR primers, such molecules comprise at least 15 nucleotide bases. Molecules useful as primers can hybridize under high stringency conditions to a one of the strands of a segment of DNA in a polymorphic locus of this invention. Primers for amplifying DNA are provided in pairs, i.e. a forward primer and a reverse primer. One primer will be complementary to one strand of DNA in the locus and the other primer will be complementary to the other strand of DNA in the locus, i.e. the sequence of a primer is preferably at least 90%, more preferably at least 95%, identical to a sequence of the same number of nucleotides in one of the strands. It is understood that such primers can hybridize to sequence in the locus which is distant from the polymorphism, e.g. at least 5, 10, 20, 50, 100, 200, 500 or up to about 1000 nucleotide bases away from the polymorphism. Design of a primer of this invention will depend on factors well known in the art, e.g. avoidance or repetitive sequence.

[0075] Another aspect of the isolated nucleic acid molecules of this invention are hybridization probes for polymorphism assays. In one aspect of the invention such probes are oligonucleotides comprising at least 12 nucleotide bases and a detectable label. The purpose of such a molecule is to hybridize, e.g. under high stringency conditions, to one strand of DNA in a segment of nucleotide bases which includes or is adjacent to the polymorphism of interest in an amplified part of a polymorphic locus. Such oligonucleotides are preferably at least 90%, more preferably at least 95%, identical to the sequence of a segment of the same number of nucleotides in one strand of maize DNA in a polymorphic locus. The detectable label can be a radioactive element or a dye. In preferred aspects of the invention, the hybridization probe further comprises a fluorescent label and a quencher, e.g. for use hybridization probe assays of the type known as Taqman® assays, available from AB Biosystems.

[0076] Isolated nucleic acid molecules of the present invention are capable of hybridizing to other nucleic acid molecules including, but not limited, to corn genomic DNA, cloned corn genomic DNA, and amplified corn genomic DNA under certain conditions. As used herein, two nucleic acid molecules are said to be capable of hybridizing to one another if the two molecules are capable of forming an anti-parallel, double-stranded nucleic acid structure. A nucleic acid molecule is said to be the “complement” of another nucleic acid molecule if they exhibit “complete complementarity” i.e. each nucleotide in one sequence is complementary to its base pairing partner nucleotide in another sequence. Two molecules are said to be “minimally complementary” if they can hybridize to one another with sufficient stability to permit them to remain annealed to one another under at least conventional “low-stringency” conditions. Similarly, the molecules are said to be “complementary” if they can hybridize to one another with sufficient stability to permit them to remain annealed to one another under conventional “high-stringency” conditions. Nucleic acid molecules which hybridize to other nucleic acid molecules, e.g. at least under low stringency conditions are said to be “hybridizable cognates” of the other nucleic acid molecules. Conventional stringency conditions are described by Sambrook et al., Molecular Cloning, A Laboratory Manual, 2nd Ed., Cold Spring Harbor Press, Cold Spring Harbor, N.Y. (1989) and by Haymes et al., Nucleic Acid Hybridization, A Practical Approach, IRL Press, Washington, D.C. (1985), each of which is incorporated herein by reference. Departures from complete complementarity are therefore permissible, as long as such departures do not completely preclude the capacity of the molecules to form a double-stranded structure. Thus, in order for a nucleic acid molecule to serve as a primer or probe it need only be sufficiently complementary in sequence to be able to form a stable double-stranded structure under the particular solvent and salt concentrations employed.

[0077] Appropriate stringency conditions which promote DNA hybridization, for example, 6.0× sodium chloride/sodium citrate (SSC) at about 45° C., followed by a wash of 2.0×SSC at 50° C., are known to those skilled in the art or can be found in Current Protocols in Molecular Biology, John Wiley & Sons, N.Y. (1989), 6.3.1-6.3.6, incorporated herein by reference. For example, the salt concentration in the wash step can be selected from a low stringency of about 2.0×SSC at 50° C. to a high stringency of about 0.2×SSC at 50° C. In addition, the temperature in the wash step can be increased from low stringency conditions at room temperature, about 22° C., to high stringency conditions at about 65° C. Both temperature and salt may be varied, or either the temperature or the salt concentration may be held constant while the other variable is changed.

[0078] In a preferred embodiment, a nucleic acid molecule of the present invention will specifically hybridize to one strand of a segment of corn DNA having a nucleic acid sequence as set forth in SEQ ID NO: 1 through SEQ ID NO: 6552 under moderately stringent conditions, for example at about 2.0×SSC and about 65° C., more preferably under high stringency conditions such as 0.2×SSC and about 65° C.

[0079] For assays where the molecule is designed to hybridize adjacent to a polymorphism which is detected by single base extension, e.g. of a labeled dideoxynucleotide, such molecules can comprise at least 15, more preferably at least 16 or 17, nucleotide bases in a sequence which is at least 90 percent, preferably at least 95%, identical to a sequence of the same number of consecutive nucleotides in either strand of a segment of polymorphic maize DNA. Oligonucleotides for single base extension assays are available from Orchid Biosystems.

[0080] Isolated nucleic acid molecules useful as hybridization probes for detecting a polymorphism in corn DNA can be designed for a variety of assays. For assays, where the probe is intended to hybridize to a segment including the polymorphism, such molecules can comprise at least 12 nucleotide bases and a detectable label. The sequence of the nucleotide bases is preferably at least 90 percent, more preferably at least 95%, identical to a sequence of the same number of consecutive nucleotides in either strand of a segment of corn DNA in a polymorphic locus of this invention. The detectable label is a dye at one end of the molecule. In preferred aspects the isolated nucleic acid molecule comprises a dye and dye quencher at the ends thereof. For SNP detection assays it is useful to provide such dye and dye quencher molecules in pairs, e.g. where each molecule has a distinct fluorescent dye at the 5′ end and has identical nucleotide sequence except for a single nucleotide polymorphism. It is well known in the art how to design oligonucleotide PCR probe pairs for annealing to a target segment of DNA for the purpose of reporting, wherein the sequence of the target is known such as the polymorphic marker sequences provided in the present invention.

[0081] For assays where the isolated nucleic molecule is designed to hybridize adjacent to a polymorphism which is detected by single base extension, such molecules can comprise at least 15, more preferably at least 16 or 17, nucleotide bases in a sequence which is at least 90 percent, preferably at least 95%, identical to a sequence of the same number of consecutive nucleotides in either strand of a segment of polymorphic corn DNA. In this case, the isolated nucleotide provides for incorporation of a detectable label. This detectable label can be an isotope, a fluorophore, an oxidant, a reductant, a nucleotide or a hapten.

[0082] For assays involving use of Flap endonucleases (i.e. Invader® assays). In certain embodiments, the compositions would comprise at least two isolated nucleic acid molecules for detecting a molecular marker representing a polymorphism in corn DNA, wherein a first nucleic acid molecule of the composition comprises an oligonucleotide that includes the polymorphic nucleotide residue and at least 8 nucleotides that are immediately adjacent to a 3′ end of said polymorphic nucleotide residue, wherein a second nucleic acid molecule of the composition comprises an oligonucleotide that includes the polymorphic nucleotide residue and at least 8 nucleotides that are immediately adjacent to a 5′ end of said polymorphic nucleotide residue, and wherein the polymorphism is identified in Table 1 or Table 3. In certain embodiments, isolated nucleic acid molecule compositions suitable for typing the polymorphisms of Table 1 or Table 3 with the Flap endonuclease would comprise at least one primary probe with a “universal” 5′ Flap sequence, at least one secondary or “Invader®” probe, and at least one “FRET” cassettes containing the labelled base and quencher base that contains sequences complementary to the “universal Flap sequence” that is released from the primary probe upon cleavage.

[0083] Identifying Polymorphisms

[0084] SNPs are the result of sequence variation and new polymorphisms can be detected by sequencing random genomic or cDNA molecules. In one aspect, polymorphisms in a genome can be determined by comparing cDNA sequence from different lines. While the detection of polymorphisms by comparing cDNA sequence is relatively convenient, evaluation of cDNA sequence allows no information about the position of introns in the corresponding genomic DNA. Moreover, polymorphisms in non-coding sequence cannot be identified from cDNA. This can be a disadvantage, e.g. when using cDNA-derived polymorphisms as markers for genotyping of genomic DNA. More efficient genotyping assays can be designed if the scope of polymorphisms includes those present in non-coding unique sequence.

[0085] Genomic DNA sequence is more useful than cDNA for identifying and detecting polymorphisms. Polymorphisms in a genome can be determined by comparing genomic DNA sequence from different lines. However, the genomic DNA of higher eukaryotes typically contain a large fraction of repetitive sequence and transposons. Genomic DNA can be more efficiently sequenced if the coding/unique fraction is enriched by subtracting or eliminating the repetitive sequence.

[0086] There are a number of strategies well known in the art that can be employed to enrich for coding/unique sequence. Examples of these include the use of enzymes which are sensitive to cytosine methylation, the use of the McrBC endonuclease to cleave repetitive sequence, and the printing of microarrays of genomic libraries which are then hybridized with repetitive sequence probes.

[0087] In a preferred embodiment, coding DNA is enriched by exploiting differences in methylation pattern; the DNA of higher eukaryotes tends to be very heavily methylated, however it is not uniformly methylated. In fact, repetitive sequence is much more highly methylated than coding sequence. See U.S. Pat. No. 6,017,704 for methods of mapping and assessment of DNA methylation patterns in CG islands. Briefly, some restriction endonucleases are sensitive to the presence of methylated cytosine residues in their recognition site. Such methylation sensitive restriction endonucleases may not cleave at their recognition site if the cytosine residue in either an overlapping 5′-CG-3′ or an overlapping 5′-CNG-3′ is methylated. In order to enrich for coding/unique sequence corn libraries can be constructed from genomic DNA digested with Pst I (or other methylation sensitive enzymes), and size fractionated by agarose gel electrophoresis.

[0088] One method for reducing repetitive DNA comprises the construction of reduced representation libraries by separating repetitive sequence from fragments of genomic DNA of at least two varieties of a species, fractionating the separated genomic DNA fragments based on size of nucleotide sequence and comparing the sequence of fragments in a fraction to determine polymorphisms. More particularly, these methods of identifying polymorphisms in genomic DNA comprises digesting total genomic DNA from at least two variants of a eukaryotic species with a methylation sensitive endonuclease to provide a pool of digested DNA fragments. The average nucleotide length of fragments is smaller for DNA regions characterized by a lower percent of 5-methylated cytosine. Such fragments are separable, e.g. by gel electrophoresis, based on nucleotide length. A fraction of DNA with less than average nucleotide length is separated from the pool of digested DNA. Sequences of the DNA in a fraction are compared to identify polymorphisms. As compared to coding sequence, repetitive sequence is more likely to comprise 5-methylated cytosine, e.g. in -CG- and -CNG- sequence segments. In one embodiment of the method, genomic DNA from at least two different inbred varieties of a crop plant is digested with a with a methylation sensitive endonuclease selected from the group consisting of Aci I, Apa I, Age I, Bsr F I, BssH II, Eag I, Eae I, Hha I, HinP1 I, Hpa II, Msp I, MspM II, Nar I, Not I, Pst I, Pvu I, Sac II, Sma I, Stu I and Xho I to provide a pool of digested DNA which is physically separated, e.g. by gel electrophoresis. Comparable size fractions of DNA are obtained from digested DNA of each of said varieties. DNA molecules from the comparable fractions are inserted into vectors to construct reduced representation libraries of genomic DNA clones which are sequenced and compared to identify polymorphisms.

[0089] An alternative method for enriching coding region DNA sequence enrichment uses McrBC endonuclease restriction, which cleaves methylated cytosine-containing DNA. Reduced representation libraries can be constructed using genomic DNA fragments which are cleaved by physical shearing or digestion with any restriction enzyme.

[0090] A further method to enrich for coding/unique sequence consists of construction of reduced representation libraries (using methylation sensitive or non-methylation sensitive enzymes), printing microarrays of the library on nylon membrane, followed by hybridization with probes made from repetitive elements known to be present in the library. The repetitive sequence elements are identified, and the library is re-arrayed by picking only the negative clones. Such methods provide segments of reduced representation genomic DNA from a plant which has genomic DNA comprising regions of DNA with relatively higher levels of methylated cytosine and regions of DNA with relatively lower levels of methylated cytosine. The reduced representation segments of this invention comprise genomic DNA from a region of DNA with relatively lower levels of methylated cytosine and are provided in fractions characterized by nucleotide size of said segments, e.g. in the range of 500 to 3000 bp.

[0091] Typing Polymorphisms in Corn Genomic DNA Samples

[0092] Polymorphisms in DNA sequences can be detected or typed by a variety of effective methods well known in the art including, but not limited to, those disclosed in U.S. Pat. Nos. 5,468,613 and 5,217,863; 5,210,015; 5,876,930; 6,030,787; 6,004,744; 6,013,431; 5,595,890; 5,762,876; 5,945,283; 5,468,613; 6,090,558; 5,800,944; and 5,616,464, all of which are incorporated herein by reference in their entireties. However, the compositions and methods of this invention can be used in conjunction with any polymorphism typing method to type polymorphisms in corn genomic DNA samples. These corn genomic DNA samples used include but are not limited to corn genomic DNA isolated directly from a corn plant, cloned corn genomic DNA, or amplified corn genomic DNA.

[0093] For instance, polymorphisms in DNA sequences can be detected by hybridization to allele-specific oligonucleotide (ASO) probes as disclosed in U.S. Pat. Nos. 5,468,613 and 5,217,863. U.S. Pat. No. 5,468,613 discloses allele specific oligonucleotide hybridizations where single or multiple nucleotide variations in nucleic acid sequence can be detected in nucleic acids by a process in which the sequence containing the nucleotide variation is amplified, spotted on a membrane and treated with a labeled sequence-specific oligonucleotide probe.

[0094] Target nucleic acid sequence can also be detected by probe ligation methods as disclosed in U.S. Pat. No. 5,800,944 where sequence of interest is amplified and hybridized to probes followed by ligation to detect a labeled part of the probe.

[0095] Microarrays can also be used for polymorphism detection, wherein oligonucleotide probe sets are assembled in an overlapping fashion to represent a single sequence such that a difference in the target sequence at one point would result in partial probe hybridization (Borevitz et al., Genome Res. 13:513-523 (2003); Cui et al., Bioinformatics 21:3852-3858 (2005). On any one microarray, it is expected there will be a plurality of target sequences, which may represent genes and/or noncoding regions wherein each target sequence is represented by a series of overlapping oligonucleotides, rather than by a single probe. This platform provides for high throughput screening a plurality of polymorphisms. A single-feature polymorphism (SFP) is a polymorphism detected by a single probe in an oligonucleotide array, wherein a feature is a probe in the array. Typing of target sequences by microarray-based methods is disclosed in U.S. Pat. Nos. 6,799,122; 6,913,879; and 6,996,476.

[0096] Target nucleic acid sequence can also be detected by probe linking methods as disclosed in U.S. Pat. No. 5,616,464 employing at least one pair of probes having sequences homologous to adjacent portions of the target nucleic acid sequence and having side chains which non-covalently bind to form a stem upon base pairing of said probes to said target nucleic acid sequence. At least one of the side chains has a photoactivatable group which can form a covalent cross-link with the other side chain member of the stem.

[0097] Other methods for detecting SNPs and Indels include single base extension (SBE) methods. Examples of SBE methods include, but are not limited, to those disclosed in U.S. Pat. Nos. 6,004,744; 6,013,431; 5,595,890; 5,762,876; and 5,945,283. SBE methods are based on extension of a nucleotide primer that is immediately adjacent to a polymorphism to incorporate a detectable nucleotide residue upon extension of the primer. In certain embodiments, the SBE method uses three synthetic oligonucleotides. Two of the oligonucleotides serve as PCR primers and are complementary to sequence of the locus of corn genomic DNA which flanks a region containing the polymorphism to be assayed. Following amplification of the region of the corn genome containing the polymorphism, the PCR product is mixed with the third oligonucleotide (called an extension primer) which is designed to hybridize to the amplified DNA immediately adjacent to the polymorphism in the presence of DNA polymerase and two differentially labeled dideoxynucleosidetriphosphates. If the polymorphism is present on the template, one of the labeled dideoxynucleosidetriphosphates can be added to the primer in a single base chain extension. The allele present is then inferred by determining which of the two differential labels was added to the extension primer. Homozygous samples will result in only one of the two labeled bases being incorporated and thus only one of the two labels will be detected. Heterozygous samples have both alleles present, and will thus direct incorporation of both labels (into different molecules of the extension primer) and thus both labels will be detected.

[0098] In a preferred method for detecting polymorphisms, SNPs and Indels can be detected by methods disclosed in U.S. Pat. Nos. 5,210,015; 5,876,930; and 6,030,787 in which an oligonucleotide probe having a 5′ fluorescent reporter dye and a 3′ quencher dye covalently linked to the 5′ and 3′ ends of the probe. When the probe is intact, the proximity of the reporter dye to the quencher dye results in the suppression of the reporter dye fluorescence, e.g. by Forster-type energy transfer. During PCR forward and reverse primers hybridize to a specific sequence of the target DNA flanking a polymorphism while the hybridization probe hybridizes to polymorphism-containing sequence within the amplified PCR product. In the subsequent PCR cycle DNA polymerase with 5′→3′ exonuclease activity cleaves the probe and separates the reporter dye from the quencher dye resulting in increased fluorescence of the reporter.

[0099] A useful assay is available from AB Biosystems as the Taqman® assay which employs four synthetic oligonucleotides in a single reaction that concurrently amplifies the corn genomic DNA, discriminates between the alleles present, and directly provides a signal for discrimination and detection. Two of the four oligonucleotides serve as PCR primers and generate a PCR product encompassing the polymorphism to be detected. Two others are allele-specific fluorescence-resonance-energy-transfer (FRET) probes. In the assay, two FRET probes bearing different fluorescent reporter dyes are used, where a unique dye is incorporated into an oligonucleotide that can anneal with high specificity to only one of the two alleles. Useful reporter dyes include, but are not limited to, 6-carboxy-4,7,2′,7′-tetrachlorofluorecein (TET), 2′-chloro-7′-phenyl-1,4-dichloro-6-carboxyfluorescein (VIC) and 6-carboxyfluorescein phosphoramidite (FAM). A useful quencher is 6-carboxy-N,N,N′,N′-tetramethylrhodamine (TAMRA). Additionally, the 3′ end of each FRET probe is chemically blocked so that it can not act as a PCR primer. Also present is a third fluorophore used as a passive reference, e.g., rhodamine X (ROX) to aid in later normalization of the relevant fluorescence values (correcting for volumetric errors in reaction assembly). Amplification of the genomic DNA is initiated. During each cycle of the PCR, the FRET probes anneal in an allele-specific manner to the template DNA molecules. Annealed (but not non-annealed) FRET probes are degraded by TAQ DNA polymerase as the enzyme encounters the 5′ end of the annealed probe, thus releasing the fluorophore from proximity to its quencher. Following the PCR, the fluorescence of each of the two fluorescers, as well as that of the passive reference, is determined fluorometrically. The normalized intensity of fluorescence for each of the two dyes will be proportional to the amounts of each allele initially present in the sample, and thus the genotype of the sample can be inferred.

[0100] To design primers and probes for the assay the locus sequence is first masked to prevent design of any of the three primers to sites that match known corn repetitive elements (e.g., transposons) or are of very low sequence complexity (di- or tri-nucleotide repeat sequences). Design of primers to such repetitive elements will result in assays of low specificity, through amplification of multiple loci or annealing of the FRET probes to multiple sites.

[0101] PCR primers are designed (a) to have a length in the size range of 15 to 25 bases and matching sequences in the polymorphic locus, (b) to have a calculated melting temperature in the range of 57 to 60° C., e.g. corresponding to an optimal PCR annealing temperature of 52 to 55° C., (c) to produce a product which includes the polymorphic site and typically has a length in the size range of 75 to 250 base pairs. However, PCR techniques that permit amplification of fragments of up to 1000 base pairs or more in length have also been disclosed in U.S. Pat. No. 6,410,277. The PCR primers are preferably located on the locus so that the polymorphic site is at least one base away from the 3′ end of each PCR primer. However, it is understood that the PCR primers can be up to 1000 base pairs or more away from the polymorphism and still provide for amplification of a corresponding DNA fragment of 1000 base pairs or more that contains the polymorphism and can be used in typing assays. The PCR primers must not contain regions that are extensively self- or inter-complementary.

[0102] FRET probes are designed to span the sequence of the polymorphic site, preferably with the polymorphism located in the 3′ most ⅔ of the oligonucleotide. In the preferred embodiment, the FRET probes will have incorporated at their 3′ end a chemical moiety which, when the probe is annealed to the template DNA, binds to the minor groove of the DNA, thus enhancing the stability of the probe-template complex. The probes should have a length in the range of 12 to 17 bases, and with the 3′MGB, have a calculated melting temperature of 5 to 7° C. above that of the PCR primers. Probe design is disclosed in U.S. Pat. Nos. 5,538,848, 6,084,102, and 6,127,121.

[0103] Oligonucleotide probes for typing single nucleotide polymorphisms through use of Flap Endonuclease-mediated (Invader®, Third Wave Technologies, Madison Wis.) assays are also contemplated. In these assays, a flap endonuclease (cleavase) cuts a triple-helix created by hybridization of two overlapping oligonucleotides to the sequence that is typed (Lyamichev et al., Nat. Biotechnol., 17: 292-296, 1999). The sequence that is typed can be either corn genomic DNA, cloned corn genomic DNA or amplified corn genomic DNA. Cleavage of one of the oligonucleotides that hybridizes to the sequence to be typed releases a flap that in turn forms a triple helix with a “FRET Cassette” oligonucleotide, resulting in a secondary cleavage reaction that releases a fluorescence resonance energy transfer (FRET) label. Embodiments where a single allele of a polymorphism is typed using a single FRET label have been described (Mein C. A., et al. Genome Res., 10: 330-343, 2000). In other embodiments of this method, two alleles of a polymorphism can be simultaneously typed by using different FRET labels. (Lyamichev et al., Ibid). High-throughput Flap Endonuclease-mediated assays have also been described that are suitable for creating sets of nucleotides for typing multiple polymorphisms (Olivier, et al., Nucleic Acids Res. 30(12): e53, 2002).

[0104] Isolated nucleic acid molecule compositions suitable for typing the polymorphisms of Table 1 or Table 3 with the cleavase can comprise at least one primary probe with a “universal” 5′ flap sequence, at least one secondary or “Invader®” probe, and at least one “FRET” cassettes containing the labelled base and quencher base that contains sequences complementary to the “universal flap sequence” that is released from the primary probe upon cleavage. When the typed sequence is amplified corn genomic DNA, flanking PCR primers similar to those described in the preceding paragraphs can also be used. The design of such probes requires only the provision of about 40 to 50 nucleotides on either side of the polymorphic base noted in Table 1 or Table 3. General aspects of designing probes for Flap endonuclease assays are described in “Single Nucleotide Polymorphisms” (Methods and Protocols) Volume 212, Chapter 16, V. Lyamichev and B. Neri pp. 229-240 Humana Press. 2002).

[0105] Use of Polymorphisms to Establish Marker/Trait Associations

[0106] The polymorphisms in the loci of this invention can be used in the identification of marker/trait associations which are inferred from statistical analysis of genotypes and phenotypes of the members of a population. These members may be individual organisms, e.g. corn, families of closely related individuals, inbred lines, doubled haploids or other groups of closely related individuals. Such corn groups are referred to as “lines”, indicating line of descent. The population may be descended from a single cross between two individuals or two lines (e.g. a mapping population) or it may consist of individuals with many lines of descent. Each individual or line is characterized by a single or average trait phenotype and by the genotypes at one or more marker loci.

[0107] Several types of statistical analysis can be used to infer marker/trait association from the phenotype/genotype data, but a basic idea is to detect molecular markers, i.e. polymorphisms, for which alternative genotypes have significantly different average phenotypes. For example, if a given marker locus A has three alternative genotypes (AA, Aa and aa), and if those three classes of individuals have significantly different phenotypes, then one infers that locus A is associated with the trait. The significance of differences in phenotype may be tested by several types of standard statistical tests such as linear regression of molecular marker genotypes on phenotype or analysis of variance (ANOVA). Commercially available, statistical software packages commonly used to do this type of analysis include SAS Enterprise Miner (SAS Institute Inc., Cary, N.C.) and Splus (Insightful Corporation. Cambridge, Mass.). When many molecular markers are tested simultaneously, an adjustment such as Bonferonni correction is made in the level of significance required to declare an association.

[0108] For the purpose of QTL mapping, the markers included should be diagnostic of origin in order for inferences to be made about subsequent populations. Molecular markers based on SNPs are ideal for mapping because the likelihood that a particular SNP allele is derived from independent origins in the extant populations of a particular species is very low. As such, SNP molecular markers are useful for tracking and assisting introgression of QTLs, particularly in the case of haplotypes.

[0109] Often the goal of an association study is not simply to detect marker/trait associations, but to estimate the location of genes affecting the trait directly (i.e. QTLs) relative to the marker locations. In a simple approach to this goal, one makes a comparison among marker loci of the magnitude of difference among alternative genotypes or the level of significance of that difference. Trait genes are inferred to be located nearest the marker(s) that have the greatest associated genotypic difference. The genetic linkage of additional marker molecules can be established by a gene mapping model such as, without limitation, the flanking marker model reported by Lander et al. (Lander et al. 1989 Genetics, 121:185-199), and the interval mapping, based on maximum likelihood methods described therein, and implemented in the software package MAPMAKER/QTL (Lincoln and Lander, Mapping Genes Controlling Quantitative Traits Using MAPMAKER/QTL, Whitehead Institute for Biomedical Research, Massachusetts, (1990). Additional software includes Qgene, Version 2.23 (1996), Department of Plant Breeding and Biometry, 266 Emerson Hall, Cornell University, Ithaca, N.Y.). Use of Qgene software is a particularly preferred approach.

[0110] A maximum likelihood estimate (MLE) for the presence of a marker is calculated, together with an MLE assuming no QTL effect, to avoid false positives. A log₁₀ of an odds ratio (LOD) is then calculated LOD=log₁₀ (MLE for the presence of a QTL/MLE given no linked QTL). The LOD score essentially indicates how much more likely the data are to have arisen assuming the presence of a QTL versus in its absence. The LOD threshold value for avoiding a false positive with a given confidence, say 95%, depends on the number of markers and the length of the genome. Graphs indicating LOD thresholds are set forth in Lander et al. (1989), and further described by Arús and Moreno-González, Plant Breeding, Hayward, Bosemark, Romagosa (eds.) Chapman & Hall, London, pp. 314-331 (1993).

[0111] Additional models can be used. Many modifications and alternative approaches to interval mapping have been reported, including the use of non-parametric methods (Kruglyak et al. 1995 Genetics, 139:1421-1428). Multiple regression methods or models can be also be used, in which the trait is regressed on a large number of markers (Jansen, Biometrics in Plant Breed, van Oijen, Jansen (eds.) Proceedings of the Ninth Meeting of the Eucarpia Section Biometrics in Plant Breeding, The Netherlands, pp. 116-124 (1994); Weber and Wricke, Advances in Plant Breeding, Blackwell, Berlin, 16 (1994)). Procedures combining interval mapping with regression analysis, whereby the phenotype is regressed onto a single putative QTL at a given marker interval, and at the same time onto a number of markers that serve as ‘cofactors,’ have been reported by Jansen et al. (Jansen et al. 1994 Genetics, 136:1447-1455) and Zeng (Zeng 1994 Genetics 136:1457-1468). Generally, the use of cofactors reduces the bias and sampling error of the estimated QTL positions (Utz and Melchinger, Biometrics in Plant Breeding, van Oijen, Jansen (eds.) Proceedings of the Ninth Meeting of the Eucarpia Section Biometrics in Plant Breeding, The Netherlands, pp. 195-204 (1994), thereby improving the precision and efficiency of QTL mapping (Zeng 1994). These models can be extended to multi-environment experiments to analyze genotype-environment interactions (Jansen et al. 1995 Theor. Appl. Genet. 91:33-3).

[0112] An alternative to traditional QTL mapping involves achieving higher resolution by mapping haplotypes, versus individual markers (Fan et al. 2006 Genetics 172:663-686) as one of the limitations of traditional QTL mapping research has been the fact that inferences are restricted to the particular parents of the mapping population and the genes or gene combinations of these parental varieties. This approach tracks blocks of DNA known as haplotypes, as defined by polymorphic markers, which are assumed to be identical by descent in the mapping population. It has long been recognized that genes and genomic sequences may be identical by state (i.e., identical by independent origins) or identical by descent (i.e., through historical inheritance from a common progenitor) which has tremendous bearing on studies of linkage disequilibrium and, ultimately, mapping studies (Nordberg et al. 2002 Trends Gen.). Historically, genetic markers were not appropriate for distinguishing identical in state or by descent. However, newer classes of markers, such as SNPs (single nucleotide polymorphisms), are more diagnostic of origin. The likelihood that a particular SNP allele is derived from independent origins in the extant populations of a particular species is very low. Polymorphisms occurring in linked genes are randomly assorted at a slow, but predictable rate, described by the decay of linkage disequilibrium or, alternatively, the approach of linkage equilibrium. Consequences of this well-established scientific discovery are that long stretches of coding DNA, defined by a specific combination of polymorphisms, are very unique and extremely improbable of existing in duplication except through linkage disequilibrium, which is indicative of recent co-ancestry from a common progenitor. The probability that a particular genomic region, as defined by some combination of alleles, indicates absolute identity of the entire intervening genetic sequence is dependent on the number of linked polymorphisms in this genomic region, barring the occurrence of recent mutations in the interval. Herein, such genomic regions are referred to as haplotype windows. Each haplotype within that window is defined by specific combinations of alleles; the greater the number of alleles, the greater the number of potential haplotypes, and the greater the certainty that identity by state is a result of identity by descent at that region. During the development of new lines, ancestral haplotypes are maintained through the process and are typically thought of as ‘linkage blocks’ that are inherited as a unit through a pedigree. Further, if a specific haplotype has a known effect, or phenotype, it is possible to extrapolate its effect in other lines with the same haplotype, as determined using one or more diagnostic markers for that haplotype window.

[0113] This assumption results in a larger effective sample size, offering greater resolution of QTL. Methods for determining the statistical significance of a correlation between a phenotype and a genotype, in this case a haplotype, may be determined by any statistical test known in the art and with any accepted threshold of statistical significance being required. The application of particular methods and thresholds of significance are well with in the skill of the ordinary practitioner of the art.

[0114] Construction of Genetic Maps

[0115] In another aspect of the invention the polymorphism in the loci of the invention are mapped onto the corn genome, e.g. as a genetic map of the corn genome comprising map positions of two or more polymorphisms, as indicated in Table 1, more preferably as indicated in Table 3. Such a genetic map is illustrated in FIG. 1. The genetic map data can also be recorded on computer readable medium. Preferred embodiments of the invention provide genetic maps of polymorphisms at high densities, e.g. at least 150 or more, say at least 500 or 1000, polymorphisms across a map of the corn genome. Especially useful genetic maps comprise polymorphisms at an average distance of not more than 10 centiMorgans (cM) on a linkage group.

[0116] Linkage Disequilibrium Mapping and Association Studies

[0117] Another approach to determining trait gene location is to analyze marker/trait associations in a population within which individuals differ at both trait and marker loci. Certain marker alleles may be associated with certain trait locus alleles in this population due to population genetic process such as the unique origin of mutations, founder events, random drift and population structure. This association is referred to as linkage disequilibrium.

[0118] In plant breeding populations, linkage disequilibrium (LD) is the level of departure from random association between two or more loci in a population and LD often persists over large chromosomal segments. Although it is possible for one to be concerned with the individual effect of each gene in the segment, for a practical plant breeding purpose the emphasis is typically on the average impact the region has for the trait(s) of interest when present in a line, hybrid or variety. In linkage disequilibrium mapping, one compares the trait values of individuals with different genotypes at a marker locus. Typically, a significant trait difference indicates close proximity between marker locus and one or more trait loci. If the marker density is appropriately high and the linkage disequilibrium occurs only between very closely linked sites on a chromosome, the location of trait loci can be very precise.

[0119] Marker-Assisted Breeding and Marker-Assisted Selection

[0120] When a quantitative trait locus (QTL) has been localized in the vicinity of molecular markers, those markers can be used to select for improved values of the trait without the need for phenotypic analysis at each cycle of selection. In marker-assisted breeding and marker-assisted selection, associations between QTL and markers are established initially through genetic mapping analysis (as in A.1 or A.2). In the same process, one determines which molecular marker alleles are linked to favorable QTL alleles. Subsequently, marker alleles associated with favorable QTL alleles are selected in the population. This procedure will improve the value of the trait provided that there is sufficiently close linkage between markers and QTLs. The degree of linkage required depends upon the number of generations of selection because, at each generation, there is opportunity for breakdown of the association through recombination.

[0121] The associations between specific marker alleles and favorable QTL alleles also can be used to predict what types of progeny may segregate from a given cross. This prediction may allow selection of appropriate parents to generation populations from which new combinations of favorable QTL alleles are assembled to produce a new inbred line. For example, if line A has marker alleles previously known to be associated with favorable QTL alleles at loci 1, 20 and 31, while line B has marker alleles associated with favorable effects at loci 15, 27 and 29, then a new line could be developed by crossing A×B and selecting progeny that have favorable alleles at all 6 QTL.

[0122] Molecular markers are used to accelerate introgression of transgenes into new genetic backgrounds (i.e. into a diverse range of germplasm). Simple introgression involves crossing a transgenic line to an elite inbred line and then backcrossing the hybrid repeatedly to the elite (recurrent) parent, while selecting for maintenance of the transgene. Over multiple backcross generations, the genetic background of the original transgenic line is replaced gradually by the genetic background of the elite inbred through recombination and segregation. This process can be accelerated by selection on molecular marker alleles that derive from the recurrent parent.

[0123] Further, a fingerprint of an inbred line is the combination of alleles at a set of two or more marker loci. High density fingerprints can be used to establish and trace the identity of germplasm, which has utility in establishing a database of marker-trait associations to benefit an overall crop breeding program, as well as germplasm ownership protection.

[0124] Methods for Selecting Parent, Progeny, or Tester Plants for Plant Breeding

[0125] It is also contemplated that the polymorphism provided herein can be used to select a parent, progeny, or tester plants for plant breeding. The ability to select such plants from populations of plants that are otherwise phenotypically indistinguishable can accelerate plant breeding and reduce costs incurred by performing phenotypic trait analyses. The methods of selecting plants for breeding comprise the steps of a) determining associations between a plurality of polymorphisms identified in Table 1 or Table 3 and a plurality of traits in at least a first and a second inbred line of corn; b) determining an allelic state of one or a plurality of polymorphism in a parent, progeny or tester plant; and c) selecting the parent, progeny or tester that has a more favorable combination of associated traits. In certain applications, the parent, progeny or tester plant selected by this method is an inbred corn line. In other embodiments, the favorable combination of associated traits provides for improved heterosis.

[0126] In one embodiment, determining the genotype of at least two polymorphisms will assist in the selection of parents for use in breeding crosses. This determination confers an advantage to the breeder for the creation of crosses wherein at least two preferred genomic regions are targeted in order to generate progeny with the at least two preferred genomic regions. In another aspect, the determination of the genotype for at least two polymorphisms can provide the basis for selection decisions among progeny wherein those progeny comprising preferred genomic regions are advanced in a breeding program. In yet another aspect, tester lines, which are used to evaluate the combining ability of inbreds in hybrid combinations, can be chosen for inclusion in an inbred testing scheme based on the presence, or absence, of at least two genomic regions in order to ensure crosses are made between distinct germplasm pools, i.e., different heterotic groups.

[0127] Hybrid Prediction

[0128] Commercial corn seed is produced by making hybrids between two elite inbred lines that belong to different “heterotic groups”. These groups are sufficiently distinct genetically that hybrids between them show high levels of heterosis or hybrid vigor (i.e. increased performance relative to the parental lines). By analyzing the marker constitution of good hybrids, one can identify sets of alleles at different loci in both male and female lines that combine well to produce heterosis. Understanding these patterns, and knowing the marker constitution of different inbred lines, can allow prediction of the level of heterosis between different pairs of lines. These predictions can narrow down the possibilities of which line(s) of opposite heterotic group should be used to test the performance of a new inbred line.

[0129] This invention provides methods for improving heterosis in hybrid corn. In such methods associations are developed between a plurality of polymorphisms which are linked to polymorphic loci of the invention and traits in more than two inbred lines of corn. Two of such inbred lines having complementary heterotic groups which are predicted to improve heterosis are selected for breeding. The methods for improving heterosis comprise the steps of: (a) determining associations between a plurality of polymorphisms identified in Table 1 or Table 3 and a plurality of traits in more than two inbred lines of corn; (b) assigning two inbred lines selected from the inbred lines of step (a) to heterotic groups, (c) making at least one cross between at least two inbred lines from step (b), wherein each inbred line comes from a distinct and complementary heterotic group and wherein the complementary heterotic groups are optimized for genetic features that improve heterosis; and (d) obtaining a hybrid progeny plant from said cross in step (c), wherein said hybrid progeny plant displays increased heterosis relative to progeny derived from a cross with an unselected inbred line. These methods can also comprise traditional single crosses (i.e., between a two inbred lines, ideally from different heterotic groups), three-way crosses (a single cross is followed by a cross to a third inbred line), and double crosses (also known as a four-way cross, this is crossing the progeny of two single crosses) in step (c). Crosses can be effected by making manual crosses between selected male-fertile parents or by using male sterility systems. Development and selection of elite inbred lines, the crossing of these lines and selection of superior hybrid crosses of identify new elite corn hybrids is described in Bernardo, Breeding for Quantitative Traits in Plants, Stemma Press, Woodbury, Minn., 2002.

[0130] Identity by Descent

[0131] One theory of heterosis predicts that regions of identity by descent (IBD) between the male and female lines used to produce a hybrid will reduce hybrid performance. Identity by descent can be inferred from patterns of marker alleles in different lines. An identical string of markers at a series of adjacent loci may be considered identical by descent if it is unlikely to occur independently by chance. Analysis of marker fingerprints in male and female lines can identify regions of IBD. Knowledge of these regions can inform the choice of hybrid parents, since avoiding IBD in hybrids is likely to improve performance. This knowledge may also inform breeding programs in that crosses could be designed to produce pairs of inbred lines (one male and one female) that show little or no IBD.

[0132] Libraries of Nucleic Acid Molecules for Use in Genotyping

[0133] Libraries of nucleic acids provided by this invention can be used in activities related to corn germplasm improvement, including but not limited to using the plant for making breeding crosses, further genetic or phenotypic testing of the plant, advancement of the plant through self fertilization, use of the plant or parts thereof for transformation, and use of the plant or parts thereof for mutagenesis. The distinct sets of nucleic acids in the libraries can be sampled, accessed, or individually queried for any set or subset or combination thereof to type any of the corn genomic DNA provided herein in Tables 1 or 3. In general, the libraries comprising at least two distinct sets of nucleic acid molecules wherein each of said distinct sets of nucleic acid molecules permits typing of a corresponding corn genomic DNA polymorphism identified in Table 1 or Table 3.

[0134] In one embodiment, the distinct sets of nucleic acid molecules that permits typing of a corresponding corn genomic DNA polymorphism identified in Table 1 or Table 3 are distributed in individual wells of a microtiter plate. In certain embodiments, each well of the microtiter plate will contain one or more nucleic acid molecules that permit typing of just one corn polymorphism identified in Table 1 or Table 3. However, other embodiments where each well of the microtiter plate contains one or more nucleic acid molecules that permit typing of more than one corn polymorphism identified in Table 1 or Table 3 are also contemplated. The microtiter plates can have as few as 8 wells, or as many as 24, 96, 384, 1536 or 3456 wells. The microtiter plates can be constructed from materials including, but not limited, to polystyrene, polypropylene, or cyclo-olefin plastics. The nucleic acid molecules in each well can be either in solution or in a dry (i.e. lyophilized form). In general, the nucleic acids will be distributed to the wells of the microtiter plate such that the nucleic acids in each well of the microtiter plate are known. However, in other embodiments where the nucleic cid molecules are associated with a unique identifier (such as a unique dye or other unique identifying label), the nucleic acids can be randomly distributed into the wells of the microtiter plate. As is clear from this description, libraries comprising nucleic acids immobilized on solid supports (such as beads) that are distributed in wells of microtiter plates are also contemplated.

[0135] In other embodiments, the nucleic acids that permit typing of a corn genomic polymorphism identified in Table 1 or Table 3 are immobilized (i.e. covalently linked) to a solid support. Solid supports include, but are not limited to, beads, chips, arrays, or filters.

[0136] The beads used as a solid support can be magnetic beads to facilitate purification of hybridization complexes. Alternatively, the beads can contain a unique identifying label. In particular, beads dyed with fluorochromes that can be distinguished by their spectrophotometric or fluorometric propeties can be coupled to the nucleic acid molecules for typing polymorphisms. Such bead based systems for typing polymorphisms have been described (U.S. Pat. No. 5,736,330). Dye labelled beads, analysis reagents and apparati for typing polymorphisms have also been described (U.S. Pat. Nos. 6,649,414, 6,599,331, and 6,592,822) and are available from Luminex Corporation (Austin, Tex., USA). As noted above, the bead-linked nucleic acid molecules of the library can also be

[0137] The chips, arrays, or filters can also be used to immobilize the nucleic acid molecules for typing of the polymorphisms of Tables 1 or Table 3. In certain embodiments, the nucleic acid markers for typing a given polymorphism will be immobilized at a defined physical location on the array such that typing data from that location that corresponds to a given polymorphism can be generated and recorded for subsequent analysis. Methods of making and using arrays for typing of polymorphisms include, but are not limited to, those described in U.S. Pat. No. 5,858,659 (for hybridization based methods) and U.S. Pat. No. 6,294,336 (for single base extension methods).

[0138] Use of Polymorphism Assays for Mapping a Library of DNA Clones

[0139] The polymorphisms and loci represented by the molecular markers of this invention are useful for identifying and mapping DNA sequence of QTLs and genes linked to the molecular markers. For instance, BAC or YAC clone libraries can be queried using molecular markers linked to a trait to find a clone containing specific QTLs and genes associated with the trait. For instance, QTLs and genes in a plurality, e.g. hundreds or thousands, of large, multi-gene sequences can be identified by hybridization with an oligonucleotide probe which hybridizes to a mapped and/or linked molecular marker, wherein one or more molecular markers can be assayed. Such hybridization screening can be improved by providing clone sequence in a high density array. The screening method is more preferably enhanced by employing a pooling strategy to significantly reduce the number of hybridizations required to identify a clone containing the molecular marker. When the molecular markers are mapped, the screening effectively maps the clones.

[0140] For instance, in a case where thousands of clones are arranged in a defined array, e.g. in 96 well plates, the plates can be arbitrarily arranged in three-dimensionally, arrayed stacks of wells each comprising a unique DNA clone. The wells in each stack can be represented as discrete elements in a three dimensional array of rows, columns and plates. In one aspect of the invention the number of stacks and plates in a stack are about equal to minimize the number of assays. The stacks of plates allow the construction of pools of cloned DNA.

[0141] For a three-dimensionally arrayed stack pools of cloned DNA can be created for (a) all of the elements in each row, (b) all of the elements of each column, and (c) all of the elements of each plate. Hybridization screening of the pools with an oligonucleotide probe which hybridizes to a molecular marker unique to one of the clones will provide a positive indication for one column pool, one row pool and one plate pool, thereby indicating the well element containing the target clone.

[0142] In the case of multiple stacks, additional pools of all of the clone DNA in each stack allows indication of the stack having the row-column-plate coordinates of the target clone. For instance, a 4608 clone set can be disposed in 48 96-well plates. The 48 plates can be arranged in 8 sets of 6 plate stacks providing 6×12×8 three-dimensional arrays of elements, i.e. each stack comprises 6 stacks of 8 rows and 12 columns. For the entire clone set there are 36 pools, i.e. 6 stack pools, 8 row pools, 12 column pools and 8 stack pools. Thus, a maximum of 36 hybridization reactions is required to find the clone harboring QTLs or genes associated or linked to each mapped molecular marker.

[0143] Once a clone is identified, oligonucleotide primers designed from the locus of the molecular marker can be used for positional cloning of the linked QTL and/or genes.

[0144] Computer Readable Media and Databases

[0145] The sequences of nucleic acid molecules of this invention can be “provided” in a variety of mediums to facilitate use, e.g. a database or computer readable medium, which can also contain descriptive annotations in a form that allows a skilled artisan to examine or query the sequences and obtain useful information. In one embodiment of the invention computer readable media may be prepared that comprise nucleic acid sequences where at least 10% or more, e.g. at least 25%, or even at least 50% or more of the sequences of the loci and nucleic acid molecules representing the molecular markers of this invention. For instance, such database or computer readable medium may comprise sets of the loci of this invention or sets of primers and probes useful for assaying the molecular markers of this invention. In addition such database or computer readable medium may comprise a figure or table of the mapped or unmapped molecular markers or this invention and genetic maps.

[0146] As used herein “database” refers to any representation of retrievable collected data including computer files such as text files, database files, spreadsheet files and image files, printed tabulations and graphical representations and combinations of digital and image data collections. In a preferred aspect of the invention, “database” refers to a memory system that can store computer searchable information. Currently, preferred database applications include those provided by DB2, Sybase and Oracle.

[0147] As used herein, “computer readable media” refers to any medium that can be read and accessed directly by a computer. Such media include, but are not limited to: magnetic storage media, such as floppy discs, hard disc, storage medium and magnetic tape; optical storage media such as CD-ROM; electrical storage media such as RAM, DRAM, SRAM, SDRAM, ROM; and PROMs (EPROM, EEPROM, Flash EPROM), and hybrids of these categories such as magnetic/optical storage media. A skilled artisan can readily appreciate how any of the presently known computer readable mediums can be used to create a manufacture comprising computer readable medium having recorded thereon a nucleotide sequence of the present invention.

[0148] As used herein, “recorded” refers to the result of a process for storing information in a retrievable database or computer readable medium. For instance, a skilled artisan can readily adopt any of the presently known methods for recording information on computer readable medium to generate media comprising the mapped polymorphisms and other nucleotide sequence information of the present invention. A variety of data storage structures are available to a skilled artisan for creating a computer readable medium where the choice of the data storage structure will generally be based on the means chosen to access the stored information. In addition, a variety of data processor programs and formats can be used to store the polymorphisms and nucleotide sequence information of the present invention on computer readable medium.

[0149] Computer software is publicly available which allows a skilled artisan to access sequence information provided in a computer readable medium. The examples which follow demonstrate how software which implements a search algorithm such as the BLAST algorithm (Altschul et al., J. Mol. Biol. 215:403-410 (1990), incorporated herein by reference) and the BLAZE algorithm (Brutlag et al., Comp. Chem. 17:203-207 (1993), incorporated herein by reference) on a Sybase system can be used to identify DNA sequence which is homologous to the sequence of loci of this invention with a high level of identity. Sequence of high identity can be compared to find polymorphic markers useful with corn varieties.

[0150] The present invention further provides systems, particularly computer-based systems, which contain the sequence information described herein. Such systems are designed to identify commercially important sequence segments of the nucleic acid molecules of this invention. As used herein, “a computer-based system” refers to the hardware, software and memory used to analyze the nucleotide sequence information. A skilled artisan can readily appreciate that any one of the currently available computer-based system are suitable for use in the present invention.

[0151] As indicated above, the computer-based systems of the present invention comprise a database having stored therein polymorphic markers, genetic maps, and/or the sequence of nucleic acid-molecules of the present invention and the necessary hardware and software for supporting and implementing genotyping applications. Such computer-based systems can be used to read, sort or analyze corn genotypic data. Key components of the computer-based system include: a) a data storage device comprising a computer readable medium wherein at least two corn genomic DNA polymorphisms identified in Table 1 or Table 3 are recorded thereon; b) a search device for comparing a corn genomic DNA sequence from at least one test corn plant to the polymorphism sequences of the data storage device of step (a) to identify homologous or non-homologous sequences; and, c) a retrieval device for identifying the homologous or non-homologous sequences(s) of the test corn genomic sequences of step (b). Computer based methods and systems (e.g. apparati) for conducting DNA database queries are described in U.S. Pat. No. 6,691,109

[0152] In a useful aspect of the invention a data set of polymorphic corn loci from Table 1 or Table 3 is recorded on a computer readable medium. In one aspect of the invention the corn genomic polymorphisms are provided in one or more data sets of DNA sequences, i.e. data sets comprising up to a finite number of distinct sequences of polymorphic loci that are recorded on the computer readable media. The finite number of polymorphic loci in a recorded data set can be as few as 2 or up to 1000 or more, e.g. 5, 8, 10, 25, 40, 75, 96, 100, 384 or 500 of the corn genomic polymorphisms of Table 1 or Table 3. Such data sets are useful for genotyping applications where 1) multiple polymorphisms that identify polymorphisms that are distributed across the genome of corn are queried; 2) multiple polymorphisms that cluster within an interval are queried; and/or when multiple polymorphisms are queried in large numbers of plants. The data sets recorded on the computer readable media can also comprise corresponding genetic map positions for each of the corn genomic DNA polymorphisms recorded thereon. In other embodiments, phenotypic trait or phenotypic trait index data is recorded on the computer readable media. In still other embodiments, data associating an allelic state with a parent, progeny, or tester corn plant is recorded on the computer readable media.

[0153] Methods of Breeding

[0154] Methods of breeding corn plants are also contemplated. The methods of breeding corn plants comprise the steps of: (a) identifying trait values for at least two haplotypes in at least two genomic windows of up to 10 centimorgans for a breeding population of at least two corn plants; (b) breeding two corn plants in said breeding population to produce a population of progeny seed; (c) identifying an allelic state of at least one polymorphism identified in Table 1 or Table 3 in each of said windows in said progeny seed to determine the presence of said haplotypes; and (d) selecting progeny seed having a higher trait values identified for determined haplotypes in said progeny seed, thereby breeding a corn plant. In certain embodiments of these breeding methods, trait values are identified for at least two haplotypes in each adjacent genomic window over essentially the entirety of each chromosome. It is understood that haplotype regions are chromosome segments that persist over multiple generations of breeding and are carried by one or more breeding lines. These segments can be identified with multiple linked marker loci contained in the segments, and the common haplotype identity at these loci in two lines gives a high degree of confidence of the identity by descent of the entire subjacent chromosome segment carried by these lines. Such breeding methods require the use of multiple corn genomic polymorphisms that are distributed across the corn genome.

[0155] In aspects of this breeding method, trait values are identified for at least two haplotypes in each adjacent genomic window over essentially the entirety of each chromosome. In another useful aspect of the method progeny seed is selected for a higher trait value for yield for a haplotype in a genomic window of up to 10 centimorgans in each chromosome. In another aspect of the invention, the breeding method is directed to increased yield, where the trait value is for the yield trait, where trait values are ranked for haplotypes in each window, and where a progeny seed is selected which has a trait value for yield in a window that is higher than the mean trait value for yield in said window. In certain aspects of the breeding methods the haplotypes are defined using the polymorphisms identified in Table 1 or are defined as being in the set of molecular markers that comprises all of the DNA sequences of SEQ ID NO: 1 through SEQ ID NO:6552, or as being in linkage disequilibrium with one of those polymorphisms.

[0156] To facilitate breeding by this method it is useful to compute a value for each trait or a value for a combination of traits, e.g. a multiple trait index. The weight allocated to various traits in a multiple trait index can vary depending on the objectives of breeding. For instance, if yield is a key objective, the yield value may be weighted at 50 to 80%, maturity, lodging, plant height or disease resistance may be weighted at lower percentages in a multiple trait index.

[0157] Selected, non-limiting approaches for breeding the plants of the present invention are set forth below. A breeding program can be enhanced using marker assisted selection (MAS) on the progeny of any cross. It is understood that nucleic acid markers of the present invention can be used in a MAS (breeding) program. It is further understood that any commercial and non-commercial cultivars can be utilized in a breeding program. Factors such as, for example, emergence vigor, vegetative vigor, stress tolerance, disease resistance, branching, flowering, seed set, seed size, seed density, standability, and threshability etc. will generally dictate the choice.

[0158] For highly heritable traits, a choice of superior individual plants evaluated at a single location will be effective, whereas for traits with low heritability, selection should be based on mean values obtained from replicated evaluations of families of related plants. Popular selection methods commonly include pedigree selection, modified pedigree selection, mass selection, and recurrent selection. In a preferred aspect, a backcross or recurrent breeding program is undertaken.

[0159] The complexity of inheritance influences choice of the breeding method. Backcross breeding can be used to transfer one or a few favorable genes for a highly heritable trait into a desirable cultivar. This approach has been used extensively for breeding disease-resistant cultivars. Various recurrent selection techniques are used to improve quantitatively inherited traits controlled by numerous genes.

[0160] Breeding lines can be tested and compared to appropriate standards in environments representative of the commercial target area(s) for two or more generations. The best lines are candidates for new commercial cultivars; those still deficient in traits may be used as parents to produce new populations for further selection.

[0161] For hybrid crops, the development of new elite hybrids requires the development and selection of elite inbred lines, the crossing of these lines and selection of superior hybrid crosses. The hybrid seed can be produced by manual crosses between selected male-fertile parents or by using male sterility systems. Additional data on parental lines, as well as the phenotype of the hybrid, influence the breeder's decision whether to continue with the specific hybrid cross.

[0162] Pedigree breeding and recurrent selection breeding methods can be used to develop cultivars from breeding populations. Breeding programs combine desirable traits from two or more cultivars or various broad-based sources into breeding pools from which cultivars are developed by selfing and selection of desired phenotypes. New cultivars can be evaluated to determine which have commercial potential.

[0163] Backcross breeding has been used to transfer genes for a simply inherited, highly heritable trait into a desirable homozygous cultivar or inbred line, which is the recurrent parent. The source of the trait to be transferred is called the donor parent. After the initial cross, individuals possessing the phenotype of the donor parent are selected and repeatedly crossed (backcrossed) to the recurrent parent. The resulting plant is expected to have most attributes of the recurrent parent (e.g., cultivar) and, in addition, the desirable trait transferred from the donor parent.

[0164] The single-seed descent procedure in the strict sense refers to planting a segregating population, harvesting a sample of one seed per plant, and using the one-seed sample to plant the next generation. When the population has been advanced from the F₂ to the desired level of inbreeding, the plants from which lines are derived will each trace to different F₂ individuals. The number of plants in a population declines each generation due to failure of some seeds to germinate or some plants to produce at least one seed. As a result, not all of the F₂ plants originally sampled in the population will be represented by a progeny when generation advance is completed.

[0165] The doubled haploid (DH) approach achieves isogenic plants in a shorter time frame. DH plants provide an invaluable tool to plant breeders, particularly for generating inbred lines and quantitative genetics studies. For breeders, DH populations have been particularly useful in QTL mapping, cytoplasmic conversions, and trait introgression. Moreover, there is value in testing and evaluating homozygous lines for plant breeding programs. All of the genetic variance is among progeny in a breeding cross, which improves selection gain.

[0166] Most research and breeding applications rely on artificial methods of DH production. The initial step involves the haploidization of the plant which results in the production of a population comprising haploid seed. Non-homozygous lines are crossed with an inducer parent, resulting in the production of haploid seed. Seed that has a haploid embryo, but normal triploid endosperm, advances to the second stage. That is, haploid seed and plants are any plant with a haploid embryo, independent of the ploidy level of the endosperm.

[0167] After selecting haploid seeds from the population, the selected seeds undergo chromosome doubling to produce doubled haploid seeds. A spontaneous chromosome doubling in a cell lineage will lead to normal gamete production or the production of unreduced gametes from haploid cell lineages. Application of a chemical compound, such as colchicine, can be used to increase the rate of diploidization. Colchicine binds to tubulin and prevents its polymerization into microtubules, thus arresting mitosis at metaphase, can be used to increase the rate of diploidization, i.e. doubling of the chromosome number These chimeric plants are self-pollinated to produce diploid (doubled haploid) seed. This DH seed is cultivated and subsequently evaluated and used in hybrid testcross production. Descriptions of other breeding methods that are commonly used for different traits and crops can be found in one of several reference books (Allard, “Principles of Plant Breeding,” John Wiley & Sons, NY, U. of CA, Davis, Calif., 50-98, 1960; Simmonds, “Principles of crop improvement,” Longman, Inc., NY, 369-399, 1979; Sneep and Hendriksen, “Plant breeding perspectives,” Wageningen (ed), Center for Agricultural Publishing and Documentation, 1979; Fehr, In: Soybeans: Improvement, Production and Uses, 2nd Edition, Monograph., 16:249, 1987; Fehr, “Principles of variety development,” Theory and Technique, (Vol. 1) and Crop Species Soybean (Vol. 2), Iowa State Univ., Macmillan Pub. Co., NY, 360-376, 1987)

[0168] Methods of Genotyping with a Single Molecular Marker

[0169] Methods of genotyping with single molecular markers (e.g. corn genomic polymorphism) can also be used to associate a phenotypic trait to a genotype in corn plants. DNA or mRNA in tissue from at least two corn plants having allelic DNA is assayed to identify the presence or absence of the polymorphisms provided as a molecular markers by the present invention. Associations between the molecular markers and the phenotypic traits are identified where the marker is identified in Table 1 or Table 3. In another aspect traits are associated to genotypes in a segregating population of corn plants having allelic DNA in a specific locus of a chromosome which confers a phenotypic effect on a trait of interest and where the molecular marker is located either within or near this locus.

[0170] The methods of genotyping with single molecular markers (e.g. corn genomic polymorphism) can also be used to select a parent plant, a progeny plant or a tester plant for breeding. In this case, the polymorphism is genetically linked to a chromosomal region that confers one or more desirable phenotypic trait(s). Selection of parent, progeny or tester corn plants that contain the particular allelic state associated with the phenotypic trait(s) provides for accelerated and less costly breeding.

[0171] It is contemplated that certain corn genomic polymorphisms disclosed herein in Table 1 or Table 3 can be directly linked to a given phenotypic trait in that they include certain allelic states that alter a regulatory or coding sequence of a gene that confers the trait or contributes to expression of the trait. Such traits include yield, lodging, maturity, plant height, disease resistance, e.g. resistance to diplodia, gray leaf spot, gibberella, anthracnose, fusarium, and other ear and stalk rots, blights, rusts, bacterial diseases, insect diseases, and the like, abiotic stress tolerance, e.g., drought tolerance, cold tolerance, heat tolerance, storm tolerance, nutrient deficiency, and the like, and quality traits, e.g., enhanced starch content, enhanced oil content, decreased saturated fatty acid content, enhanced protein content, increased lysine content, and the like. When the corn genomic polymorphism is directly linked to the trait in this manner, it is extremely useful in corn breeding programs aimed at introducing that trait into many distinct corn genetic backgrounds.

[0172] Introgression of the genomic region associated with this single marker can be accelerated by using multiple markers to minimize linkage drag associated with genomic regions that may not confer agronomically elite properties. Introgression of the genomic region that is closely associated with this single marker can be accelerated by using multiple markers that immediately flank the single marker to minimize any linkage drag that is potentially associated with the closely associated genomic regions. Thus the use of a clustered set of 2, 5, 10 or 20 markers located with 10, 5, 2, or 1 cm of both the proximal and distal ends of a single marker can provide for introgression of the desired genomic region associated with the single marker while minimizing introgression of undesired immediate flanking regions. Introgression of the genomic region that is closely associated with this single marker can also be accelerated by using multiple markers that are distributed across the genome to minimize any linkage drag that is potentially associated with genomic regions located on distant regions of the same chromosome and on other chromosomes. This set of multiple markers may comprise 10 additional markers with at least one marker per chromosome arm. However, in preferred embodiments, the marker density is at least about 10 markers per chromosome arm, and more preferably at least about 100 markers per chromosome arm in order to efficiently discriminate between genomic regions from the donor and recipient parents. Use of multiple flanking markers that are either immediately linked to the single marker or are distributed across the genome can thus provide for maximum recovery of the recipient parent in selected progeny of a cross.

[0173] Methods of Genotyping with Sets of Corn Genomic DNA Polymorphisms

[0174] Genotyping methods that employ sets of nucleic acid molecules that can type multiple distinct polymorphisms are specifically contemplated herein. In such methods, a finite number of at least two corn genomic polymorphisms are typed. This finite number of corn genomic polymorphisms queried can comprise at least 2, 5, 10 or 20 distinct polymorphisms that are represented as 2, 5, 10, or 20 distinct SEQ ID NO in Tables 1 or 3. Such methods of genotyping necessarily require the use of sets of nucleic acid molecules that can type sets of corn genomic polymorphisms.

[0175] In certain applications, these methods of genotyping use a concentration of multiple molecular markers (i.e. corn genomic polymorphisms) in a given chromosomal interval. High density fingerprints used to establish and trace the identity of germplasm can be obtained by performing the genotyping methods that use multiple molecular markers that are concentrated or clustered in certain chromosomal intervals and/or around certain genetic loci that confer certain traits. High density fingerprint information is useful for assessing germplasm diversity, performing genetic quality assurance functions, mining rare alleles, assessing exotic germplasm pools, and evaluating genetic purity. These high density finger prints can be used to establish a database of marker-trait associations to benefit an overall crop breeding program. High density fingerprints can also be used to establish and protect germplasm ownership. Sets of markers that are clustered around a desired chromosome interval or genetic trait can be selected from the mapped corn polymorphisms provided in Table 3.

[0176] These methods of genotyping with multiple molecular markers can also be used to associate a phenotypic trait to a genotype in corn plants. DNA or mRNA in tissue from at least two corn plants having allelic DNA is assayed to identify the presence or absence of a set of finite series of polymorphisms provided as molecular markers by the present invention. Associations between the set of molecular markers and set of phenotypic traits are identified where the set of molecular markers comprises at least 2, at least 5, or at least 10, molecular markers linked to a polymorphic locus of the invention, e.g. at least 10 molecular markers linked to mapped polymorphisms, e.g. as identified in Table 3. In a more preferred aspect traits are associated to genotypes in a segregating population of corn plants having allelic DNA in loci of a chromosome which confers a phenotypic effect on a trait of interest and where a molecular marker is located in such loci and where the degree of association among the molecular markers and between the polymorphisms and the traits permits determination of a linear order of the polymorphism and the trait loci. In such methods at least 5 molecular markers are linked to loci permitting disequilibrium mapping of the loci.

[0177] Still other applications, these methods of genotyping use molecular markers that are distributed across the genome of corn. In these methods, the molecular marker can either be spread across a single chromosome, located on multiple chromosomes, located on all chromosomes or be located on each arm of each chromosome. In one specific embodiment, at least 1 of the molecular markers that is used in the genotyping method using a plurality of markers maps to each chromosome arm of all of the 10 corn chromosomes, thus necessitating the typing of at least 20 corn genomic DNA polymorphisms. However, other embodiments of this method where at least 10 corn genomic DNA polymorphisms map to each chromosome arm, thus necessitating the typing of at least 200 corn genomic DNA polymorphisms, are also contemplated. Similarly, still other embodiments that entail typing of at least 20 corn genomic DNA polymorphisms on each chromosomal arm (necessitating the typing of at least 400 polymorphisms) or typing of at least 50 corn genomic DNA polymorphisms on each chromosomal arm (necessitating the typing of at least 1,000 polymorphisms) are also contemplated. Sets of markers that are distributed across the genome of corn can be selected from the mapped corn polymorphisms provided in Table 3 for use in these methods.

[0178] Methods of genotyping that use molecular markers that are distributed across the genome of corn can be used in a variety of applications. In one application, the methods of genotyping are used to select a parent plant, a progeny plant or a tester plant for breeding. A variety of applications of these genotyping methods to corn breeding programs are contemplated. These genotyping methods can be used to facilitate introgression of one or more traits, genomic loci, and/or transgene insertions from one genetic background to a distinct genetic background. In general, the set of selected markers in progeny plants from out-crossed populations is queried to identify and select individual progeny that contain the desired traits, genomic loci, and/or transgene insertions yet comprises as many alleles from the distinct genetic background from the outcross as possible. Such methods can accelerate introgression of the desired traits, genomic loci, and/or transgene insertions into a new genetic background by several generations.

[0179] These methods also provide for screening of traits by interrogating a collection of molecular markers, such as SNPs, at an average density of less than about 10 cM on a genetic map of corn. The presence or absence of a molecular marker linked to a polymorphic locus of Table 1 or Table 3 can be analyzed in the context of one or more phenotypic traits in order to identify one or more specific molecular marker alleles at one or more genomic regions that are associated with one or more of said traits. In another aspect of the invention the molecular markers are used to identify haplotypes which are allelic segments of genomic DNA characterized by at least two polymorphisms in linkage disequilibrium and wherein said polymorphisms are in a genomic windows of not more than 10 centimorgans in length, e.g. not more than about 8 centimorgans or smaller windows, e.g. in the range of say 1 to 5 centimorgans. In certain embodiments of these methods, set of such molecular markers to identify a plurality of haplotypes in a series of adjacent genomic windows in each corn chromosome, e.g. providing essentially full genome coverage with such windows. With a sufficiently large and diverse breeding population of corn, it is possible to identify a high quantity of haplotypes in each window, thus providing allelic DNA that can be associated with one or more traits to allow focused marker assisted breeding. Thus, an aspect of the corn analysis of this invention further comprises the steps of characterizing one or more traits for said population of corn plants and associating said traits with said allelic SNP or Indel polymorphisms, preferably organized to define haplotypes. Such traits include yield, lodging, maturity, plant height, disease resistance, e.g. resistance to diplodia, gray leaf spot, gibberella, anthracnose, fusarium, and other ear and stalk rots, blights, rusts, bacterial diseases, insect diseases, and the like, abiotic stress tolerance, e.g., drought tolerance, cold tolerance, heat tolerance, storm tolerance, nutrient deficiency, and the like, and quality traits, e.g., enhanced starch content, enhanced oil content, decreased saturated fatty acid content, enhanced protein content, increased lysine content, and the like.

### EXAMPLES

[0180] The following examples are included to demonstrate preferred embodiments of the invention. It should be appreciated by those of skill in the art that the techniques disclosed in the examples which follow represent techniques discovered by the inventor to function well in the practice of the invention, and thus can be considered to constitute preferred modes for its practice. However, those of skill in the art should, in light of the present disclosure, appreciate that many changes can be made in the specific embodiments which are disclosed and still obtain a like or similar result without departing from the concept, spirit and scope of the invention. More specifically, it will be apparent that certain agents which are both chemically and physiologically related may be substituted for the agents described herein while the same or similar results would be achieved. All such similar substitutes and modifications apparent to those skilled in the art are deemed to be within the spirit, scope and concept of the invention as defined by the appended claims.

### Example 1

[0181] This example illustrates the preparation of reduced representation libraries using enzymes which are sensitive to methylated cytosine residues in order to enrich for unique/coding-sequence genomic DNA.

[0182] Genomic DNA extraction methods are well known in the art. A preferred method which maximizes both yield and convenience is to extract DNA using “Plant DNAzol Reagent” from Life Technologies (Grand Island, N.Y.). Briefly, frozen leaf tissue is ground in liquid nitrogen in a mortar and pestle. The ground tissue is then extracted with DNAzol reagent. This removes cellular proteins, cell wall material and other debris. Following extraction with this reagent, the DNA is precipitated, washed, resuspended, and treated with RNAse to remove RNA. The DNA is precipitated again, and resuspended in a suitable volume of TE (so that concentration is 1 μg/μl). The genomic DNA is ready to use in library construction.

[0183] Genomic DNA from two corn lines which are to be compared for polymorphism detection are digested separately with Pst I restriction endonuclease which provides the ends of the DNA fragments with sticky ends which can ligate into a plasmid with the same restriction site. For instance, 100 units of Pst I is added to 20 μg of DNA and incubated at 37° C. for 8 hours. The digested DNA product is separated by electrophoresis on a 1% low-melting-temperature-agarose gel to separate the DNA fragments by size. The digested DNA from the two corn lines is loaded side by side on the gel (with one lane in between as a spacer). Both a 1-KB DNA ladder marker and a 100-bp DNA ladder marker are loaded on each side of the two corn DNA lanes. These markers act as a guide for size fractionation of the digested corn DNA. Fragments in the range of 500 to 3000 by are excised incrementally from the gel in size fractions of 500-600 bp, 600-700 bp, 700-800 bp, 800-900 bp, 900-1100 bp, 1100-1500 bp, 1500-2000 bp, 2000-2500 by and 2500-3000 bp. DNA in each fraction is purified using β-agarase and ligated into the Pst I cloning site of pUC18. The plasmid ligation products are transformed by electroporation into DH10B E. coli bacterial hosts to produce reduced representation libraries. For instance, about 500 ng of the size-selected DNA is ligated to 50 ng dephosphorylated pUC18 vector.

[0184] Transformation is carried out by electroporation and the transformation efficiency for reduced representation Pst I libraries is approximately 50,000-300,000 transformants from one microliter of ligation product or 1000 to 6000 transformants/ng DNA.

[0185] Basic tests to evaluate the quality include the average insert size, chloroplast/mitochondrial DNA content, and the fraction of repetitive sequence.

[0186] The determination of the average insert size of the library is assessed during library construction. Every ligation is tested to determine the average insert size by assaying 10-20 clones per ligation. DNA is isolated from recombinant clones using a standard mini preparation protocol, digested with Pst I to free the insert from the vector and then sized using 1% agarose gel electrophoresis (Maule, Molecular Biotechnology 9:107-126 (1998), the entirety of which is herein incorporated by reference).

[0187] The chloroplast/mitochondrial DNA content, and the percentage of repetitive sequence in the library is estimated by sequencing a small sample of clones (400), and cross checking the sequence obtained against various sequence databases. Some repetitive elements are not present in the databases, but can nevertheless often be identified by the large number of copies of the same sequence. For instance, after sequencing a set of 400 clones any sequence that is not filtered by the repetitive element database, but yet is present more than 10 times in the sample is considered a repetitive element.

[0188] Corn reduced representation libraries of the present invention are constructed by inserting coding region enriched DNA obtained from the following corn lines: 01INL1, 7051, 5750, 171NI20, LH185, 7797, WDHQ11, LH172, 5CM1, LH82, B73, and MO17.

### Example 2

[0189] This example illustrates the determination of corn genomic DNA sequence from clones in reduced representation libraries prepared in Example 1. Two basic methods can be used for DNA sequencing, the chain termination method of Sanger et al., Proc. Natl. Acad. Sci. USA 74:5463-5467 (1977) and the chemical degradation method of Maxam and Gilbert, Proc. Natl. Acad. Sci. USA 74:560-564 (1977). Automation and advances in technology such as the replacement of radioisotopes with fluorescence-based sequencing have reduced the effort required to sequence DNA (Craxton, Methods, 2:20-26 (1991), Ju et al., Proc. Natl. Acad. Sci. USA 92:4347-4351 (1995) and Tabor and Richardson, Proc. Natl. Acad. Sci. USA 92:6339-6343 (1995). Automated sequencers are available from, for example, Applied Biosystems, Foster City, Calif. (ABI Prism® systems); Pharmacia Biotech, Inc., Piscataway, N.J. (Pharmacia ALF), LI-COR, Inc., Lincoln, Nebr. (LI-COR 4,000) and Millipore, Bedford, Mass. (Millipore BaseStation).

[0190] Sequence base calling from trace files and quality scores are assigned by PHRED which is available from CodonCode Corporation, Dedham, Mass. and is described by Brent Ewing, et al. “Base-calling of automated sequencer traces using phred”, 1998, Genome Research, Vol. 8, pages 175-185 and 186-194, incorporated herein by reference.

[0191] After the base calling is completed, sequence quality is improved by cutting poor quality end sequence. If the resulting sequence is less than 50 bp, it is deleted. Sequence with an overall quality of less than 12.5 is deleted. And, contaminating sequence, e.g. E. coli BAC and vector sequences and sub-cloning vector, are removed. Contigs are assembled using Pangea Clustering and Alignment Tools which is available from DoubleTwist Inc., Oakland, Calif. by comparing pairs of sequences for overlapping bases. The overlap is determined using the following high stringency parameters: word size=8; window size=60; and identity is 93%. The clusters are reassembled using PHRAP fragment assembly program which is available from CodonCode Corporation using a “repeat stringency” parameter of 0.5 or lower. The final assembly output contains a collection of sequences including contig sequences which represent the consensus sequence of overlapping clustered sequences (contigs) and singleton sequences which are not present in any cluster of related sequences (singletons). Collectively, the contigs and singletons resulting from a DNA assembly are referred to as islands.

### Example 3

[0192] This example illustrates identification of SNP and Indel polymorphisms by comparing alignments of the sequences of contigs and singletons from at least two separate corn lines as prepared as in example 2. Sequence from multiple corn lines is assembled to into loci having one or more polymorphisms, i.e. SNPs and/or Indels. Candidate polymorphisms are qualified by the following parameters:

[0193] The minimum length of a contig or singleton for a consensus alignment is 200 bases.

[0194] The percentage identity of observed bases in a region of 15 bases on each side of a candidate SNP, is 75%.

[0195] The minimum BLAST quality in each contig at a polymorphism site is 35.

[0196] The minimum BLAST quality in a region of 15 bases on each side of the polymorphism site is 20.

[0197] A plurality of loci having qualified polymorphisms are identified as having consensus sequence as reported as SEQ ID NO: 1 through SEQ ID NO: 6552. The qualified SNP and Indel polymorphisms in each locus are identified in Table 1. More particularly, Table 1 identifies the type and location of the polymorphisms as follows:

[0198] SEQ_NUM refers to the SEQ ID NO. (sequence II) number) of the polymorphic corn DNA locus.

[0199] CONSEQ_ID refers to an arbitrary identifying name for the polymorphic corn DNA locus.

[0200] MUTATION_ID refers to an arbitrary identifying name for each polymorphism.

[0201] START_POS refers to the position in the nucleotide sequence of the polymorphic corn DNA locus where the polymorphism begins.

[0202] END_POS refers to the position in the nucleotide sequence of the polymorphic corn DNA locus where the polymorphism ends; for SNPs the START_POS and END_POS are common.

[0203] TYPE refers to the identification of the polymorphism as an SNP or IND (Indel).

[0204] ALLELE and STRAIN refers to the nucleotide sequence of a polymorphism in a specific allelic corn variety.

### Example 4

[0205] This example illustrates the use of primer base extension for detecting a SNP polymorphism.

[0206] A small quantity of corn genomic DNA (e.g. about 10 ng) is amplified using the forward and reverse PCR primers which are designed to have an annealing temperature of 55° C. to the template, i.e., around a polymorphism of a particular molecular marker. The PCR product is added to a new plate in which the extension primer is covalently bound to the surface of the reaction wells in a GBA plate. Extension mix containing DNA polymerase, the two differentially labeled ddNTPs, and extension buffer is added. The GBA plate is incubated at 42° C. for 15 min to allow extension. The reaction mix is removed from the wells by washing with a suitable buffer. The two labels are detected by sequential incubation with primary and secondary detection reagents for each of the labels. Incorporation of a specific ddNTP-FITC is measured by incubation with HRP-anti-FITC, followed by washing the wells, followed by incubation in a buffer containing a chromogenic substrate for HRP. The extent of the reaction is determined spectrophotometrically for each well at the wavelength appropriate for the product of the HRP reaction. The wells are washed again, and the procedure is repeated with AP-streptavidin, followed by a chromogenic substrate for AP, and spectrophotometry at the wavelength appropriate for the AP reaction product.

[0207] Analysis of Results.

[0208] The extent of incorporation of each labeled ddNTP is inferred from the absorbance measured for the reaction products of the detection steps specific label, and the genotype of the sample is inferred from the ratios of these absorbances as compared to a standard of known genotype and a no-template control reactions. In the most common practice, the absorbances observed for each data point are plotted against each other in a scatter plot, producing an “allelogram”. A successful genotyping assay using the single base extension assay of this example provides an allelogram as illustrated in FIG. 2 where the data points are grouped into four clusters: Homozygote 1 (e.g., the A allele), homozygote 2 (e.g., the G allele), heterozygotes (each sample containing both alleles), and a “no signal” cluster resulting from no-template controls, or failed amplification or detection.

### Example 5

[0209] This example illustrates the use of a labeled probe degradation assay for detecting a SNP polymorphism. A quantity of corn genomic template DNA (e.g. about 2-20 ng) is mixed in 5 ul total volume with four oligonucleotides, as described in Table 2, i.e. forward primer, reverse primer, hybridization probe having a VIC reporter attached to the 5′ end and hybridization probe having a FAM reporter attached to the 5′ end as well as PCR reaction buffer containing the passive reference dye ROX. The PCR reaction is conducted for 35 cycles using a 60° C. annealing-extension temperature. Following the reaction, the fluorescence of each fluorophore as well as that of the passive reference is determined in a fluorimeter. The fluorescence value for each fluorophore is normalized to the fluorescence value of the passive reference. The normalized values are plotted against each other for each sample to produce an allelogram. A successful genotyping assay using the primers and hybridization probes of this example provides an allelogram with data points in clearly separable clusters as illustrated in FIG. 2.

TABLE 2
Examples of molecular marker assays using labeled probe degradation
detection of SNP polymorphisms. Each assay provides
two oligonucleotides primers, to amplify the region spanning
the polymorphism, and two oligonucleotides probes, which have
fluorogenic reporter molecules attached for SNP allele detection.
Useful reporter dyes include, but are not limited to,
6-carboxy-4,7,2′,7′-tetrachlorofluorecein (TET), 2′-chloro-7′-
phenyl-1,4-dichloro-6-carboxyfluorescein (VIC) and
6-carboxyfluorescein phosphoramidite (FAM). A useful
quencher is 6-carboxy-N,N,N′,N′-tetramethylrhodamine (TAMRA).

| Marker | | PRIMER | Sequence | | |
|---|---|---|---|---|---|
| SEQ ID NO: | CONSEQ_ID | SEQ ID NO: | type | Sequence | Allele |
| 381 | 20030484- | SEQ ID | Forward | CGTCGCAAGAGTCAAGGATATTACA | |
| | CON.1 | NO: 6553 | Primer | | |
| 381 | 20030484- | SEQ ID | Probe 1 | AAAAGGTGTCAATATCGTCT | A |
| | CON.1 | NO: 6554 | | | |
| 381 | 20030484- | SEQ ID | Probe 2 | AAGGTGTCAATGTCGTCT | |
| | CON.1 | NO: 6555 | | | |
| 381 | 20030484- | SEQ ID | Reverse | CGAGCAGTGGACGACAACA | |
| | CON.1 | NO: 6556 | Primer | | |
| 346 | 20030439- | SEQ ID | Forward | CGGAGTCGTCGTTGGCAAATA | |
| | CON.1 | NO: 6557 | Primer | | |
| 346 | 20030439- | SEQ ID | Probe 1 | AAATCATCAGATCGTTTTT | A |
| | CON.1 | NO: 6558 | | | |
| 346 | 20030439- | SEQ ID | Probe 2 | CATCAGCTCGTITTT | C |
| | CON.1 | NO: 6559 | | | |
| 346 | 20030439- | SEQ ID | Reverse | ACTAGGCGTCCAGTTCAGATTTTG | |
| | CON.1 | NO: 6560 | Primer | | |
| 708 | 20031563- | SEQ ID | Forward | TGGCTTTATTTTTCGATACTGAAGATCCT | |
| | CON.1 | NO: 6561 | Primer | | |
| 708 | 20031563- | SEQ ID | Probe 1 | CAATGTTCTTCAATCCATAC | A |
| | CON.1 | NO: 6562 | | | |
| 708 | 20031563- | SEQ ID | Probe 2 | CAATGTTCTTCAGTCCATAC | G |
| | CON.1 | NO: 6563 | | | |
| 708 | 20031563- | SEQ ID | Reverse | GGGTGATGAGAGGAATTAGAGCAAA | |
| | CON.1 | NO: 6564 | Primer | | |
| 134 | 20030159- | SEQ ID | Forward | CTTCATGGCAACATTAGCTGTGTIT | |
| | CON.1 | NO: 6565 | Primer | | |
| 134 | 20030159- | SEQ ID | Probe 1 | CAAGATGTTTATGAAAGCG | A |
| | CON.1 | NO: 6566 | | | |
| 134 | 20030159- | SEQ ID | Probe 2 | CAAGATGTTTATGAGAGCG | G |
| | CON.1 | NO: 6567 | | | |
| 134 | 20030159- | SEQ ID | Reverse | GCCTGCCCATTAGGCTGAAA | |
| | CON.1 | NO: 6568 | Primer | | |

[0210] To confirm that an assay produces accurate results, each new assay is performed on a number of replicates of samples of known genotypic identity representing each of the three possible genotypes, i.e. two homozygous alleles and a heterozygous sample. To be a valid and useful assay, it must produce clearly separable clusters of data points, such that one of the three genotypes can be assigned for at least 90% of the data points, and the assignment is observed to be correct for at least 98% of the data points. Subsequent to this validation step, the assay is applied to progeny of a cross between two highly inbred individuals to obtain segregation data, which are then used to calculate a genetic map position for the polymorphic locus.

### Example 6

[0211] This example illustrates the genetic mapping of molecular markers in loci of this invention based on the genotypes of over 6000 SNPs for 274 intermated recombinant inbred lines (IRIs) originating from the cross of corn lines B73 and Mo17. The genotypes are combined with genotypes for 1320 public core SSR and RFLP markers scored on the IRIs. Before mapping, any loci showing distorted segregation (P<1e-5 for a Chi-square test of a 1:1 segregation ratio) are removed. A low alpha-level is used to account for the multiple-testing problem.

[0212] In one aspect, a map can be constructed using the JoinMap version 2.0 software which is described by Stam, P. “Construction of integrated genetic linkage maps by means of a new computer package: JoinMap, The Plant Journal, 3: 739-744 (1993); Stam, P. and van Ooijen, J. W. “JoinMap version 2.0: Software for the calculation of genetic linkage maps (1995) CPRO-DLO, Wageningen. JoinMap implements a weighted-least squares approach to multipoint mapping in which information from all pairs of linked loci (adjacent or not) is incorporated. Linkage groups are formed using a LOD threshold of 5.0. The SSR and RFLP public markers are used to assign linkage groups to chromosomes. Linkage groups are merged within chromosomes before map construction.

[0213] Other approaches to mapping high density markers are known in the art; see, for example, Winkler et al. (Genetics 164:741-745 (2003)), for the utility of IRIs for higher resolution mapping. See also, Jansen et al. (Theor Appl Genet 102:1113-1122 (2001)). In many conditions, the approach of Jansen et al. yields a close approximation to a maximum-likelihood map. Further, a map estimated by this approach agrees quite closely with the map obtained using JoinMap 2.0. In addition, combinations of methods described above and incorporated herein by reference may be used to best leverage marker data under a range of population structure as well as computational constraints.

[0214] In another aspect of the present invention, Kosambi's mapping function is used to convert recombination fractions to map distances. Mapped SNP molecular markers are identified in Table 3 where “Chromosome” and “Position” identify the distance measured in cM from the 5′ end of a corn chromosome for the SNP identified by “Conseq_ID”. “Public Name” provides the published name of reference public markers which are not part of this invention. For certain of the mapped polymorphic markers listed in Table 3, the Mutation ID is listed more than once which indicates that the mapping was conducted based on multiple genotyping assays. The map locations for multiple genotyping assays generally serve to confirm map location except in the case where map locations are divergent, e.g. due to error in the design or practice of an assay. The density and distribution of the mapped molecular markers is shown in FIG. 1.

### Example 7

[0215] This example illustrates methods of the invention using molecular markers disclosed in Table 1 and in the DNA sequences of SEQ ID NO:1-6552.

[0216] A breeding population of corn with diverse heritage is analyzed using primer pairs and probe pairs prepared as indicated in Example 5 for each of the molecular markers identified in Table 1 based on sequences of SEQ ID NO:1-6552. Closely linked molecular markers are identified as characterizing haplotypes within adjacent genomic windows of about 10 centimorgans across the corn genome. Haplotypes representing at least 4% of the population are associated with trait values identified for each member of the corn population including the trait values for yield, maturity, lodging, plant height, rust resistance, drought tolerance and cold germination. The trait values for each haplotype are ranked in each 10 centimorgan window. Progeny seed from randomly-mated members of the population are analyzed for the identity of haplotypes in each window. Progeny seed are selected for planting based on high trait values for haplotypes identified in said seeds.

### Example 8

[0217] This example illustrates the identification of polymorphisms that are useful for obtaining a parent plant, a progeny plant or a tester plant for breeding with a preferred trait. In this particular example, polymorphisms have been selected for usefulness in identifying plants with a preferred yield trait for illustrative purposes. However, it is also anticipated that other markers useful for identifying other preferred traits can be identified in a similar manner (i.e. by noting the location of a polymorphism's genetic map position within a haplotype window). It is further anticipated that the specific markers disclosed in this Example may also find other uses in addition to serving as markers for yield traits.

[0218] First, haplotype windows associated with yield were identified as disclosed in U.S. Patent Application Ser. No. 60/837,864. The map positions disclosed in Table 3 were used to identify markers of the present invention that are located in the haplotype window(s) comprising the preferred haplotypes for yield and that can be used as markers for these regions. 25 polymorphisms coinciding with 13 haplotype windows that comprise the top 13 haplotypes in Monsanto corn germplasm for yield were selected. Two (2) markers are thus provided for most of these yield haplotype windows. The specific markers that can be used to identify plants for breeding with the preferred yield trait can be selected from the group consisting of SEQ ID NO: 5407, 287, 574, 3407, 5367, 4566, 2457, 5295, 4548, 5182, 5489, 2714, 2726, 375, 275, 1415, 885, 2067, 4773, 1708, 1479, 3507, 2765, and 1279, and SEQ ID NO: 2468.

[0219] In view of the foregoing, it will be seen that the several advantages of the invention are achieved and attained.

[0220] The embodiments were chosen and described in order to best explain the principles of the invention and its practical application to thereby enable others skilled in the art to best utilize the invention in various embodiments and with various modifications as are suited to the particular use contemplated.

[0221] Various patent and non-patent publications are cited herein, the disclosures of each of which are incorporated herein by reference in their entireties.

[0222] As various modifications could be made in the constructions and methods herein described and illustrated without departing from the scope of the invention, it is intended that all matter contained in the foregoing description or shown in the accompanying drawings shall be interpreted as illustrative rather than limiting. The breadth and scope of the present invention should not be limited by any of the above-described exemplary embodiments, but should be defined only in accordance with the following claims appended hereto and their equivalents.

What is claimed is:

1. A library of nucleic acid molecules, said library comprising at least two distinct sets of nucleic acid molecules wherein each of said distinct sets of nucleic acid molecules permits typing of a corresponding-corn genomic DNA polymorphism identified in Table 1 or Table 3.

2. The library of claim 1, wherein said distinct sets of nucleic acid molecules are arrayed on at least one solid support or on at least one microtiter plate.

3.-17. (canceled)

18. The library of claim 1, wherein said corresponding distinct corn genomic DNA polymorphisms identified in Table 3 are selected from the group consisting of SEQ ID NO: 2468, 5407, 287, 574, 3407, 5367, 4566, 2457, 5295, 4548, 5182, 5489, 2714, 2726, 375, 275, 1415, 885, 2067, 4773, 1708, 1479, 3507, 2765, and 1279.

19-28. (canceled)

29. An isolated nucleic acid molecule for detecting a molecular marker representing a polymorphism in corn DNA, wherein said nucleic acid molecule comprises at least 15 nucleotides that include or are immediately adjacent to said polymorphism, wherein said nucleic acid molecule is at least 90 percent identical to a sequence of the same number of consecutive nucleotides in either strand of DNA that include or are immediately adjacent to said polymorphism, and wherein said polymorphism is identified in Table 1 or Table 3.

30.-32. (canceled)

33. The isolated nucleic acid of claim 29, wherein said polymorphism in Table 3 is selected from the group consisting of SEQ ID NO: 2468, 5407, 287, 574, 3407, 5367, 4566, 2457, 5295, 4548, 5182, 5489, 2714, 2726, 375, 275, 1415, 885, 2067, 4773, 1708, 1479, 3507, 2765, and 1279.

34.-60. (canceled)

61. A method of genotyping a corn plant to select a parent plant, a progeny plant or a tester plant for breeding, said method comprising the steps of:
a. obtaining a DNA or RNA sample from a tissue of at least one corn plant;
b. determining an allelic state of a set of corn genomic DNA polymorphisms comprising at least two polymorphisms identified in Table 1 or Table 3 for said sample from step (a), wherein said allelic state is determined with a set of nucleic acid molecules that provide for typing of said corn genomic DNA polymorphisms; and
c. using said allelic state determination of step (b) to select a parent plant, a progeny plant or a tester plant for breeding.

62. The method of genotyping a corn plant of claim 61, wherein said set of corn genomic DNA polymorphisms comprise at least 5 polymorphisms identified in Table 1 or Table 3.

63. (canceled)

64. The method of genotyping a corn plant of claim 61, wherein said set of corn genomic DNA polymorphisms comprise at least 20 polymorphisms identified in Table 1 or Table 3.

65. The method of genotyping a corn plant of claim 61, wherein said set of corn genomic DNA polymorphisms comprise at least 2 polymorphisms selected from the group consisting of SEQ ID NO: 5407, 287, 574, 3407, 5367, 4566, 2457, 5295, 4548, 5182, 5489, 2714, 2726, 375, 275, 1415, 885, 2067, 4773, 1708, 1479, 3507, 2765, and 1279, and SEQ ID NO: 2468, and wherein said set of corn genomic DNA polymorphisms are associated with a trait value for yield.

66. The method of genotyping a corn plant of claim 65, wherein said set of corn genomic DNA polymorphisms comprise at least 2 polymorphisms selected from the group consisting of SEQ ID NO: 2468, 5407, 287, 574, 3407, 5367, 4566, 2457, 5295, and 4548.

67.-71. (canceled)

72. The method of claim 64, wherein said set of at least 20 corn genomic DNA polymorphisms identify polymorphisms that are distributed across the genome of corn.

73. The method of claim 72, wherein said set of at least 20 corn genomic DNA polymorphisms identify polymorphisms that are distributed across a single chromosome of corn.

74. The method of claim 72, wherein said set of at least 20 corn genomic DNA polymorphisms identify polymorphisms that are distributed across at least two chromosomes of corn.

75.-100. (canceled)

The application's sequence listing, which the Patent Office published only in electronic form, follows.

SEQUENCE LISTING (6568 sequences)

SEQ ID NO: 1 - DNA, 593 bp, Zea mays
tgggcctccatctctgcccgcacttccaaagtcttcgatttgttcctggtgttgctgctgctgtcccaagaaaaaggttgaaagaagtgagagggaaatcaacagagactctcggcgagaagacctcgagtctgccatttttaaccttcgcgaaattgacagtaagtgcacggatgtggtctgtcaaaagttctaacctgaaagaataatagcgtgttcattacactatggttgtttttcagactacgatgagtacgagaggtccatgctcatctctcagatgagcttcgagaagtcttttgggctgtcctcggtctttattgaatcgacccttatggagaatgggggcgtccctgaatctgcaaacccatctaccctaattaaagaagccattcatgtcattagctgtggatatgaagagaaaactgaatggggaaaagaggtgtccattcttgaccttcattatctttgtataacaccagatacatgccttgatgataccagatacttttcccctgttcatggggcctgacttcttgtttcgttttttcttaaattcccttcagattggctggatctatggttcagttaca

SEQ ID NO: 2 - DNA, 344 bp, Zea mays
gcagctctcccggctcggtcgcttcgccacctccgtcctccccccgcgctcggtcgctcgccacctgctctcccctccctccacgttgctcgcgcccgcgcttatataaggtacgccgcctcgactctccaaacccctccgcgtgggcctaaggtccggcgcgccgagatggagctgatggatctagggtttcggttgcggcggcggtcctgtagtgcaggaggagctcatggcggacgctccggcgagccctgggggcggaggcgggagccacgagagcgggagccccaggggcggcggaggtggaggcggtggcagcgtcagggagcaggacaggttcctga

SEQ ID NO: 3 - DNA, 735 bp, Zea mays
cgaggagtacgtcgagcctctcaagatttacctacaaaagtacaaagaggtcattgatggcttaccctcactgtgttgtagatgtggatcttctctgtttatattataatgtttcgtacatctctctcatggtgtttctttatgccctttgcatgttctcttctgatgacgggctggttattacagatggaggtatgcaatctacatgcttttatttattttttctgtcagaacaacacttatttgactttgctttggctgaaccgtagaagtttacagtgtacacaacctaatcagtttattgacctatagtaccttagtcagaaaacatagagcacttgacaggaaatacacacaatcagctttggaagctgcaaactagtatgtattaaataacctgaacaagactgctagttctaagaaacattgcatacatgatctcgttttttcttccataattgactgttgttgtttggctgcacaacctaccaatcatagcaagctcctgggtaactaatgtggtagctgtgaacaagttaatactgtcatgtactgtttgcacagccaggcccaggatgcaactgaatactgatcacaatttttttttggaaaattttcgtagggtgatagcaagctgtctacaaaggctggcgagggctctgtaaagaaggatgcaattagtccccatggtggcaccagtagctcaagtaatcaggttagttttttttcatatgt

SEQ ID NO: 4 - DNA, 946 bp, Zea mays
  misc_feature (890)..(894): n is a, c, g, or t
gactgagactcgaattacgtactacactagcatcatttcatggcatttaatcaggtgtccgaattgctctttttctaggtggattcgacacggcgcaggccgctgcgaggttcatagatttcttcttcctcgcgcgcatctgttccattatcttctcgtcttatcttatatatctatctatctatgaatctatctgcagggcctacgaccaagccgcgatcaagttccgcggcctgaacgcggacatcaacttcaccctggacgactacaaggacgagatgaagaaggtgattccccccctgttgcaattgcgaatcgaacgaccaacaccggtagaagaaggagcccacacacaccgccatgaatggagtgtgaatagaacaaattaagaacactgcagctgctctgttcatcgactaataataacgtctctctcttagtctctttcactgtttgatgcctggattcttgtcttcctgccgtgtgccgcgtcaaatccctcagatgaaggacttgagcaaggaggagttcgtgctggtgctccggcggcagggcgccggcttcgtcaggggcagctccaggttccggggagtcacccagcacaagtgcggcaagtgggaggccaggatcggccagctcatgggcaagaagtaattaattagtcaatgctgaatcggaaaaaaacaaaacaacgattagtgccgatttttttgttttatttttatttttggcttgatggttgatctcctttgttcttgtcgctgctgcaggtatgtgtacctgggcctgtatgacacagagacggaggctgcccagtaagtgacgcgtcctctgtgcttctgttacgcgccattgaacaacatgtgacaactttgtggtttcgtgccatnnnnncatgctaatcagggcatatgacaaggctgccatcaagtgctacggcaaggag

SEQ ID NO: 5 - DNA, 1035 bp, Zea mays
  misc_feature (516)..(516): n is a, c, g, or t
  misc_feature (1007)..(1009): n is a, c, g, or t
tagatagagtagcaacggcaacagaataattaagcatggcctccttacagctcatgcgtgcggcacaaacattagatagctagcccccctgtcttcagtacttcagacacctggaaccattagtctttatagctaggccgtggggtgtgaaatggaagcgagataccggtggctagccgagccggtacagcccgccgtcgttgatgaagtggccgtccatgtagaaggcattggtggtgtggtacccatccatcatcaggtggtgcatctcctcggatggcttccagtgccgcttccgctggttgatgaaccagttgttgatctgcttcaggtcaagcccggtagactcagccagtgccaccttctgagtctcctgctcaccgatgggaagagttggttaattcatatccagtagggaagcacaggctatatgccgtatacaaaacatccaacaaaatgaagatatgataaaaaaaaagttcagtgtatgctcctggactcaatgtttttttttcncttagaaccctaaacttgaaaattacaaatttgaatctgcgcttatgagtatcaacacacaattcagggcactatgattttctgtttcagccatgtaagtgaaaccattgtagactcttcaatttgtatatcagaaaaggcttcatttttcaccagataaatatatagttgcttaaattaaaatcaatggtatttagtaagaacgctacagaagtttcaaaataccttaaataaggttaaattaataccaataatcacctgccactccctgatcaatattattagactctgacatattttggctcactttttatatgccgatatgcaaatcagagatcaacagaccgtcatggaagatcaaagacccatatgtagcttagatttgccaaatgtgatttatgtatatatatacttacccttgaattacaatgtgcagtcagtactaacattgggtagctggctatgaaaagttcatgaagaattggcatcgnnnaaatcatgtgtcaccaacaatagtta

SEQ ID NO: 6 - DNA, 621 bp, Zea mays
  misc_feature (408)..(408): n is a, c, g, or t
gaagaatgctccatctatcattttcattgatgaaattgattccattgcacccaagagagaaaagaccaatggagaagtagaacgtcgtattgtttcacagctactgactcttatggatggactcaaatctcgttcccatgttattgttatgggtgctacaaaccggccaaacagcatcgatcctgctcttagaagatttggaaggtttgaccgggaaattgacattggagttcctgatgaagttggccggcttgaggttctccgtattcacactaagaacatgaagctagctgaagatgtaagtgtctataatttattcttgatgcattgcacttcacactgattagaatatggtttctgtcttctcttctagcgtctcgtgatgtccattctctgaaatttccaggntaatttggaactcatttcaaaggatacccatggatacgttggtgctgatcttgctgctctttgtactgaggctgctcttcagtgcattcgtgagaagatggacatcatagatcttgaggatgagacaatagatgcagagatattgaactcgatggctgttacaaatgaccatttcaagactgcgcttggaacaagcaacccatctgctctccg

SEQ ID NO: 7 - DNA, 603 bp, Zea mays
gaatgctccgggcaacatcttggcggcaggcgggctgggtcccttgtggctcgtcgacattgccaacatgtgcctcatcctccacctgatcggtgcataccaggtcagcagcagcacgtctcagatcgatcagctggtgagctcagatcagctccgtatagcttaagctaaagctaataattaatacctgaacggcagcaggtatacgctcagcctgtcttcgcttcggttgagaggtgggccgcctcacggtggccagaagccaagttcatgagcagcgcatacaccgtgagcatccccctcttgcagagaggatcggtcaccgtcgcgccgcacaagctcgtcctgaggaccgtcatagtcggcgcgacgactgcggtggcgctggcgatacccttcttcaacgccgtgctggggctcctcggcgcgttcagcttctggccgctcacggtctacttccccatcagcatgcacatcgcccagggcaagatcgccagggggaccaagtggtggtgccttctgcaggctctgagcatggtttgcttggtgatctcggtggccgtgggtgtaggctctgtcactgacattgtcgatagcctcaag

SEQ ID NO: 8 - DNA, 584 bp, Zea mays
tgggacagccaggcctgaaaaggtctgtacgggttggtgagacaggcttcagagaagttgctgcttacctcctcgactacggtcactttgcaaacgttcctcccaccatgctggtcaagataacacacaccatcttcaacgtgaacgactgtgttggctgcaaaagtaaagtgttctgcaacaaatcagaggctgtgagcaagattgcatcgctgcaggagttcattcctcatgatttcgacgccagtgaccatgggacctcaagcttccctgtatctgcagtgcataggattggcatccttgacattagaatcttcaacactgacaggcatgctggaaatcttctggtcaagaagcttggtcctggcgccgacaattttggagagcagacagaactcattcctattgaccatggtctctgtcttccagaatgcctagaagacccatacttcgagtggatccactggccgcaggcatctgtccccttctccgaggaggagcttgagtacattgcaagacttgatcctgtaaaagatgcagaaatgctacgcatggagctacccatgatacgagacgcatgtctc

SEQ ID NO: 9 - DNA, 364 bp, Zea mays
ggcgtcgtcagcgttgcaggagcaagcagagacaaggttagccagctggaagcgacctgggcgacgatgttccgcgactcttcgacgggcggcccattgggggaggttctggccaagaacagcagcaacgcggaagcaagaagttgcccgtcggcggcgccacctctaaccgactactactgctgggattcaggccacggcatgcagtcgtcccccgtgggagttctgcagaggacgaccgccttcggatcggtctccagcagcgcgggcagcagccctagggtcgagagccacggcgcctgctgcgatggtaccagcaacctgatggatgatgatctcggctcagttgtagtgagacatccca

SEQ ID NO: 10 - DNA, 753 bp, Zea mays
  misc_feature (76)..(76): n is a, c, g, or t
  misc_feature (215)..(217): n is a, c, g, or t
  misc_feature (736)..(740): n is a, c, g, or t
atccttgtctaccagaatgatcccatttctaaattttgtgcgccctttactttttgtttcctaggatgttcatcanatctgcccaagaagacaacaagaaggtgagaaagatttgttgcatttcaacaatgaaatctgttcttgttccaaatgcctgctgcttgtttatgatgttgtctgatttgttatgttgtgatgcatattgcagtatcctnnnctccagttggagttcctggggagctacctttctgagctgagcttgctggattatggcttgattcgctccttgccgtcacttgttgcagcctcagccgtctttgttgcaaggctgaccctggatccacacacccatccctgggtataatctcgatctgtttgatctctatacattcctgtctcatcaaatacaaaccaccaactcattttgttatgaacgggttgcagagcaagaagatgcaaacgctaacaggctataagccatctgagttgaaggactgtgttgctgccatacataatttgcagctcaaccggacatgtcaatccatggtggcgatccgggagaaatacaggcaacaccgagtaagcttgggctttgacagctgtacatggttgttagattgtttgcataactctagtgtactaactgtggaaaaatctttgaacagttcaagggtgtatcagctttgctacctcctgttgagatccctgcatcatacttcaatacactgaaggagtnnnnnttccttgataatc

SEQ ID NO: 11 - DNA, 782 bp, Zea mays
gctgctcgcttgtaatatgaggaggtatctgttccagttgttgaggaccttgtgctgatatctgaccgtgcctacacaaaagggcaaattttagaaatggtaatcccactaaatgcaatttgcactcatactgaatgcatgcctggttctttaatactgcattatctaaacgtacaatgatcatagattaggatccatgtatgctacatcagcatacagcagatatggatcttttgctgaaaaattgcaattatgtcctttatacataagtggaacgtgtcaattgtaatctttcggatgatttctccctgttttgctgtcttcttgcatgctatctttttttatacccttgcatgctgtcttctccttgttctgcaattgtatccttgcatggtgtctttttactttacagtgattttttggctaagcgttaaatcttctgattgagcaggaaaagttgattctgaacacgctgcagttcaacatgtctgttccaacaccttatgtcttcatgaagaggtttctgaaagctgcagatgcagataaacaggtgaaatatcactacactagctcaagctcaagatgcagatgatccgtgttttgtctacttggataaacaaaacacctgtagcagtgatcttttggttttatgattgacactgccccactgttgtatctcgcagcttgagctagcgtcatttttcatgctggagctctgcttggtagaataccaaatgctgaattatcggccttcgcatctggctgctgctgcggtttatact

SEQ ID NO: 12 - DNA, 405 bp, Zea mays
gctgtgtgctgtgagcgcgggcgcgcgcgagtgtggagagaagggagggaattcccccctttctgttcggcgccgtgctcgcgcgcacgcacccgcacgccccacgctgcacgcggccttttcctccgccttgctgctgcaagtccgcaaccactggaggaaaaatcttttccttcacttttcttccctttccccccgcgcatgcacgggctctgattgacgccatgggggacgccgccgccgccgcagcctccacgtccgctcccaccacgcccacctccattctcatctgcctggaagacggcagcgaccttctcgccgatgccgacgatggcgccggcactgacctagttgtcgcccgcgacgagcgtctgcttgtcgtggaccaggacgaggagtatgtag

SEQ ID NO: 13 - DNA, 804 bp, Zea mays
tccaaactttgaccaatgcaaagttcacagctacaatcttgttattctattctgtaaaggcctgggagggtgctggtgttgttgcatcagctcgcaaattaataggagctactaacccccttcaagctgaaccagggactataaggggtgatcttgcagttcaaactggaaggttggcagccaccctcttccatgtgtttatattgtaatgtttaatcatgtaactcacctgttaaactttagttggaatgtgcttacattttacctgcatatcaataaacttatgatggaatgggacgtttcaggaacgttgtccatggaagtgatagtcctgataatggcaagcgtgaaattggtgagttctgcaataattcagtatgattctatgtcgcttttaggtgatttcttgagtcaatgatcattttaaacaatcggcaaggcactggagtggcaagctatagtaatgttttgttcaaactttgggaactgttggttgacatgacaatcaggagcaggattaattaataagacgaaactgatggtgtcatgtactttagtgatacggcttgcagattaactcgaacctaaatttgttttggcctgccagttattattcttaacgatatgaggtgacgactcaaactactttcctacttgcagaactgtggttcaaagaaggcgaggtctgccaaaatgggaatcagttcaagcaccgtggcttatagaataactcttgctaatcatttccagagttgtattcaatgtttttttttgtgttcgtcttgattcaaggagccatgcaag

SEQ ID NO: 14 - DNA, 473 bp, Zea mays
cagaaatctgaaccaggaaccatcaggggtgatcttgccattgttgttggaaggtatgctttcattttcttttcatcctacactttagttttgcgtttcttcgatagcatcatgcaagcttattgcaagttagaattcctttgtactcacatgccaccgcttgaacaccagaaacatcattcatggaagtgatggcccagagacagcgaaggatgagatcgctttatggtttgaacccaaggagctggtctcttacaccagcaatgcggagaagtggatctatggggtgaattaacgagagagtcaatctgttttttttcccttcttttgatctcggttttcacataattgccgacagacctaggcacaaggatgtaataaagtcgctaccgtcacttctgagttggattgtgaccttcaggtgtagtaaggcacaaggaaggatggaaaggaaaggaatataccgtgaaata

SEQ ID NO: 15 - DNA, 1128 bp, Zea mays
cgtggactacatcatctctggccctgtggtggccatggtctgggagggcaagagcgtcgtcacaactggccgcaagatcattggcgccaccaaccccctggcttctgagcccggcaccatccgtggcgactttgctgtcgacattggcaggttagatctcagtccgatttttgtatcttatggttttcagtcaccgttattcatgcattggttatgcttagatgcttaatgtgttaaagctgctcaatccaattgggactgccatacatccaatgtaaaaaatgttcacactcctgagttcggcgtagttatatatcctaaaatttgctcttttccatagtgatgctaaaattcttgactgactagcattggatttatgtagagctacggttatttattttgtgtagtcaaattagatgttaagagacaatgcatgtagatgattatgaccaaatgttggctctcagttcattagtttgtttgtatcttggggtaatgaacatttgtggtcatctcatgattgcagccatgctgcagatcaactgttttaatgttggcattatgacctgttacatccaactcgtgggtccagtaggtacatcctctggcatgtgtttaccagatctgagcttatacttgttctgaatctgatgtggagtccacaaaacatttagacatcagtggatgtaagtgatgtactttcctggtgttgtggggactggttgctctggttgctgtttaatcatccatttaactcgtctttagccatgaatagttggggtgtactgtatcttattctgcgtagttgtccatgagggttttgctgtattgtacttctgatttaatctagaaaacccattttttaaatgtagtgttaaagcctctcggattatgtctgtggtatcagattctactatgatgccaagttctcatgaccttgttttgtgctataggaatgtcattcatggaagtgacagcattgagagtgctaataaggagattgccctgtggttccccgagggccctgctgattggcagagcagccagcacccctggatctacgagaagtaaacatggaaagtttcacatcaaaccttgagagccagaggaagcatgtcaccatttgtg

SEQ ID NO: 16 - DNA, 594 bp, Zea mays
  misc_feature (535)..(540): n is a, c, g, or t
  misc_feature (557)..(560): n is a, c, g, or t
  misc_feature (570)..(579): n is a, c, g, or t
ttgattgaaaaccattatctttctgtcactagcccatggttggtcccttttatagtctgggtggctgatggccatagtaatctggaattaagtgcagctgctgttgcgttgtaaagtctaatcgcgaagtggacaagaaccacagatcagcactgctgttagaaaagaaaaaaagaggatcctaggatatggattccaaaagcagatattcctgcccaccgtttgtgcctttcaccaggtttcgaacattccctttccatttcagcgtcaaggtaacttttacagcgcaacaacataacagaaggcaatcaatccttggccagttgttatatttgatattatggatatcacacagaaagaaactatgttattgatttcagattccttcagtatgaatgaaaaaaaactaaaacaaaaccgtacgggagagactgtttagttgaactatcctcgtgtctaacacgggcacacacacacttaactgttcaggaatggttgtgttaacgagttagtacttttcactcgctgtatgatnnnnnnatgaagttcatgaacgnnnngaggtccttnnnnnnnnnncactacgctgacctt

SEQ ID NO: 17 - DNA, 593 bp, Zea mays
tctggatttcatatcgtcaaagaaaccgaggtccagcttgatgctgagagggcatctgtcttctatgcggagcattcccagagaagcttctttgacagcctagtcaagtacataacaaggtattattgttgttggaaaggctcgtgtctcttaagtttcttgcataatgcttctagtctatgcagcagccttcagacgctaacattgacactaacagtttgtaacatgactccttttatctttgtgttgatctttagtggtccagttcttgctatggttctggaaagacctgacgccgttgcgcaatggcgcactttgattggaccaactgatgcaaaaaaggccaaaacctctcatccaaacaggttaaaaactacatttgttttcctttaacatgttatgtgtttggatacatttttttattgcattactgtattcatttctctttgttttgtggtcgccaacagtactctttgtcatttcagcattagagcaatgtgtgggctggactctgagaaaaattgcgtgcatggttcggattcaccagaatctgcagacagagagatctcatttttcttcggagaagctgaatc

SEQ ID NO: 18 - DNA, 491 bp, Zea mays
ttctttgtggggctggacatagtggactgcctcctggtcaacaagaacgggcgcttcaccggcgaggctttcgtggtcttcccaacagccatgcaggcagagtttgcgctgcatcgcgacaggcagaacatggggcggaggtatgtcgaggtgttcaggtgcaagaagcacgagtactactgtgcaatagccaatgaggtgaaccagggcggttattttgagccggagtaccgccgctccccgcctcctccgaggcctaggaagccgtctgaagataagggcagcatggagtacacagaggttctgaagctccgcgggcttccctactctgccaccactgaggacatcatcaagttcttcctggagtacgagctggcagaggagaacgtgcatatcgcctaccgctccgatgggaaggccacgggtgaagccttcgttgagtttccgacagctgaagtcgcgaagacggccatgtgcaaggataagatgac

SEQ ID NO: 19 - DNA, 698 bp, Zea mays
  misc_feature (605)..(606): n is a, c, g, or t
  misc_feature (625)..(633): n is a, c, g, or t
  misc_feature (660)..(661): n is a, c, g, or t
cgctggggtggcgcatgggcggtgtcacgccgctggattacctcccctgcctctccttcaggctacgccgaggcggcggcggcgggctcgttgccgccaaggccgccgcgcttatcttctccgccgcggaaggttagccaaccacatgcattgtcgcccatctcccgcccatccatgcctgggattctgggaacctgaatgcatccgtgttcgtgctctgttctcgcagctgccagcgtgctcgactacaggccgtccaccgtggccgtcgccgccgtcctggcggcggcccacggcgccatgacaaaggaagcgctggagtgcaatatgagcagcctcactccgtcctgcctgctcgacaaggtccgtgcttgctcggttgctccttgtacacgcactctgttcgactgttcccgacacatctcgagaatgaactcatgaaaacctcacatcgtctgtgcacgcggttcctcccggtgatcaatcaggacgacgtgcacgcctgctacagcacgatgctgagcgagagctcctcgcctacgccgagcaagctggcggacaagagaccgccgccatccagctccggctcgacgacgtacgagtcnntcgacgcggcctcctcgtnnnnnnnnncggcgggccggagcaagagggcgcggnnggagatgccgagcattggcccatgagaagcaccgccg

SEQ ID NO: 20 - DNA, 645 bp, Zea mays
gacctctactgaccaaagaagcactcgattccaagatgagctacctttctccatcttgtcttattgagaaggtgagtcacttgcttacatttccatcttgtagtacttgtgtagcattttgaccatatgaatgttcagtcccgatgaaccttggattaggaaaacttcactataccatttttttatataaatgaatgtgtcggtttctttgaccaggaacatgtacatgcctgctacagtatgatggttggggacaataacaggagaggtagcaagagatcattgccatgttcaggctccaacgagattgccactagtacatatcattctgttcttgttgatgatgttacggacaccgccgccgcctttgccacggcggtatcggccaggaataagcggatcaggctggagctgacgggcatcagttgagaaagctagcaccaccggggacacagtttttagccagatgtctaggggggcttggtttgatcttccctttcattttcttcccttctttttgaacttatatgtttgcgaaaaagaagatatttttttaggttctttgagccattgccatgggttggcattggctgttgtcagatttgattggtttggtttgtgagaggtggaagagatgaacaaagc

SEQ ID NO: 21 - DNA, 472 bp, Zea mays
  misc_feature (59)..(59): n is a, c, g, or t
  misc_feature (364)..(365): n is a, c, g, or t
  misc_feature (372)..(373): n is a, c, g, or t
  misc_feature (384)..(392): n is a, c, g, or t
  misc_feature (425)..(427): n is a, c, g, or t
  misc_feature (436)..(449): n is a, c, g, or t
  misc_feature (454)..(464): n is a, c, g, or t
ctggttgatggtcgactacaacaacaattgttgcataaggaaaggaaatttaaattcanaaatcctaggcttggttaagttgagaagtcattttgcattcatttttctgttggaagtggtgtatcctgtaaaagttggattggtttggttgcatgttcaaactactgtcaagcacccaaacaccttttttatttgttcattttcctattttcatcctgtcttttcaaatgcagtggaagcttgtttcgcttacttcaaaggagcgctaccaagttggatgtgagacggcgtgtccacatggctttagatattgtaagtgcatttttttggttggtaatatgactccactattcacatgattcanntaaaagnntggggccagcnnnnnnnnntttcatatttgagcaaaaactgccaactctgtnnnaaatttttnnnnnnnnnnnnnntggannnnnnnnnnnaacccctt

SEQ ID NO: 22 - DNA, 687 bp, Zea mays
tttatgcaagcaggaggtgtacttgagatcatggaaggcaattgagcagggacttcttgtgaaaggattagagatttttggaaggaacaggttgggtctttctcctaatatccaactctagatagctcatagtgatcagattggtgttccttgcacaaggaacttaggaaatttgtttcccttgatctccaaatttcttgaaattaacctttgtactgtaaatttgtttcccttgatctctttaccttgtgacaccacataaacgtatccgagatctttgtactgtaattgtaaaaaaacaatttaatcttggtttacctaatcttaatagttacaatgaacccatggtttgtctttcacacagttgtttaattgctcggaaccttcttggtggaatgaagacgtgcaaagatgtttttcaatatatgaattatattgaaaacaacagtgcctctggagctcttagtggtgttgattctcttgtcaaaggatatattaaggttggatgcactgtgacccttatttgttgatacttacattcaagccggtaacttaatttggtgttgtccgtgttgatgtcccagggtactgagttgcgcacaagatcaagatattttagaaggcgaggtaaagtccgtcgtttgaagtacacctggaaatctgcaggttacaatttcaaaaggatta

SEQ ID NO: 23 - DNA, 445 bp, Zea mays
atgatggtgctcatgaaccataaaatatgaatgaaggaattttacagagagaattctcgcctacgaacagagcagcctgaatcagtttcatttcaggctgcttctaacaaataatcagttaaacatgatggtaccatgactaaaatcgacactatgttattgcctaatgcttgcctgagtcctatatcacaatcactatttgtagcattaacaatgagatcctagccctgcactcaagctgtaggaaaattgcaatgctaaatcgctcagcaagcctacacaactgttgaaatctctggagttctgcaaccgagcattgaacagttagtgtattcctgcaaaatcaatagacacggcctcggcaattggtagttccacaatggcatgggcagccatcgcctgctacaagcttttgtcggtaatcataggcgagttcttctcctac

SEQ ID NO: 24 - DNA, 720 bp, Zea mays
  misc_feature (672)..(676): n is a, c, g, or t
tccggaaccacaaccaccagggcggcgccgcgccattccacggtcagcggctcctgctcctcagctcctcgcttgctcccctctcgtccggtcccttccgttccgtctggccactccattcctcccctctgctggtctcgacgacccttctcggcggcccgtgtactctgatccgggattatggctatgcataggaattgcatggcatgatcaagcttcatccattcgtcgtctgtcagttgcttatcagtactgttgaagaaaaaacgaaattaaatttccgcagcatgaactaattaaggcccgggtttcgttcctttcctcgtttggttcagttaccgccgtcgacagcggcaagaaggcaatggagcatctccggctgatggagcaaggcggccagctggattcatgtgccgctgatgctaatgtgagtactaccagtaccacacctatacccagtctcatgtactcgccgcccaatcgtaggccaccgtacatgtctgcagatgccgagctgtctcttagaaatggagaaaggtttcctttagtgtactgatttagttctagtgcgttagtattaccaaggaaaaaaaacatagaccgtgttctcatgacgtgatgagatctttgactgcaagtgcaagtgcaagcagaaatgaaactgagataagnnnnntttttgcagcggataaccattgacatcgtgctcacggactactg

SEQ ID NO: 25 - DNA, 1020 bp, Zea mays
  misc_feature (1010)..(1015): n is a, c, g, or t
aatacgcttcctccgcgaatgatggaggtgatggcagctggaaatctcagagaaagaaaagagagaaagaagatgatgaaactgacctcgaaaatggtgatccttcttctacatcaaagaaaccaagagttgtttggtcagttgagcttcatcaacaatttgtgaatgcagtcaatcacctcgggatagacagtaagattttgctacttgtatttgtagttcttacttttattgacaagaatttgctgtaaattcatattgccagttatgtgccttcttgattgaatttgagtattgttgattactgtaaaaaaacctgaaccttaaacgaactcaactcttctccatcatgcttatttgtttttattttctgcagaagctgtcccaaagaaaattttggaattgatgaatgtcccaggcttaaccagggaaaatgttgccagccatttgcaggtttggtttccagcgttctgaccatattacctgttttagtacctatatctttattgcacgtgatgttgccgcttatgcacctgtacattttataccatattattctacctaaatttaatctggatttgttagtgagataaatagaataatagatggcttcctgcaagagtgaactcagttgagcggcctgtgcttttattgttacagcacttgtctattctttcattgcagaatgcaatttaattgcaccagaccatcatactattcattgtttgactgaaagcattgtgaaaacgtgttactaaaaaatgacttcccttgatctccatggtacatatcacaaaaacgaacatcttttgattagatgaggatcaactatcctctttttattaagcatttttgaatgtaccctatcaccctatgtaataccattaagtttgctagtttctattggctgttggtgagctccaagtccagccattatttaataatctcatagcttaagacatcaatggtgataagatgcattttttctatgtgcagaaattcagactctnnnnnnagaga

SEQ ID NO: 26 - DNA, 637 bp, Zea mays
ttgatccacctgatagtacatgtgcacaagtaattcaccctagatcagagatatgcagtaacaagtggttaccgacagcaaacaaaaggaatgtcaagaaacagaaggagaataaaggtatatgctccacactccacagcattcatcatatagaagtgaagcatttcacagttcttccactattgtctcattcaaccaaattccatgtttttacagatgaatctatgggaagatacttagaaataggtgctcctaggaactcaagtgcagaatatcaatcatctctcaatgatgtatctgttaatccaatagaaaaaggacatgagaatcacatgtccaaatgcaaatctaaaaaggaaacaatggcagaagatgattgtacaaacatgcctagtgcaacaaatgctgaaactgctgatttgattagctcaatagccagaaacacagaaggccaacaagcagtacaagccgttgacgcaccagatggcccttccaaaatggctaatggaaatgataagaatcatgattctcatatcgaagtgacaccccatgagttgggtttgaagagatcgagaacaaatggagctacagcggaaatccatgatgagcgaaatattctgaaaagatcagatcagtc

SEQ ID NO: 27 - DNA, 637 bp, Zea mays
  misc_feature (241)..(241): n is a, c, g, or t
ttgatccacctgatagtacatgtgcacaagtaattcaccctagatcagagatatgcagtaacaagtggttaccgacagcaaacaaaaggaatgtcaagaaacagaaggagaataaaggtatatgctccacactccacagcattcatcatatagaagtgaagcatttcacagttcttccactattgtctcattcaaccaaattccatgtttttacagatgaatctatgggaagatacttagnaataggtgctcctaggaactcaagtgcagaatatcaatcatctctcaatgatgtatctgttaatccaatagaaaaaggacatgagaatcacatgtccaaatgcaaatctaaaaaggaaacaatggcagaagatgattgtacaaacatgcctagtgcaacaaatgctgaaactgctgatttgattagctcaatagccagaaacacagaaggccaacaagcagtacaagccgttgacgcaccagatggcccttccaaaatggctaatggaaatgataagaatcatgattctcatatcgaagtgacaccccatgagttgggtttgaagagatcgagaacaaatggagctacagcggaaatccatgatgagcgaaatattctgaaaagatcagatcagtc

SEQ ID NO: 28 - DNA, 804 bp, Zea mays
cttgtgatgtacgatttgcctgccagaaaattttactaatgtaacctgcttgtgatgtgtcagcagctaagggtaataacttgattccaacaagagaagacgatttatcgccaaagaaaagaacatgtttgaatgacaataattctgagagaacttccagagatatggagctagtccacattatggacaatcagcagaagcatgacacacagagggatgtggatactatgagaacaacatccaggggaaatgatgagaagaactccatcccagcacaccagttggaactttctcttagaagaactgactatggaaaattagagaaccacgagaaaaatgatagaagaacactgaaccattcaacttcatctgcattttacttgtaagtgctcctttctttggcttttcataatagcgatactttcgtcatcctaaaaacttatgtgaagtagataagtctagttacagatctggttgttatttttatgtcaggtttttttttgttcctagtgtaggtacagggtaacagaatttttttcaaataatttttgacatttatcttttcttttccaagcatagttaagagacttcttttaatagtgaattaccatgagatgaatagataatctcgaagcataaaatatctaactattgtagacacaccataaactttgagatggaatttcaagtgcccattgctgtatcttactggacaatttgcttcttttcgaagttccacaagtgcccattactgtatcttactgtggaagtatcttgtcgacaggtataattgcaggactgcgt

SEQ ID NO: 29 - DNA, 521 bp, Zea mays
cgtctgcgcggtcctgcattgaaaaaaataaacgcatggttcacataaaaatacgggaccgtaatgctgactactgtcgaatataaaaaaaaagatgtataggaccataccggcctaaacatgtccacgacaatgtcatccagaccaccactaagtcccctttgcagcctacctgtccccatgagttcgttgttgtagtttagatgactgctgacagcttggtgatcaatcctgccatcttgcagaggggggacaacacaaccacctgaattgctaccacccagtgtctgccctggaacaacagaaccgtctatgcgaaggttcggcaatgtagagttgacgcctgaattactaagcgcaaggttgttattcagcatctctctcgagtttgtgctgcttccataagcgaagggcactgcttcctgagtgaacggcatcggaagaccgttgctggctagtgatgctacttggtggctctgcatttcatttcccagcaaagggatctgactggatgcttctgt

SEQ ID NO: 30 - DNA, 348 bp, Zea mays
aagattgtgactttgatcaggaaaggaacggagctattttgtttacttcagaagaggcaagtatattatgcggcactgattttacttgtctacctgaagacctgtccggctatcaacttcaaggtgtctccttcgggaataaaggattgaacagcatcgatttatatcagtgcaatgatacaatgttaatacctggactgcacaataattggtatgatgatgatgtagagtttagcagtgaaaccgtggagttcccattgctagacggaggcctgtttgcataaatacctcatctggccctatctttcaaccatgcccttatgtcagcagggatgatgttcattggta

SEQ ID NO: 31 - DNA, 575 bp, Zea mays
  misc_feature (498)..(499): n is a, c, g, or t
  misc_feature (545)..(551): n is a, c, g, or t
ttgctttcccggggggcgatcgaggccacgccgctgctgccgcggtgccctccctctgcctctgggctctggcctctgcgtgtgacgtgccgtgccatggcgctcgccctcgcctatatcccccgcctccctcgccccgccgctggccgccgcattcagtaaaaagccacctaccctaccctcctgcgctggtactacttactacctagccaggccaaggagcccaacgagggggaacgctgcggtaggcgcgcgctgctcgtcccaccccacgccgccatgacggtgccggatgccgagtcgcgcttccatgtcctcgcggtggacgacagcctcgtcgacaggaaactcatcgagatgctgctcaagacctcgtcctaccaaggtgaaattccgtccgtgtttctgggtgttttttcttctctccccttctttccctgcggcgaaattccgtctcatcatcatccgcctcgccctcgttctccagtgaccacggtnnattccgggagcaaggcgctggagctgctggggctgagggacgcgtnnnnnnngtctccgtcctcgcctgaccacca

SEQ ID NO: 32 - DNA, 683 bp, Zea mays
  misc_feature (646)..(646): n is a, c, g, or t
  misc_feature (673)..(678): n is a, c, g, or t
acgacagcctcccggacaggaagctcatcgagaggctcctcaagacctcttccttccaaggcaaactcagccaccggatgattattcccgtctcctttgcctctgctctgagtctcacgaaaggtggccggcccctttggcttttgtttctgaatgtatgcagtgaccactgtcgactccgggagcaaggcgctgcagttcctgggcctccatgaccaggacagcacggttcctcctgtccacacgcaccagctggtaagaagaagatggcttcctcttcctagctcctacgagttggttggtcaaccgtgttgtgcactgcttgtattgtcttctcctagcgtcactagctagtcctcaagaagaggtttctgatgtaatcaggatgtggctgccaatcaggatgtggctgtgaacctgatcatcacagactactgcatgcctggcatgacaggatatgacctgctcaagaagatcaaggtgactactgaactactccggcatgatcactgaacattctgtatagtgcttactttctggcatgatcactgaacattctgtatagtgcttgctttctggcatgatcactgaagataacaaggcctaaagatgcatgtttggttttggtttggtttgttctgccagnagtcgtcgtctctcagagatatcccgnnnnnnatcat

SEQ ID NO: 33 - DNA, 625 bp, Zea mays
  misc_feature (554)..(557): n is a, c, g, or t
  misc_feature (574)..(583): n is a, c, g, or t
  misc_feature (589)..(607): n is a, c, g, or t
  misc_feature (618)..(622): n is a, c, g, or t
agcggtgccttggcaggctgtccgcgcagcagcatcatctcgtttcatttgaaccatgcggccatgcggggggaggacaggacatatagctaaccttggattttacgtgtgtgcagtgacgaccgtggactcggcgacgcgcgcgctggagctgctggcgctggggctggtccccgacgtgaacatgatcatcacggactactggatgcccgggatgaccgggtacgagctgctgaagcacgtgaaggagtcgtcggcgctgcgggccatcccggtggtgatcatgtcgtcggagaacgtgcccacccgcatcagccggtgcctggaggagggcgccgaggacttcctcctcaagcccgtccgccccgccgacgtctcccgcctctgcagccggatccggtgaccgcccgcgcaaggatggaggatctggttgcgcgctctgacttaattagaggagttgttaggatccaattttttgtgtgttcgttcgttcgttcgttcttttctttctttcttcttggacatagatctgctgccgccgccgcagctgccgnnnnctgaaacaagaagctannnnnnnnnnaggatnnnnnnnnnnnnnnnnnnnaggaaggggannnnntgg

SEQ ID NO: 34 - DNA, 592 bp, Zea mays
ggtgccttggcaggctgtccgcgcagcagcagcatctcgtttcatttgaaccatgcggccatgcggggggaggacaggacatatagctaaccttggattttacgtgtgtgcagtgacgaccgtggattcggcgacgcgcgcgctggagctgctggcgctggggctggtccccgacgtgaacatgatcatcacggactactggatgcccgggatgaccgggtacgagctgctgaagcacgtgaaggagtcgtcggcgctgcgggcgattcccgtggtgatcatgtcgtcggagaacgtgcccacccgcatcagccggtgcctggaggagggcgccgaggacttcctcctcaagcccgtccgccccgccgacgtctcccgcctctgcagccggatccggtgaccgcccgcgcaaggatggaggatctggttgcgcgctctgacttaattagaggagttgttaggatccaattttttgtgtgttcgttcgttcgttcgttcttttctttctttcttcttggacatagatctgccgccgccgctgccgccgcagccgctgccgtcgactgaagcaagaagctaacttagttttagg

SEQ ID NO: 35 - DNA, 728 bp, Zea mays
ctttgatgttgccacacagatctgcccttttgtctctatgttgtatgttgatgacatgctaacaatatacttgtttaaacgcccttccatttcttggcgtgtttcagtctaatccttccgttgctgagcgcgaccagagagacaagatcggtgctccaggctctgccctagatgccagtcaatcatgtaagatatttcagcctgtaataactggtcttcctttttgttgttaaccacttcttgagttctatatctccatctgttttctgataattattttaattgccagcgactccgggaagaatgttttcacgtcctataaaaactaacctgaaggttgctgagtcgtctgcatttctagcatatgttaagtcaagcaccccagccaccagctcatttgatagcggactacaaagaggtgacagccggttagattctttggataaccatggtaattgctctagtgcaacagatagaagtgacaccggtgctgatgtaaatattcggaataaagaagcttttgagatgcctgtgcagtatcctatggtatgcttttcttcctctagcatgcatatggagcgaagcaatgaaggccataatgacacttcaggaactccacctgcataccatttcccattttattatccagggatggtagaacacaacatggcactttcatcagtgcaaaattttcaagcaaacataaacagtgctcaagcacatacacc

SEQ ID NO: 36 - DNA, 739 bp, Zea mays
gcactgatgaaagtgccatgttgtgttctaccatccctggataataaaatgggaaatggtatgcaggtggagttcctgaagtgtcattatggccttcattgcttcgctccatatgcatgctagaggaagaaaagcataccataggatactgcacaggcatctcaaaagcttctttattccgaatatttacatcagtaccggtgtcacttctatctgttgcactagagcaattaccatggttatccaaagaatctaaccggctgtcacctctttgtagtccgctatcaaatgaactggtggctggggtgcttgacttaacatatgctagaaatgcagacgactcagcaaccttcaggttagtttttataggacgtgaaaacattcttcccggagtcgctggcaattaaaataattatcagaaaacagatggagatatagaactcaagaagtggttaacaacaaaaaggaagaccagttattacaggctgacatatcttacatgattgactggcatctagggcagagcctggagcaccgatcttgtctctctggtcgcgctcagcaacggaaggattagactgaaacacgccaagaaatggaagggcgtttaaacaagtatattgttagcatgtcatcaacatacaacatagagacaaaagggcagatctgtgtggcaacatcaaagaacagaaatgaaaatatactaaaacagcaacaacaaaaaagtgctgcaacaaac

SEQ ID NO: 37 - DNA, 492 bp, Zea mays
aggagagccactctgatcatgcatatggttcctctccaagtgcatcgtgcatcactcaggttcccacctggacacttaaggatctagaaaatgtgatgcttggacccgattctgacataggtagccctgacagttcctttctgcttgacactgccttgcatggaaataactggagagaacttttgggaattcaaactggggatttgaggcaggtaattgtagcatgtggtaaggctgttgacgagaatgctgtctatatggatgcattgatgtctgagttaagggagatggtttctgtctctggtgaaccgatgcaacgtctgggagcttacatgttggaaggcctcattgcgaggctttctttcactggacatgccttgtataaatctctgaagtgcaaagagcctgtggctacgagttctgagctcttgtcctatatgcatcttctttatgagatctgtccattcttcaagttcggttacatgtctgcca

SEQ ID NO: 38 - DNA, 374 bp, Zea mays
atgcagtggatcgggcgcacgtgcatgtgtgtatggcgagctgaatggctcacgcatctagggttttggagcagtagtagggattgctagttcacgcacacatggttgtatgcagcaaggtgatccaggaggaggtatggtcgatgcatggttttaggttttagacttgcatctatttcaaatttggatcatcgatcgccacaagctcttggcgtgatgattccgattttcttgcttctttgttttttttgtcacatttctctgtgtttcttactttcttcatgtaattcaaggttaacaactttctgctccctctggagggatttacgtgcatggttttgtcatactttctctcattcctctgtttgcatttg

SEQ ID NO: 39 - DNA, 904 bp, Zea mays
  misc_feature (784)..(809): n is a, c, g, or t
  misc_feature (814)..(831): n is a, c, g, or t
  misc_feature (839)..(901): n is a, c, g, or t
ctcgacttcctctgtcagttgtctagctttaatttccgccatgtctcagttcttccatgcagactaatatattatatactaagcatatatatacatactaatgcaggtgacttgaagccaggcgctgaggtgaagatcacagggccagtgggcaaggagatgctcatgcccaaagaccccaacgcaacaatcatcatggtgagtagagttagagtcagctcatccatccatctagctagctagctatccctccatgaaaccgcttatcatctcgcactggtaaatccctgatgtgttcatcagctcgcaacgggtaccggcatcgctccgttccgctccttcttgtggaagatgttcttcgaggagcacgaggactacaaggtctcaaactctcaaataattaatcaaacaacaacagagacagacagacagacagattgatgaaatgaactaattaattaatgaactgaatctatatccaacatgatatacatagtacaccgggctggcgtggctgttcctgggcgtcccgaccagcgacaccctgctgtacaaggaggagctggagaagatgaaggagatggcgccggacaacttccggctggacttcgcggtgagccgggagcagacgaacgcggccggggagaagatgtacatccagacgcgcatggcggagtacaaggaggagctgtgggagctgctcaagaaggacaacacctacgtctacatgtgcgggctcaagggcatggagaagggcatcgacgacatcatgctcgacctcgcnnnnnnnnnnnnnnnnnnnnnnnnnntctcnnnnnnnnnnnnnnnnnncgctcgannnnnnnnnnnnnnnnnnnnnnnnnnnnnnnnnnnnnnnnnnnnnnnnnnnnnnnnnnnnnnntca

SEQ ID NO: 40 - DNA, 712 bp, Zea mays
  misc_feature (702)..(708): n is a, c, g, or t
tcttattactagtttaggttatcagacatgtgttctttgggatgttactactggacagaggatatcaatatttggaggtgaattcccatcagggcatacaactgatgttcaaaggtaattggtagtgcttctaattttttgaggattgaatattttagtgtcatgtgtaacgcttctgatttctctcctcaaagttaattggtatcttctcatttgtacatttttaactttaggctggtgcacactaggttgctagctttaccaatatgttaatgtttgatgatcaaattatccctattgcttctaaagttttctttgtaaactgaatattattcatgtggatttgaataaagtttacctacaatgactagtttgtatttgtctgttgttacatttggacaatgaaagcatactttttagtactgaatgtaattttagtaataacaagtactccttccattccaaattgttggtattttagtttgtcataagtcaaacttctctgtttaccaggttatcattgatatttggagtttggttttgaattctctgacctttccctttcttgttcagtgtgtccatcaactgatcaaatacaaatatgtttgtctctcgctcatgtgatacaactgtgaggatgtggccataggtttggtactggctcagatgatggcacatgtagattatttgctatgagaacannnnnnnaact

SEQ ID NO: 41 - DNA, 762 bp, Zea mays
tgggcttgagcgatcaggacattgttgccctctctggtggccacaccttggtttgttactgtcactcatgtttgtttcaggtatgtaatatgtatgcttgcactgatttaattttcttgaggtttatttagggaaggtgccacaaagagcggtctggtttcgagggggcctggactacaaaccctttggtctttgacaactcttacttcaagtgagtcttagtctcgtttactattgaaaagcaactgcatttagttaagaaatacttaaaatttgtttaccttgttatgtcattcttggccagctgactgctacactagaaattaatctattccatttctcccgatctattttcgtagggaacttctgagtggtgataaggagggccttcttcagctcccaagtgacaaagccctgctgagcgaccctgttttccgccctcttgtcgagaaatatgctgcggtatgtctttcggtattgttataggttattatggagatctgtagggagacctactgattatttggtgtgtcttgtaggatgagaaggctttctttgatgactacaaagaggcccacctcaagctctccgaactggggtaaccattgattgcacaaattgtgcttggtcaattttaacaaatttgatcgtttactcttgtggaatgcaggtttgctgatgcttaaatagaccctatcttggagtgatacattctgctgcctgtatggaatcatgtggtcttttgcatctggagtcaatgtg

SEQ ID NO: 42 - DNA, 491 bp, Zea mays
ggaggcgctcatcgacgagcaccgcggcgacaagggcaagctcgtcgtgctggacgtgggcctcaagcactgcgggccctgcgtcaaggtgtaccccaccgtgctgaagctgtcgcggtccatggtcgacaacaccgtcttcgcgcgcatgaacggcgacgagaacgacagctgcatggagttcctcagggccatgaagatcgtggaggtgcccactttcgtcttcatcagggacggccagatcgtcggccgctacgtcggctccggcaagggggagctcgtcggtgagatcctccgatacaacggcgtcagggtcacctactgaagtgaagtagtgaacaacaaaccagtcagagtcagagcaagcgcaagccgacaagcaacgcttcgatacaaaattgaagacgatacaaaattttagattactgcgacatccatcgacgattggccgatgtttagactgtttattgtgtaccattaccatacttgcc

SEQ ID NO: 43 - DNA, 482 bp, Zea mays
  misc_feature (315)..(319): n is a, c, g, or t
  misc_feature (322)..(329): n is a, c, g, or t
  misc_feature (348)..(353): n is a, c, g, or t
  misc_feature (358)..(373): n is a, c, g, or t
  misc_feature (376)..(377): n is a, c, g, or t
  misc_feature (386)..(390): n is a, c, g, or t
  misc_feature (422)..(426): n is a, c, g, or t
  misc_feature (436)..(442): n is a, c, g, or t
  misc_feature (470)..(479): n is a, c, g, or t
gctgctcctcgagatcgctcttgttgccaaccagcattatcacaatgttcttgtcagcatgggctcggagctcatctagccagcggggtatgtgatcgaagctctgccgtctggtgatgtcgtagaccagcaaagctcccagtgcgcctctataataagcactagtcacggctctgtacctgcagcagttgggtgtagccagcaactcagcatgagaagttcatgaaaaaaaaggtgatggaaagcaggcacgaaaagtaacagcacctaaaatgactaccaattgtatcgttacaagctttctataaaatctgnnnnntcnnnnnnnnaaaaatgactactaaaggnnnnnnctaannnnnnnnnnnnnnnncannacccaatannnnnaataatttccacaggtcaccaccactctgctnnnnngaatgctggnnnnnnntaatatcatgaacaggtctaaagcaagnnnnnnnnnnaat

SEQ ID NO: 44 - DNA, 710 bp, Zea mays
tgagaacagagtagtttcttacgaggctggcaaggtaatatttctctgcattaattacttttactggacatgcttctttcaaccgggatgatagttaaattggctgcatgttgcttgtcatcataggcccttgctgatgacatcggaataccattccttgagactagtgccaaggatgcaacaaatgtggagaaggcattcatgaccatggcaggggagataaagaacaggtaactagatcatttgtgttgtagactttttgtggcagcattttctcattccttttggagtcatcaagtatagtatgtcaacatatggaggccctcttttattgagggactgagtacaaacaaagaacactgtgcaacataatattgcatatgattcaaagtgaaaaataagccatgaatcccatgatcactatgtttgctattgtttatctgtatacgggagcacctaatcattcttcattctccttgttggataggatggcaagtcaaccagctgcaagtggtgctagtaggcctgcaactgtgcaaatgcggggtcagcctgtttctcagcaaagcagctgctgctcttgatcgtctgtctagatcacagtagtgtgattgtgcagcaagcaaaacttaaattggttgctccctgtacattaagcctattactgtcccaaagaactcgatgttatctatccgatactggaagtctgt

SEQ ID NO: 45 - DNA, 495 bp, Zea mays
  misc_feature (155)..(155): n is a, c, g, or t
atgtatcgcaagatacagaatggtgatttcaggtgccctagttggttttcacacaaactcaagaagctcttgtacaagatcctcgaccccagcccagacacaagaatttcagtccagaagataaaagagtctacctggtttcgaaaaggccctgnggagacccgtacagtaaaggagagaattctgagtgagaatgacaccacaaatgctgctccagccgttgctatgaggcgcaagaagaatgttcatgaagacgtgaagcccccgactgtcacaagcttaaacgcctttgaaattatatctttctccacaggattggacctctctggcctatttatcagaaaggagtgtaagaaggagacgcggttcacttctgataagggtgccgtgtccatcatctcgaagcttgaagatgttgcaaaagcactgaatctcagggtaaggaagaaggacaatggtgttgtcaagattcaggggaggaaggtggggaggaag

SEQ ID NO: 46 - DNA, 574 bp, Zea mays
cctcttcttcctcttccttctcgccagcctcgccttctcccaagagttcacctacaagggcttcagcgccagtggccgcggcgggagcccgaacctgaacctgaacggcacgtcggcaaccgagatcttgcccagcggcatcctccgcctcaccaacgagacgtcccggctcttcggacacgccttctacccgaccccgctgcgcttcctggaccagaagaacggcaccgccgtgtccttctccacgcagttcgcctttaccgtggtgcccgagttcccgacgctcggcggccacggcttcgcgttcgtcgtcgcgcccgacccgcgcatgtccggtgcgctgcccagccagtacctgggcctactcagcgccgccgacgtcggcaacgccaccaaccacctcttcgccatcgagttcgacaccgtgcaggacttcgagttcgacgacgtcaacggcaaccacgtcggcgtcgacctcaacagcctcatctccaacgcgtccgccaaggccgaccctttgaacctcaagtccggggacaccaccgcctgggtcgactacgacggcgccgccagg

SEQ ID NO: 47 - DNA, 487 bp, Zea mays
tatatttcttgttcttggtattgccatatgtaaactgattggctagcaatgccacattactgagttgtttactcttgacttgatgatgcaggtcattgcccaacttgaactgtggaaggagaagagctctggcaagtatgagaagaaggtgtatgtgctccccaagcaccttgatgagaaggttgctgctctccacttgggcaagcttggtgccaagctgaccaagctcaccaagtctcaggccgactacatcagcgtgccgatcgagggtccctacaagcctgcccactaccggtactaggcagccagcacacggcttgcagctcactcgggccgttgtgtgctatgaagttcgctacactggcctgtcagttatcttttgcatgcatatgcattatcatatacgcagtcgcgtagcaggtttccttatggttatcgcttgagctgagggggagggaaggagctgtttgcttttgctgaagaataa

SEQ ID NO: 48 - DNA, 489 bp, Zea mays
tttctcctgcctgctcacgaccgccctctcgccggtcgccggtcgccgctcgcaacgcaagtcggaagaggaatctctccaagctccaatcctccgatcctgccccaacccaagtcccctccaccaggccgcacacctccgccgcccggcgcgaccttgcatccaccagcctgccctctccttcgcgtgaggcggccccggcgaccgcgtcggcagtgcaagaccagaccgaggcttctcccgttggaaggttccagccatggcgagcgccgatctgctgcggaaggaggaggagttctactcctccctctttgattccgcaaaaggtaacccgcccatcccctttacccgaaaggaaaaaaaaactcctctttcgatgctcacatgtcgagctcaacccccaaatccgccccttattttagtgctgcgtgaacgcaggcgacggcgtcaagtcgcgctcgcaggtgattgagaggaagattgaatccc

SEQ ID NO: 49 - DNA, 726 bp, Zea mays
  misc_feature (653)..(654): n is a, c, g, or t
  misc_feature (675)..(681): n is a, c, g, or t
  misc_feature (702)..(718): n is a, c, g, or t
ggatcctgatgaagtacttggtaatttttttgcttattgcgacacttttcatagagctgatttatttggttcctataacttatactctccttgctcttgtagtgaaatatgaggcccgtctggaagatggtactgttgtatccaagtctgagggggttgagtttactgtgaaagatggtaaccctcttatgttctgtcttcacatggtcttctgaagatttttgtgcctatcggttgttttctaactactgtattgccaggctacttttgtcctgccctggccaaagctgtcaaaaccatgaaaaaggcagagaaggtgctccttacagtaaagccacaatgtgagattccatttcaaagtttgattattcttctgtagttacatgtctattttctctgaattatgacacttatttgaacttcctcacttcaaatgcagatggatttggtgagaagggtagaccagcagctggagaggaaggtgctgtgccgccaaatgcttcactgctcattgaccttgagttgatttcatggaagactgtcacagaaattggggatgataagaaaatccttaagaaggttctcaaggagggagaaggttatgagcgtcccaacgagggtgctgttgttgaaggtatgctcaagtggtcaanntacttaattgtaatgatgctnnnnnnngttggttcttgactcctttcnnnnnnnnnnnnnnnnnttgcactc

SEQ ID NO: 50 - DNA, 649 bp, Zea mays
  misc_feature (64)..(64): n is a, c, g, or t
  misc_feature (92)..(94): n is a, c, g, or t
  misc_feature (120)..(124): n is a, c, g, or t
  misc_feature (613)..(617): n is a, c, g, or t
gttatgctttcattttttattgagcagatacatttctgttgttcctttacccctgttctcctantgattaagtatgaattgacaattatttnnnatatgttttactaatgatgaaaatgnnnnntaaaaaaatgatactaatttcatttctgaatcctcatgtgcaaccaataggtgttcaaagagctgcaaaaacaagtttagaggctgtcattgtgcaaaaagccaatgcagaagcagacagtgcccctgttttgcagccagtcgtgaatgtgatccagatgtttgtaggaattgctgggtgaggtaatcagcactggtctaattaacaaccgacctttatgcattcatgaaccagttaaaataaatcatacaacagggtcaagactcaagaaactgtaatttttgttgactgcctatcttgttctattgttgcatattcagatttccgatttgtactattatagtttgtcacacataacatgatgtatattgtcttcagctgtggagatggttcactaggtgagccacttgcaagaggtgatggttatcagtgtggaaatatgaagctccttttgaaacaacagcaaagggtgagactgagtatatattnnnnntgctatttgtccctttgtatcactgtgctcta

SEQ ID NO: 51 - DNA, 458 bp, Zea mays
  misc_feature (89)..(90): n is a, c, g, or t
gcagattcagagtggctcctggataagtcctgggatatcctgaacaattcatcatttttatgtagtagagatagagttaagatcattannggcatggatgaagcttattatggatggatagctcttaaccacaacatggatatgcttggcacctcatcatctaaaatgacatatggttcacttgatttagggggatcatcattacaggttacatttgagaatgataaatcagtgcaggatgagacaagcattcgtctgagtattggttcagttgaacatcacctcagtgcttattctcttactggttatgggttaaatgatgcatttgataaatctgtagcacatctagtgaaaagactgggaggagttgctagcaatggcaaggttcaagtcaaacatccctgtctacagactggattcaaggaagattatatttgttcttactgccatccattgaa

SEQ ID NO: 52 - DNA, 747 bp, Zea mays
  misc_feature (104)..(106): n is a, c, g, or t
  misc_feature (393)..(394): n is a, c, g, or t
  misc_feature (438)..(438): n is a, c, g, or t
  misc_feature (480)..(480): n is a, c, g, or t
  misc_feature (483)..(483): n is a, c, g, or t
  misc_feature (709)..(713): n is a, c, g, or t
ggcctaccttttaagtaagtgatatcgactttgctgtccttctatttatcattgtaaccgattgaaattgttttgtgaacttacataatacatattgtattcannntatgggaacttgcctactcagagtcaattggcaggctgggaatttgctatttctcagcattctgctgttccccaaggactgttggtatgctttattatcaacttttcttatcaagacagatttttgagttggcatagattaaaatgtatattttgtaattactttaatgtgttcaggatatcatacaatcaatgccccatgatgctcaccccatgggtgttcttgccagtgctatgagcaccctttctgtctttcatccagatgcaaaccctgctctacaagtaagnnctgcctatacgcaccaatcaagacagaggatattattcaactanatcaactttctgtgatacaattaaccagaaatttcaacccanccngatctttaaatttgaatttaatattttgaacacatattctgctcatgtagggtcaagatctttataaatcgaagcaggtgagggataaacaaattgtgcgagtacttgggaaggtatgcctggttatctagttcctttagttaatgctataattctagcaaacaactggagatcttgcaaatttaaaatgatggtaccttgatttttatatgcatttggcttgttnnnnnaccaacaatagcagctgctgcctacttgagatta

SEQ ID NO: 53 - DNA, 1018 bp, Zea mays
tcgattgtggcgcctttgaccgagtttgaccaccccgagaaaggcgatgctctgtacggtaagttgcgttgccgccgcatctgacttccgggttaggaattaggataggatctgaattccaagtgcctcggagacgtgtaatttattctgcatctgaacctagctttatcagctgcagctttcaagtatatgcatcgatggatgattagattcaaagactaacaaatttaggacgacggcttatacagaatagaatagaatagaatagaaggctggctacgttaattggaagccaatgctctgttttctatttgtgacctctgcaaattttttttatttttgatgggtttcagctatggagctgactctggctctggaaaagctggttaatgagaagctgcacagcctgcatggtgtaagttgctctcacatgcttgtttatttacagagaaatatatattgcgtgcttcgcttaaggcatatatacagacttggataatgtatgtgcagatataaattgaatgagtgttgggtcactacatgtaacatgctattattgtaattaacaggtggcaacaaggtgcaatgatcctcagctgatagacttcatcgagagtgagttcctcgaggagcaggtataaaataaaatgctaccaacaagcttatatatgttcgttccgtatagtttacacgacggaattcttagctgatgagcgaaagttttgggttttcttttgaaaggtggaagccataaataaggtctccaagtatgtcgcgcagctgaggagagtgggcaacaaggggcacggttagtctgttgctaataaacttggtttcatctgctatatatgtctcgtgcccaaagttacgatattgttgagacgtggcttgcgtgcaggggtgtggcactttgatcagatgctgcttcaggaaggggcctgaaggaaggaaagaaatgaccaacaaggatggcgtggacggagctgagctctggttgtgttgtggtgttttcttttct

SEQ ID NO: 54 - DNA, 375 bp, Zea mays
gagcacgctggggatgggcggggacgacaagcagggcgacgccaacaccaacaccaacaaggactcctctaccatcaccagggatcactagacgcgtgtatgcacacgcagcacttggtccgatcctgtcgtccgtgaccctgtttgcttgttcgcgagtccagtatgggtttgtgcacgttttcagtgtcatggtttccttctctacgaaatttggtgttgtaagtttgattcgcaggtacgttgctgtgttttttctgcgtcatcaagtgtctgtaaacgagtcgggcgggtttgagtgtcctttgttgtgataataaagttggtaaatcgtaattaatatatagcatgcgactgtcttgctatggcctaaaa

SEQ ID NO: 55 - DNA, 373 bp, Zea mays
tgggcgccgtggtgcgggccgtgccggatgatcgcgccggtgatcgacgagctggccaaggactacgccggcaagatcacgtgctgcaaggtgaacacggacgacagccccaacgtggcgtccacctacggcatccgcagcatccccaccgtgctcatcttcaagggcggcgagaagaaggagagcgtcatcggcgccgtcccaaagtccacgctcaccaccctcatcgacaagtacatcggtagctcatgagcatgccatgccatgccatgcatgcatgcatcgacgactaaacacatatgtgtatctctagtagcctttgcatacgggatatgatcaattcaagcagccagccgtctgctactgctgtgtt

SEQ ID NO: 56 - DNA, 619 bp, Zea mays
accctactccaccacgcgatcaccgacagacgcctctccgacgagcaactcaaccccccaccgcgcacgcgagagccggattcccacgatggcgacgatccagcaccaggcgaaaccggcggtggcggcggcgccgagcacaactactggcggtgggcagcgcgcgatggacctctacgagaagctggagaaggtcggagaggggacctacgggaaggtgtacagggcgcgggagaaggcgacggggcggatcgtggcgctgaagaagacgcggctccccgaggacgacgagggcgtgccccccaccgcgatgcgggaggtctccttgctgcggatgctgtcgcaggacccgcacgtggtgcgcctgctggacctcaagcagggcgtgaataaggaggggcagaccatcctctacctggtcttcgagtacatggacaccgacctcaagaagttcatccggggacaccgcagcaacaacgagaagatccccgcggccaccgtcaaggtatacgagtggtttcctgccccctctcttccaccgtctccatcccagcgcgctgcatgccaggtgtttgttcaaatgcgtcacccatgtttgtgcccgcagatcctgatgtac

SEQ ID NO: 57 - DNA, 665 bp, Zea mays
gagattttctccctcacgacgccgaaggagcacgccggctctggaaggaatttcctgccatcccagaggtatgcacttcctccttttggcaaagctagagtttccttgctaattgtcttgccttgtacagttgtactgactagtatggattgctgattgagcctttgtcgtgaaatgtcaggctgccgatttcctccctcccgggaagcaagcaagggctttcttctagacgagctcttctggttccttaagtttgtgggccgtggctatttaatctccaactgcatccccagatattcaccaaattctgtgagactgggaactccgggattggtttggataaggtgttctgggaatggggaaccaatgcccaaacgggacccttgggagtgactactacaaccgcccggcgtccaggttcgctgatggttgtcttgaggacgatcgctactctgacttgaagaagtttgacaagccatggcctgaggtgaactcgtttaagcccactgctgttggtattttgaagaggggattggatccaacgtcaatcactgtccttgaaaggaagacggccgacataagggaacattatatcattggtcggaggcttggtcaaggccagtttggcacaacattcctctgcaccgagatcagtacagggtgtg

SEQ ID NO: 58 - DNA, 673 bp, Zea mays
ttctccctcacgacaccgaaggagcacgccggctctggaaggaatttcctgccatcccagaggtatgcacttcctccttttggcaaagctagagtttccttgctaattgtcttgccttgtacagttgtactgactagtatggattgctgattgagcctttgtcgtgaaatgtcaggctgccgatttcctccctcccgggaagcaagcaagggctttcttctagacgagctcttctggttccttaagtttgtgggccgtggctatttaatctccaactgcatccccagatattcaccaaattctgtgagactgggaactccgggattggtttggataaggtgttctgggaatggggaaccaatgcccaaacgggacccttgggagtgactactacaaccgcccggcgtccaggtttgccgatggttgtcttgaggacgatcgctactctgacttgaagaagtttgacaagccatggcctgaggtgaactcgtttaagcccactgctgttggtattttgaagaggggattggatccaacgtcaatcactgtccttgaaaggaagacggccgacataagggaacattatatcattggtcggaggcttggtcaaggccagtttggcacaacattcctctgcaccgagatcagtacagggtgtgagtatgcatgcaag

SEQ ID NO: 59 - DNA, 582 bp, Zea mays
agcagtgggcttaaacgagttcacctcaggccatggcttgtcaaacttcttcaagtcagagtagcgatcgtcctcaagacaaccatcagcgaacctggacgtcgggcggttgtagtagtcactcccaagggtcccgtttgggcattggttccccattcccagaacaccttatccaaaccaatcccggagttcccagtctcacagaatttggtgaatatctggggatgcagttggagattaaatagccacggcccacaaacttaaggaaccagaagagctcgtctagaagaaagcccttgcttgcttcccgggagggaggaaatcggcagcctgacatttcacgacaaaggctcaatcagcaatcaatactagtcagtacaactgtacaaggcaagtcaattagcaaggaaactctagctttgccaaaaggaggaagtgcatacctctgggatggcaggaaattccttccagagacggcgtgctccttcggtgtcgtgagggagaaaatctcaagcctgaaggcttccaccaccagacttgacacccaaactttgctcaccgctacacgaaatctactcctca

SEQ ID NO: 60 - DNA, 799 bp, Zea mays
  misc_feature (761)..(767): n is a, c, g, or t
  misc_feature (786)..(794): n is a, c, g, or t
gagttatcctgtatattttattatgtggagtccctccattttgggctggtaacttctttattgaaccagtattttgtcattaaatttactctacttcagaaaacctgacctggaaaaaactgcagagactgaacaaggggtggcgcaggctattcttcgtggaaatatcgattttaagcgggaaccctggcctaatgtttcggaaaatgcaaaagatttagttcgacacatgttggagcctgatccaaagctcaggctaactgcaaagcaggttcttggtatgtcatcactgtccagtttgatttggcattcctgatgtatttccatttctgaggtggtcaatatgcttagtaaacactattgttgtcctattggtctggagcatctgattgagatatttgcagtgctattcgactttatctctaaaagaaagagctatctcaattcattgagttctcaacctatgtaaaagataaaccatgcttagaatctgaaattagcttcaacctctacctgtttctgagacagtgcagtttgtgacataattggaggccaaatgcagcaacattgtgcacttcattatttataaaatagaggttccatcaagaaatgtttggataatactttaccacaattcttttcccccaaaagtcatacaactcccacctctgtattatcttttttcactttgtcctttttgattgaggaatgctgacatttccccgcaaaaaatacagaacatcattggcttcaaaatgcannnnnnnctcctaatgtccctcttgnnnnnnnnntaaag

SEQ ID NO: 61 - DNA, 827 bp, Zea mays
  misc_feature (765)..(770): n is a, c, g, or t
  misc_feature (786)..(789): n is a, c, g, or t
  misc_feature (798)..(812): n is a, c, g, or t
  misc_feature (816)..(824): n is a, c, g, or t
agttcccctctgaagcaatcgattttgggctgtcagtgttcttcaggcctggtatgtttttacggacagataatgaccaagcaattaagttttgaacgcatgacatttgttgggaaaaaaattcaatgcatagcggatgcaaatacatctctttgttttcctgttgttgtgcacttgtgcctatggaaattggaaaataataaagtggagtgtctttatgtaattcccatggtaacatgcttcatttcccagcaaaataaaatagagctaacttcgtcgatgcagtttattggacatatgcaatacagaaaatctgaatagttcttggctttcatatgtaggtgagcgatttactgaaatcgtaggcagtccatactacatggctccagaggttctaaagcgaaactatggccctgaagttgatgtttggagtgctggagtgatactttacatacttctctgtggtgtaccaccattttgggcaggtactttaaaccttcagtctggaatgcatgcatgctaataataatttaagaaacgatcgtaatcccatattcgtgatgctatgcagaaactgaacagggagtagcacaggcaattatacgatctgtggtagatttcaaaagagaaccatggcccagagtatctgagcctgctaaagatcttgtcaggcggatgctggacccaaatccattgacacggtttactgcagcacaagtacttggtaagccaccactatcacctattcctactgcacaacgggcnnnnnntgctaccactctatgnnnnttatttgtnnnnnnnnnnnnnnncttnnnnnnnnntgt

SEQ ID NO: 62 - DNA, 599 bp, Zea mays
  misc_feature (480)..(485): n is a, c, g, or t
  misc_feature (528)..(530): n is a, c, g, or t
  misc_feature (539)..(542): n is a, c, g, or t
  misc_feature (568)..(573): n is a, c, g, or t
  misc_feature (577)..(583): n is a, c, g, or t
tgtcatacttactcttgaattttctcacatatttgaaaacaggttatagctgagcatctttgggtagaagaggctgctgacataaaggatatgtttgagaagatggatcttaacaaggatcaaatgcttagtttcgaggagctgaagcttggtctgcataagtttggtcagcaaatgcctgatgcagatgttcaaacactaatggaagcggtgagtttacattcttttcccccacaacagaaacttaatttgcacccctttaatattgtactggagtttttttgtttatgtcaaatacctttggatagtgttttatcaacccggtttaatgtttttccttttcattttaatcgagcattctgtcacgaaggtgatgtgttgggcgctttatagttactgttgtgcatgttgtaccaggcggatgctgatggaaatgggtccttgaattatggagaatttgttacattatttgttcatctnnnnnngatcggaaatgatgagcatctgcataaggcatttgcatacttnnnccggaaccnnnncgattatattgaaattgatgaactcnnnnnntcannnnnnnatgaccttggacaaaa

SEQ ID NO: 63 - DNA, 812 bp, Zea mays
  misc_feature (740)..(742): n is a, c, g, or t
  misc_feature (765)..(770): n is a, c, g, or t
  misc_feature (789)..(797): n is a, c, g, or t
  misc_feature (799)..(800): n is a, c, g, or t
  misc_feature (804)..(809): n is a, c, g, or t
aggtttgattagccttttgtaattttattccacctgactagtaactactattgcacaaaaaaaatttccattttatatggattttttttcctaaatgactttttcacaagcttcacagtttcctatcagttttttgtttacgatctgcaatactccctcaaatgcagcaattatcatgcctatatatggatcttttgagtatttgctatagggttgaggctttaactaaactagttacttgctgtaactcttaaatggttcctgtttttttcaccagctctgatgtgctatggttaatggaacagcaaatttaatttaataaaaaaacctcttccattgtaatatgaacagaaaggcactagtttgtctctgacactgtagtgtagaactgtagacagaatatttcttaagtgcttatactaggataaattgttgacatacaatcttcgctgcagtgtcagatttttaactggccactccagaaatggtgggacagatccactatatgtagctggaaatgcggctgatccagacactactttggttgtgtatatgggtttgtcaacacttccatcacttgctccaaagttaatgaagcacggcctgccgccagatacccctgctgttgcagtagagcgcgggactacacctcaacaacgaacggtagcgacccttagaccctcacgaattaaatcgtgtttatccttgctctgccatcctgaatgtttattgcactgtannncttctcctcgttgaaggatcttnnnnnngaagtcaagtcagccgatnnnnnnnnncnnactnnnnnnatt

SEQ ID NO: 64 - DNA, 499 bp, Zea mays
  misc_feature (489)..(491): n is a, c, g, or t
ccagccttctgtttcggcgaccatggaggatgagaggaacacccagcagcaccagggcggtgaggcccagcaggacgccgccgatcaggtggacgtgaaggatagggggctcctggacagccttctcggcaggaagaagcacgacgacgaccaggagaagaagaagcagacggatgagctggcgaccggcatggagaaggtcacggtgtccgagcccgagaagcacgggcacaaggaggaggagcacgaggtcgtcggcgagaagaaggagggccttctcgccaagctgcaccgcaccagttccagctccagctcggtacgttcatatataaacatggtctgctgatattcggatcagtaaaacggcttgttatacgcagtacgtctatattatttgacacgatcgagagtcacgattatctgaccacgatcgtgcgcgcatgcagtcgagcgacgaggaagaggaggcgatcgatgagaacggcgagnnnatcaagag

SEQ ID NO: 65 - DNA, 408 bp, Zea mays
cccttctggaacattgagtatattgttccagatcaagatgaaccttgcccagagcataagagacagattctggcatactactcccttgctggcaggaggacagattgtcctccatcagtaactctgctttacccggcattttgagtgtagatacttgctttttgccagactgaatctcatggtactaagttccattggtcccactatctgtgaagtaaatggtccctgttcttccaattgatgaggacatgcagacgttccagtgcaaagaaccccaaaggtaagctttaagcaggacggccagctctgaactgaggctagctgagaacaatcatgaatacctgaaggcagcacttatgtcagcttggcctagctgtccagtatgggcatgtaagctttaccatcttt

SEQ ID NO: 66 - DNA, 546 bp, Zea mays
gctgctgttgtcgacatgtcgcggaactgcccggagctgaaggtattccggttatgtataatgggacggcaccagccggaccatgcgactggggagcctatggatgaaggattcggtgccatcgttcagaactgcagcaagcttaccaggctatccacgtccgggcaacttactgaccgggcatttgagtacattggcaggcatggcaagtccctgcggacgctctccgtagcattcgctggaaacagtgatgtggcgctgcaatacatcctccagggctgtccaaagctagagaagcttgagataagggactgccctttcggtgacgctggcctcttcgccgggatgcaccatttctacaacatgcggttcgtctggatgtcaggctgcaacctgaccctgcaagggtgcaaggaggtggctcaggtgctgccacggatggtggtggagttgataaatggccagtctgatgagaacgaaaggaatgaaagcgtggacatcttatacatgtatcggtcactcgatggtccaagggaggatgttcca

SEQ ID NO: 67 - DNA, 601 bp, Zea mays
  misc_feature (368)..(369): n is a, c, g, or t
gggtgactgtgatctttcagatctgattgggtttttccaaacctccaaagcattgcaagaattcgccggtggtgccttttttgaagttggagagtacaccaagtacgaaaaggtcattttcccacctaggctatgcttcttagggggtcttaccttcatgggtaaaaacgagatgccagttatctttccgtattccacaatgcttaagaaactggacttgcagttcactttcctcaccactgaagaccactgtcagcttattgctaaatgccccaacctaagtgttctcgaggtaatgtttttggacatctttaatattactcgtgtgtctaaaataagtgactatctaatttcaactgacaaggtanntgctctcgacaggtgaggaatgtgattggggatagaggactagaagttgttgctgctacatgcaagaagctacgaaggctcagaattgagcgtggcgacgatgatcctggccaagaagagcagggaggagtctctcagataggtttgacagccgtagccgttggctgccgcgaactagagtacatagctgcctatgtatctgatatcacaaatggggcgctggaatccattg

SEQ ID NO: 68 - DNA, 631 bp, Zea mays
attgatttctttgaagatgggtgactgtgatctttcagatctgattgggtttttccaaacctccaaagcattgcaagaattcgccggaggtgccttttttgaagttggagagtacaccaagtacgaaaaggtcattttcccacctaggctatgcttcttagggggtcttaccttcatgggtaaaaacgagatgccagttatctttccgtattccacaatgcttaagaaactggacttgcagttcactttcctcaccactgaagaccactgtcagcttattgctaaatgccccaacctaagtgttctcgaggtaatgtttttggacatctttaatattactcgtgtgtctaaaataagtgactatctaatttcaactgacaaggtagatgctctcgacaggtgaggaatgtgattggggatagaggactagaagttgttgctgctacatgcaagaagctacgaaggctcagaattgagcgtggcgacgatgatcctggccaagaagagcagggaggagtctctcagataggtttgacagccgtagccgttggctgccgcgaactagagtacatagctgcctatgtatctgatatcacaaatggggcgctggaatccattggcactttctgca

SEQ ID NO: 69 - DNA, 444 bp, Zea mays
tgacgctggcctgtgggcccttgctcgttatgctttgaaccttagacaggtaaccttgcgatagtgtttagcttttatccttgcaaattcataagcagctggaaccatataaacatgtgcctgtttttgcagcttacgatatcgtactgccaagtcacggggttgggcctgtgccacctgctgagctccctgcgatgcctccaggacattaagatggtgcacctctcatgggtctcaatagaagggtttgagatggctctgcgagcagcctgcgggaggctgaagaagctgaagatgctctgcgggctgaagaccgtgctctcccctgagctcctccagatgctgcaggcttgtggctgccgaataagatgggtcaacaagcctcttgtctacaaggactagacagactcgtgttcctcattgtgtgtgcagtgtcagcatcag

SEQ ID NO: 70 - DNA, 384 bp, Zea mays
cgtctcttcccggcccccgcgctcgtcggcgaggaggagcgagccgagaagaaggccaccacgtacccgaggttcgtgttcgaggactacatgaacctgtacgcgcgccacaagttcgaggccaaggagccccggttcgaggccatgaagtcgtcggccatcgccaccgcgtgagcacataatactgccgtgttttctcccttcgtgtggggtgcatatgcttgagcttgaagagccatgtgcctgtatgtagtggcacgtacggtggttatgcgtgtatcgtggaatggcgcggcgtgatgtattttggttgtctcagatctaagtgtgtgcgtatatattgtgtactgtaaagtttgtagcgtctggttaatgtacgagcag

SEQ ID NO: 71 - DNA, 474 bp, Zea mays
ctatgaaattcacatctcatgtacgtacgatacaaatatatatcttgtccatgccagaattattcttcatatggttgtcgatctcttggactaattaatatgctttctataccaccacttattaggttatacatgagtcgctaaggctcgcaaacatcgcactggccatgttcaggaaagcaaatcaggatgtgcacataaatggtctgcataatctcaacccctcagtgttcatgtccaataaaaatcttgcgtctatacatacatatcctatactacatattgaagagagtacataatatatatataagccaacatttgtaatccatgcattaatacatatgtggtgtgtgcactcagggtacacaattccaaaaggatcaaagatcatgatatgtccactagcatcgcacttgaatacggaggtctacgaggacccctcagtgttcaatccatggagatggaaggtacata

SEQ ID NO: 72 - DNA, 733 bp, Zea mays
gccgttagttgctgtgggacgacgacgacgtgactgaccggacgttgcgtattatgcaggtggcgccgcgtccgagcacgttcctgccgtttgggcacggcgtgcacgcgtgccccgggaacgagctggccaagctcgagatgctcgtcctcatccaccacctggtcaccggctacaggtgcgtccatctcctctcagatcctctccatatattcccgcttgtcctatagcttgtggaccaggatgacacatggctggctgctgccgctctccatggggctccggctctgatctctctccgtgcatgctccaaatctcctcctgtctgtatgtatgcctgtatcgatcatgtatatactcctgtaccataatctgtggggtcctcgaaatgtacgtcttcactagccccgctgtgctctccctcctatataaactgtggtgatcgactgctataacgacagtttactgatcttacactgagacactgattggcgtctctgcatgctttatttttaaatttgcaggtggcaaatcgttggatccagtgacgaggtcgagtacagcccgttccctgtgcccaagcacggcttgcctgtcagattatggagacaaaacaatccggtcgacataaaggggcgtgagaccgacgacgatcatatggaggaggatattttagtttgactcttgagttaggcatgaatttaaccccaagctagctagagaagtttttttt

SEQ ID NO: 73 - DNA, 1144 bp, Zea mays
  misc_feature (1133)..(1137): n is a, c, g, or t
agcttccggggactcaactctatagatccctcaaggtaaacaccgggaaccctattttttttacctctctctctctctctatatatatacttccttgcaatgagttgaactgcggtaactatatatagggctgtttggattaatttcctcctctaattaagcttcatatatgtgtgctatatatggtatcaacaaacactacccagagcaggctaagaagaggatgacaaagttgataaaaacgatcatccaagagaagaggaagaagatgatgtcggaaggaggcgacgatctgcgtggtgggactcatccacgtgatatgatcgacgtcctgctaggcaacggcaacgacgagctcaccgacgagctgatatctgacaacatgatcgacttcatgatccctgcagaggactccgtgccggtgctcatcacgctggccgtcaagtacctcagcgaatgcccactggctctgcagcaactcgaggtacttttttcagtttattaaaaataaggacaaaagattgtctatatatatagtttctgtacttgaaccttcaactgttagttgttttattggctcaatccaaatgaagccaattaatatttggtgtttcaatataattggagagacgatgcaattgaagggattagatttccggactcacgagagttgctatgccaaccatacacatagagagatcaggaaagatagagaacaacggcaacctgctatatatgcgatagataaactatactgaattatgtgctttaaggccatatatctaaattggatctcttccaaattatgtctaactgaccaagacattcttgtacttcagcatgttctgcacatgtaaccatttatatatgcaggtgaccaataatagtttgtattttctccatgttttggcttctctggatatattgtttttttttactgtgcatttagacagagacttattgtgtatatctaagtgtgtgatataagaccttatttttaaatatcttataagacttactgtgcatctagacagacttactgtgtatatctgaattatgtgttttaaggacatatctaaaaaagtttattatttgtgttgatctttataaaaatctgttacaggaggagaacnnnnnctcaaga

SEQ ID NO: 74 - DNA, 631 bp, Zea mays
agcaggtgcactcgttagaaaacacaatttgctatgttgtggcatgctcatgctcttcttttctatgagaagatagatatttatatatgatcgacaagagaatctaggaaggagagagctcatgtggctcccgtgcgtcccgtttcgcgtgtgcagggcaagagcaagctgcagagcgcggaaggggccagtctgttcacgccgttcggcggcgggccgcggctgtgcccgggctacgagctcgcccgggtggtggtttccgtcttcctccaccacctcgtcacgcgctttaggtgagccgtccttctctttattctctcccgccggctgtctcttgaggcggctgagtttcagctcggctctgtgtgtgtgtgtgcacgcgcgctcggaagtcggaacgatgctatgccgctcgctctgattggattggattcttgaccaacaaacagctgggaggaagccgaggaggacaggattgtcttcttccccaccacccggaccctcaagggataccccatcatcctacggcggcgaccggattgcgatgatctctgacctcatggctatgttctccccccttatcttcttcggatcaaggccgaaggctaagcattagatagagtaaggtgga

SEQ ID NO: 75 - DNA, 824 bp, Zea mays
  misc_feature (727)..(735): n is a, c, g, or t
  misc_feature (740)..(752): n is a, c, g, or t
  misc_feature (778)..(803): n is a, c, g, or t
  misc_feature (808)..(817): n is a, c, g, or t
ccaccgtgttcctgcaggagaacccggacatgttcgcgagagcaaaggcaggttctttctttctttctttgttgtttaattttatcctgaaagctagctgaacaattaagtgcgtgctcttcattcccatgccaccaggcggagcaggaggcgatcatgaggagtatcccgtcgtcgcagcaggggctgacgctcagggacttcaggaagatggagtacctgtcgcaggtctgctccgatccaatccaattctctgacgatgctagcttgcattgcatcagtgcaaaaacatgctccatggcctgactgactgactgactgactgatcccgtgaacgaaggtgatcgacgagacgctgcggctcgtcaacatctccttcgtctccttccgtcaggccaccagagacgtcttcgtgaacggtacgctgcatgctgtgcggcttcaattcatcattcattcaggaacctcacctcgctctggaacaggatacctcatccccaagggctggaaggttcagctctggtaccggagcgtgcacatggacccacaggtgtaccctgaccccaccaagttcgacccgtcgaggtgggagggccactcgccgagagccggcacgttcctggcgttcgggctgggcgccaggctctgccccggcaacgacctcgccaagctggagatttccgtcttcctccaccacttcctcctcggctacaagtaactaactaannnnnnnnntatcnnnnnnnnnnnnncgacgattattcctttcttttttttnnnnnnnnnnnnnnnnnnnnnnnnnnctgannnnnnnnnntgcgtgc

SEQ ID NO: 76 - DNA, 905 bp, Zea mays
  misc_feature (768)..(777): n is a, c, g, or t
  misc_feature (779)..(798): n is a, c, g, or t
  misc_feature (804)..(809): n is a, c, g, or t
  misc_feature (815)..(818): n is a, c, g, or t
  misc_feature (822)..(826): n is a, c, g, or t
  misc_feature (839)..(850): n is a, c, g, or t
  misc_feature (856)..(870): n is a, c, g, or t
  misc_feature (877)..(884): n is a, c, g, or t
cgtcatcgtaagttcttctctccctgccggcccggctcatgcctggcaccagatcgactgcgtgcgtgcgcccgccgcgcggagactgacgggacgagctggtgttgtaggaggagcagcaggagatcgcgcggtccaagggctcctccgacgagcccctgacgtgggcggacaccaggcggatgcgcacgacgagccgtgtgatccaggagacgatgcgggcggcgtccatcctctccttcaccttccgggaggccgtggaggacgtggagtaccaaggtgaggcgtcaatcatactcatgcggtcatgcccctcgctgtcaaaaaaactcgcgccaccgtttcacgttggattggaggcgggggcagtctgtccctgtcgtgcgctgctgcggatgaactggacggacgggacgcgttcctaaccgaaatgaatagactgactgactcatccgctgtgtgctggcttgcagggtacctgatccccaagggctggaaggtgatgcccctgttccggaacatccaccacagccccgaccacttcccctgcccggagaagttcgacccctcccgattcgaggtcagtctctctctgcttctgcttctgcttcgccatttgtgccatgtcagacaggtcctcatggctgggcctctgtttcaggttgctcccaagcccaacacgttcctgccgttcggcaacgggacccactcgtgcccgggcaacgagctcgccaagctggagatgctcgtgctcttccaccacctcgnnnnnnnnnncnnnnnnnnnnnnnnnnnnnncgagannnnnntgcagnnnngccnnnnngcgctgccgctcnnnnnnnnnnnnatgacnnnnnnnnnnnnnnnctgatgnnnnnnnnacagatgtgtggatcggacgg

SEQ ID NO: 77 - DNA, 858 bp, Zea mays
catctgtcggcggctcatcagtccttgcggacgaaggtcatgggcaggccgttgagcggcagcgcgaaggggccgaactgcacgccgctctcggacttggaggtggaccacctgtacttggtggcgaggtggtggaagagcacgagcatctccagcttggcgagctcgttgcccgggcacgagtgggtcccgttgccgaacggcaggaacgtgttgggcttgggagcaacctgaaacagaggcccagccatgaggacctgtctgacatggcacaaatggcgaagcagaagcagaagcagagagagactgacctcgaatcgggaggggtcgaacttctccgggcaggggaagtggtcggggctgtggtggatgttccggaacaggggcatcaccttccagcccttggggatcaggtaccctgcagccagcacacagcggatgagtcagtctgtctattcatttcggttaggaacgcgtcccgtccgtccagttcatccgcagcagcgcacgacagggacagactgcccccgcctccaatccaacgtgaaacggtggcgggagttttttttgacagcgaggggcatgattgacgcctcaccttggtactccacgtcctccacggcctcccggaaggtgaaggacaggatggacgccacccgcatcgtctcctggatcacacggctcgtcacgcgcatccgcctggtgtccgcccacgtcaggggctcgccggaggagcccttggaccgcgcgatctcctgctgctcctcctacaacaccagctcgtcccgtcagtctccgcgcggcggacgcacgcagtcgatctggtgccaggcatgagccggcagggagaagaactta

SEQ ID NO: 78 - DNA, 477 bp, Zea mays
  misc_feature (472)..(474): n is a, c, g, or t
gctttggtttggttccgtcggcctgccgtggttttggtgtggctccgtccgatccacacatctgtcggcggctcatcagtccttgcggacgaaggtcatgggcaggccgttgagcggcagcgcgaaggggccgaactgcacgccgctctcggacttggaggtggaccacctgtacttggtggcgaggtggtggaagagcacgagcatctccagcttggcgagctcgttgcccgggcacgagtgggtcccgttgccgaacggcaggaacgtgttgggcttgggagcaacctgaaacagaggcccagccatgaggacctgtctgacatggcacaaatggcgaagcagaagcagaagcagagagagactgacctcgaatcgggaggggtcgaacttctccgggcaggggaagtggtcggggctgtggtggatgttccggaacaggggcatcaccttccagcccttggggatcagnnnccc

SEQ ID NO: 79 - DNA, 471 bp, Zea mays
tttctaaaagtgagcaggcattgaatgataagaagaaatcaatggaaaacttgcagaatgatcttgatgccaaatctaaggctctgaagagttgggatgaatcattgaaaaatgacgagaaaaggttactgaaagaaaagcagcaaatggatcatgaaagagaacaattggagacatacaaattggagcttgaaaagaccaaatcagcattagaagctgagaaggaaaaaatatcagaagagcagaataatctgaaactcacagcgcaagagaggcaggagcatagcttgttgatagcaaaacttaagaaggagattgaggaatacagaatgcgaagcaactccctatctgaggaaatggaggatttaaggaagcaacggcagaaatttgaagaagagtgggaacaactagacgaaaagagagccctccttgtagaggaggacaaaaggttgaacattgagaggatgaatt

SEQ ID NO: 80 - DNA, 668 bp, Zea mays
aagtttcgtggagtccggcagcgccactggggctcctgggtctctgagatcaggcatcccctcctgtaaggcctccgtccctctaatttttagggaacataaactactgatgcaaccataattctgaattgcaatgcatgtatctttttgtgatacgtacagtaagaggagggtctggctgggtacctttgagacggctgaggaggcagcgagagcatatgatgaggctgctgtgctgatgagcggacgcaacgccaagaccaacttcccaatccaaagaagcagcacaggggagcctaccccagctgcgggaagggacgcccgcagcaacttcagcagcggctcctctaccaccaacctgtcccagattctcagtgcgaagctccgcaaatgctgcaaggcgccatcaccgtccctgacctgtctccgccttgaccctgagaagtcccacattggtgtttggcagaagcgtgcaggagcccgtgctgactccaactgggtcatgacagtggagctcaacaaagatgcagcatccactgatgctgcatcacagtccacatcagcaacaactgctccaccagccacgccgatggatgaggaggagaggatcgcactgcaaatgatcgaagagttgctgagcagcagcagcccagcttcaccctcaaacg

SEQ ID NO: 81 - DNA, 1049 bp, Zea mays
  misc_feature (1017)..(1020): n is a, c, g, or t
gatccgcgatgtagtcttatggagtaccaaaattcccgttgaaatgttttaccctaaccttcgacatattcatatatccgattgagaaagatttatcttttatgtaataatagtgtgttcctttgtaggcggaagatcttgcggcagcacttaaagcaagcaggatgaaccctgtaaaggccgaggccaatgatacggtcagtagatatcttcgagatatatgtttccttcgtaaattaactgtgaaggttataccgttataaaatatgggttttctttagcttagagatctgataatctgatagctggttgtgtaagtacacgagcaatcccatcatgctggtgttactggtaagttacttgcatcggaaatatttggcactagtatttagcatgtcaaccaggcaaacttctagtaaatatcatgagaatatggtagtgatgaaatgctgaatcatgaagtgacagctttcagatttatcaccttgacatcttatcaacatgttctattggaaattgtgatcgtaatcacagtattggatgtatgctttgcactagaaaataaaattaattatgcaggagtggtgatttagtgatcaaaggggcaattgagttttagggtacgcaagaatttgctatatatctagaattctagatgcataacagaatggatgtagcgaaaaaagtcaaagcggcttagaatttggaacgagagggagtactattttttttcttgagatgttgatgcattgatgctgtgttggtgtaaatgccaacacttggtgctcttgcaatctgtaacaggctgctgggagttctcagggtattagtggcggggcaggagttcagggccagtatgcacctgccgctgttcttgggggagtggctcagcctcgccccacaggtatggcgccccaactaatcggcagtgggtcggatcctctgcaaggagacgacgaggagaccaggagactacgcgcagagcgagcagcacgggctggcggatggactgctgannnnagcaagagaagagcgctggaggaggcgtt

SEQ ID NO: 82 - DNA, 368 bp, Zea mays
ttgacgacggacctctgggcgaggtgttcaagggcaagagttgccagtcagcatccgcagacatcttaactgaccattggacttcgactcgtgacttgcgtcctccaaccggagtcctacaaatgtctagcagcaacacagtgccagcagagaatcacacgagtaacagtagctatctcatggcgaggatggcgaattctcagaccgtcccaacactccactgagtgttcatcaggctggtctttgttgggaccacaaaataactgaagccatgttgatgtcctgagtttgctgatacagtgatactaggttttcagtcgagtcttgtaactcctgttttagagttgttatatgttcacgtcatgtcg

SEQ ID NO: 83 - DNA, 368 bp, Zea mays
  misc_feature (59)..(59): n is a, c, g, or t
  misc_feature (102)..(102): n is a, c, g, or t
  misc_feature (114)..(114): n is a, c, g, or t
  misc_feature (345)..(345): n is a, c, g, or t
ttgacgacggacctctgggcgaggtgttcaagggcaagagttgccagtcagcatccgcngacatcttaactgaccattggacttcgactcgtgacttgcgtnctccaaccggantcctacaaatgtctagcagcaacacagtgccagcagagaatcacacgagtaacagtagctatctcatggcgaggatggcgaattctcagaccgtcccaacactccactgagtgttcatcaggctggtctttgttgggaccacaaaataactgaagccatgttgatgtcctgagtttgctgatacagtgatactaggttttcagtcgagtcttgtaactcctgttttagagntgttatatgttcacgtcatgtcg

SEQ ID NO: 84 - DNA, 431 bp, Zea mays
ggatccattgggctcaggcttctattccgttctctgaggaagagctcgagtacatcagaaatcttgatccaaggaaagatgtgcagatgctgcgccgggaacttccgatgatacgtgaggcctgcctacatgtactggccctgtgcacaatcttccttaaggaggctgcagctttcggactctgcttggccgagataggcgagatgatgaccagggagttcagagggatggaggaggaaccaagccagctggagcttatgtgtatggaggccaggaagagagtagcagagtgggagcccttctctgccacagctgaacatggagaagatacagatttccagttctcggtggatatgctaggagaatacagtgatgtagtgcgatcaccaaggttcaatggctcaggttccaaagtgtccagtttcagaagc

SEQ ID NO: 85 - DNA, 840 bp, Zea mays
  misc_feature (22)..(22): n is a, c, g, or t
cttggagacatgctgttctgtnatgcagttcgtaatcctggccttattattgacattgtacaaggtatgattcactgttctgtccttgtctttgctttcttatgcaacattgagcttgaaatctttacagatatacggctgatgaatggggaagccatccatgcaacaccaaggaagacagggattatagttcttggtggaggccttccaaagcatcatatatgcaatgccaatatgttccgcaatggtgcagattatgctgtgtatattaacacggctcaagagtttgatggtagcgattctggagcacaccccgatgaagcagtctcatggggcaagattaagggttcagcaaaacctgtaaaggtatatgttccttcacgaagcttcagatgctgtttcttatgtttcacataactctagttaaacttactctggtaaacgtcacgctgcacacaaactcttgctgttgatttgtcttgcaacgaggtatcaaaacaatcgaaaagtatatttttattagggtcgaaaagtatattttattagggtcgaaaagtatatataaagctgtatattaatttctaaaacaacttaacttctgtcactgtgggcaacttccgcactgacagaatgttagaacgctgcattttaggcttcaaacatgcaccatcttacattctctaataactgtaatgaattattatctgattatttaatcgtgctttatctgctaatagaagatatcaagaagaaaccagcataatgggagagcacgtattagtctagcaatctaatccgttctttgaactggaaatgcaggtgcattgcgatgcaagtatc

SEQ ID NO: 86 - DNA, 549 bp, Zea mays
  misc_feature (500)..(503): n is a, c, g, or t
  misc_feature (514)..(519): n is a, c, g, or t
  misc_feature (525)..(527): n is a, c, g, or t
  misc_feature (534)..(542): n is a, c, g, or t
acatattcaacgggaaaaagctcgaagatattgttccttcgtcacacaactgtgatgtaagttaatttctgtgttaagctaagttcttttgatggttcacttcatacgccactcacaagtttgacatttttttaagattccgcatgtgaaccgtactgagtaccagctgattgatatatcagaggatggatttgtatgttcctctaatcattaaaactacattcttctttgaaataaatgttaacttcagtcttatattttaatttaatttgtttcaggtgagccttcttacttcagatggcaacactaaggatgatcttagactcccaactgatgagactcttgtggcccaggtctgtttgaaaacatttttcatcttaagtcttgttggttttcttattgacttccaaatattacagatggtggttatctttgttagcttattagtcatatgttctttcttggtagcttctcttccttgatgtttgttaattgatctnnnncttataaggannnnnnaaagtnnngccttgnnnnnnnnnacattcc

SEQ ID NO: 87 - DNA, 769 bp, Zea mays
  misc_feature (710)..(720): n is a, c, g, or t
  misc_feature (724)..(727): n is a, c, g, or t
  misc_feature (734)..(736): n is a, c, g, or t
  misc_feature (764)..(765): n is a, c, g, or t
attgttaactttgcattcctgctgcaccaccttcctgatgaaagtgtctcaattatgaaccaaagggatcggcttctccgtatggtgaagggtctccgaccaaaactagtgacgttggtggagcaggacgcaaatactaacaccaccccattcccttccaggttggttctctcgtgaacatttttactgcatctggttggtacacagagttgtctaaaccgatgatatacatgctgtttaactacccatttcagcaaacatgtgtgcttcacgatgctgaccttgtgaaagaaatgtggtttttttgaactttgtgccagccttacactatcatatagttatatctctgtggttcctcatgttgccctttggtatgcaggttccgggaggtctatgactactattcggcactttttgattcactggatgccacccttccaagggaaagcccagatagaatgaacgtggagcgccagtgcctcgcacgggaaatcgtcaacatcttagcttgtgaaggtcctgaccgtgtggaaaggtaaattcttaacagcgctcttccatgagtcctggtctcatgcacgttgcaaactccaattaatgtttatacaccagctcaaaaaaaatgctattaccctgcaggtatgaagtggctgggaaatggagagctaggatggcaatggcgggctttgtgccgtccccatttaacagcnnnnnnnnnnntggnnnnagatctnnnctgaaatcgtactgcgataagtacaggnncgag

SEQ ID NO: 88 - DNA, 717 bp, Zea mays
aatggttggcaaaagtaacattcctttgttttatctgcaatattaacatctattttaaatttgtgtgctgtaggcattttctattacattctttggtgagtggggtgacaagagccaggtaagttgtataaaagtaccgtttatcttctagctctggaaatcgtctattgagtcataaatagataatgtttttgctatattgatgaacctcttgtcagattgctacaattggcttggctgctgatgaaaacccgttcggtgttgtcctgggtggaatcatgtaagagctgcttcttttactgacctggctgctctatttacatggcttattgtgtgttccctggtaaaaacttctttctgtgcttagagcgcaagcactctgcactactgctgccgttcttggtggaaagagcctagcgtcccagatatctgagaagatggttggaactagactcattttctttgcactcctgtaaaatgtccagcattagttcgatgcttgtctggttgtaggttgaactgtcaagcggagtgctcttcctgctcttcggtatcatgtccttactctctggaccagaaggagaattgtaatccctgcttgagcctttttcagctagctgattaacatggctttctcttcttagacctatcttatttcagtacatgaatgatggcaacgaaagccatccatccatggcgaacaggatgttgatttaa

SEQ ID NO: 89 - DNA, 693 bp, Zea mays
  misc_feature (530)..(541): n is a, c, g, or t
  misc_feature (561)..(568): n is a, c, g, or t
  misc_feature (571)..(580): n is a, c, g, or t
  misc_feature (602)..(614): n is a, c, g, or t
  misc_feature (621)..(623): n is a, c, g, or t
  misc_feature (633)..(688): n is a, c, g, or t
ttcactttggagctttttgattcaatactgtcagaggtaagtaattgtttgttgctgtcctggatttcaacaaatgagtaatgaaattagatgcttatctttagagttgcttgctctgcataatttcccagccagcattggtcaaagatagcactaatttcttatctgaatggttaatggtctaattataattttgcttggtcttatagggaagtaaaacgaagacaaagatgggcctgcgaaacataatctgctcaatccagaaagaaaagaaaggttggtggaagcgcttgctaaagtcagaggaaaagcatccatacatcaaagttgactggaacaaatggtgcgatgaggatgaagagtctggtatgtgctaatgatatacatccccagatatatgcagttgtttttggtctagatgcattctgaatttagtatgaataaagggttgtaaaaaatcaagccaggttggaattcagtagtttaaattgatgaaatgtgtattttttttatggaacttggatttgttnnnnnnnnnnnnatggagtccattccaaactnnnnnnnnttnnnnnnnnnnctactacaatttactttgggtnnnnnnnnnnnnnaatcttnnngactatttcnnnnnnnnnnnnnnnnnnnnnnnnnnnnnnnnnnnnnnnnnnnnnnnnnnnnnnnnattaa

SEQ ID NO: 90 - DNA, 750 bp, Zea mays
  misc_feature (644)..(652): n is a, c, g, or t
  misc_feature (676)..(679): n is a, c, g, or t
  misc_feature (700)..(746): n is a, c, g, or t
tttaatactacatgctttctcttatggatgtagcatttcagtttctaattgtatcggtcttgctgtttggttagtttaatatttaatacatgtttttctcttatggatgtaccatttcggtttctaattgtatctgtactcctgtttgcaggagagcaaagcagctattgccccaaggaccatatgctacctgataaagaaagctaagagcgggtggtggccaaggctgctgaagcaggagggcaaaccacctgtgttcttgaaggttgattgggacaaatggcaggacgaggatgatgaagacgctggatgttagtgtttcatttttggttgattatgttttcctttccttactactgcaatactatttagtttagcttgaagtaacatatattattcgtattgcagttaatgactttggtggtatggacttctcggtaagtgtctagtggaagcctcctttgacgattaaggtgggagcaaagtttcatggtactttcgtcattgtagaaactggacataggaggtgctgatgacgacgatattggggatgatgaagatgatgtggttgaaagtgctaacaaaggtacatcgttctcgttgtcatcatgattatttatttgctcaagggcagttgttgctgnnnnnnnnngtagctttacactatcatgggagnnnngacattctactacttatttgnnnnnnnnnnnnnnnnnnnnnnnnnnnnnnnnnnnnnnnnnnnnnnnttct

SEQ ID NO: 91 - DNA, 671 bp, Zea mays
  misc_feature (606)..(609): n is a, c, g, or t
  misc_feature (631)..(644): n is a, c, g, or t
  misc_feature (647)..(660): n is a, c, g, or t
tatttaatactacatgctttctcttatggaatgtagcatttcagtttctaattgtatcggtcttgctgtttggttagtttaatatttaatacatgtttttctcttatggatgtagcatttcagtttctaattgtatctgtactcctgtttgcaggagagcaaagcagctgttgccccaaggaccatatgctacctgataaagaaagctaagagcgggtggtggccaaggctgctgaagcaggagggcaagccacctgtgttcttgaaggttgactgggacaaatggcaggacgaggatgatgaagatgctggatgttagtgtttcatttttggttgattatgttttcctttccttactactgcaatactatttagtttagcttgaagtaacatatattattcgtattgcagttaatgactttggtggtatggacttctcggtaagtgtctagtggaagcctcctttgacgattaaggtgggagcaaagtttcatggtactttcgtcattgtagaaactggacataggaggtgctgatgacgacgatattggggatgatgaagatgatgtggttgaaagtgctaacaaaggtacatcgttctcgttnnnntcatgattatttatttgctcannnnnnnnnnnnnntgnnnnnnnnnnnnnntttacactatc

SEQ ID NO: 92 - DNA, 321 bp, Zea mays
gctcgcgttcttcgacgtcgctggcagcgtcctgcactgctggaccatgcatgcccaaaaattaaagacgacgacgacgacgaccgctgctgctgctgcagctaggcactaaattaagctttgctggatcggagttattaatgttcgttgctgcctcgcggcggtacgatgagttgatgatgcaattaattatttggttttgtcgtcttttcgtgcgtgagagggaagcaataataattaattgctgctgcttctgttgttgtgtgcacatgcatgtgagggtgtcaagtatgttcagcctcttgcaagataaaatctctc

SEQ ID NO: 93 - DNA, 391 bp, Zea mays
  misc_feature (274)..(274): n is a, c, g, or t
  misc_feature (277)..(279): n is a, c, g, or t
  misc_feature (298)..(300): n is a, c, g, or t
  misc_feature (329)..(332): n is a, c, g, or t
  misc_feature (351)..(351): n is a, c, g, or t
gcttgccaattcaactgtagagatcatgacacagttcgatgaatttgatgtgcctgcagctctttatacagcttaaaatgcaattgttgcaatagcagaaggtgctcgcgtgagcacctagaaccaggcacatttatcctgggatattcaatcatttgtacatgtacacttgaaagagaactgacatcttttcaacctgaaaatttataagctttatgtaaccgtgaaggtcggatattgcacatgtaaaattgggcttttcccctagacccanggnnnagaaaaattaagaaactcnnngtgattcatatggacccagctgcactaannnnctgctgtgccactcagctnattaccttaaaattattacctgtgttgttgtcctttgctc

SEQ ID NO: 94 - DNA, 519 bp, Zea mays
cgcctcaaagccaaaggtaaactaactaagcatatattatattcgtctactagctgcagtacgtctgtctgaatcttctgcatgcttgcaatgcaggtatcgagccggacttcgggctctacggcctcaaggcgatcaccaaggtcttcaagagcggcatcaacgcgacgccggtgatccagtgcagcaagggccccttcgacaagtacatgctgttccagctctacttctgcgcggcggggaacggcacgttcatcgactgccccgcgccgcagcagtacacctgctccaaggagatcctcttccaccccttcaagaagtggatgctcaagcagcagctcaaccaggacgacgaccctttccagctgcctggcgtcgccatggacaactgatacaccgaccccttcaagaagtggatgctcaagcagcagctcaacgaggacgacgaccctttccagctgcctggcgtcgccatggacaactgatacaccgtaccgtcgtctctgtttgcgtttctgt

SEQ ID NO: 95 - DNA, 438 bp, Zea mays
cactcgttcgcctcaaagccaaaggtaaactaactaagcatatattatattcgtctactagctgcattacgtctgtctgaatcttctgcatgcttgcaatgcaggtatcgagccggacttcgggctctacggcctcaaggcgatcaccaaggtcttcaagagcggcatcaacgcgacgccggtgatccagtgcagcaagggccccttcgacaagtacatgctgttccagctctacttctgcgcggcggggaacggcacgttcatcgactgccccgcgccgcagcagtacacctgctccaaggagatcctcttccaccccttcaagaagtggatgctcaagcagcagctcaaccaggacgacgaccctttccagctgcctggcgtcgccatggacaactgatacaccgtaccgtcgtctctgtttgcgtttctgtcaag

SEQ ID NO: 96 - DNA, 303 bp, Zea mays
tgatgacgactccggtatctactaccagctggctcttatggtatgtataataataattattatatctaatctaattaagaagaaggcccggccgccggcctgactgcatgcatgggacgcccgcgtgcagtggccaggagcatactgcgagcagaccagcgctgggtgctgcaagccgaccaccggcgtctcgccggcgcgcgacttctacataacgggcttcaccgtccttaacgcgaccaccgacgctgcagtgacgggatgcagcaacaaagttccttacgaccctaacctgattaccgg

SEQ ID NO: 97 - DNA, 726 bp, Zea mays
  misc_feature (666)..(670): n is a, c, g, or t
  misc_feature (714)..(714): n is a, c, g, or t
agtttcgatgctagacgaagcaatcgactacctaaaatcacttcagctacagcttcaggtactgaatgaaatcatatcagatacacaattgttggttacactaaacatttatttatttttatctttctctcctgcatcctttcatgttttatttattcagcctccagatattatgggtgctatagtagtgtagtctggagatgtaaactaccaatgcaattcattcatggattttctgatcatcacattgtcatatgtacacacagatgctggtcatggggaagggaatgtcaccagtggttcctcttgagctgcagcaatacatgcattacatcacggctgaccctgcccagttgcctccgttgcgcccctccggccagcagccccgacaatttcagataactcaagccaacccccagcgacaatctaacgtcgagtcggatttcttgagccagatgcagaacttgcactcttctgagccgcctcagaactttctcaggccaccgaaattgcaactttatacaccggtaatatgttcaaacattatatctatcaaagttaattttaaccttttcttgtctttatttttcttttctcgtatttcacgcatttcaaaatttaagatttttctttgtggggaaagatgaaaatttaagctgctagatnnnnnatatacagttcaaatggcaacactgtcagcttttacctgaacgntgctagctactc

SEQ ID NO: 98 - DNA, 693 bp, Zea mays
  misc_feature (677)..(678): n is a, c, g, or t
gcatagctggtatggaagggtgcaaaatgcaatttgtttacatggaactgctatcgttattctagattttgttaatgttgcttcccacatgtttcctcaggtggtacattggttccaatcagttggactgagatgcaatgtgatttgaccggtcaaattgagcaaaggaaagttgcaaaggtggaatagatgtgctgtggccctcctgataaatggtaaacatgttagtaacttatcttaatttgagctttcccttgtgtgggatacatgtacttctatctggaaagtatgtttttcatgtactagaatgctgatgatttgttgcatcatgtggttttcttatgatcttttatactgcagtagaaatttgactgcctttgttgtcattaaccattgaatgctcgcttgccttgccatttgttctcattcactcatgactcatgtatcacaaatttctttgttctcatgaaacaggtggtggcggtatacaaattgtggaccagtgacaccaggtccttgggcggactacccaattctgcgacgcccaacttcattacagctgcattgagcatgggtttttaaaaccctggctgaatttaaccagacatgaatcgtagccatgggtcctgtaacccaaccttgggatctgaatcatagccatgggttctgtaacccannaaccttgcccttgtg

SEQ ID NO: 99 - DNA, 689 bp, Zea mays
gcatagctggtatggaagggtgcaaaatgcaatttgtttacatggaactgctatcgttattctagattttgttaatgttgcttcccacatgtttcctcaggtggtacattggttccaatcagttggactgagatgcaatgtgatttgaccggtcaaattgagcaaaggaaagttgcaaaggtggaatagatgtgctgtggccctcctgataaatggtaaacatgttagtaacttatcttaatttgagctttcccttgtgtgggatacatgtacttctatctggaaagtatgtttttcatgtactagaatgctgatgatttgttgcatcatgtggttttcttatgatcttttatactgcagtagaaatttgactgcctttgttgtcattaaccattgaatgctcgcttgccttgccatttgttctcattcactcatgactcatgtatcacaaatttctttgttctcatgaaacaggtggtggcggtatacaaattgtggaccagtgacaccaggtccttgggcggactacccaattctgcgacgtccaacttcattacagctgcattgagcatgggtttttaaaaccctggctgaatttaactagacatgaatcgtagccatgggtcctgtaacccaaccttgggatctgaatcatagccatgggttctgtaacccagtaaccttgccct

SEQ ID NO: 100 - DNA, 429 bp, Zea mays
  misc_feature (292)..(297): n is a, c, g, or t
  misc_feature (310)..(374): n is a, c, g, or t
  misc_feature (377)..(383): n is a, c, g, or t
  misc_feature (385)..(398): n is a, c, g, or t
  misc_feature (402)..(406): n is a, c, g, or t
  misc_feature (411)..(412): n is a, c, g, or t
  misc_feature (418)..(422): n is a, c, g, or t
gctgttgcgataaaggtgactttttgacttgtattgcttgttacttgcagttttaaatttcgtattttcttgcaactgtttgaatggagcctataatttctacttttagtttgtgctagcttaacaatacccagtgagctgtgtatatgattgagttactaccccaaaattcaccgattcatttcttctgtgaatcccactttgttgtttaagagtctggtcaagtgacatgacaacccttggcatatcctcagaccattctattcgagataaagtgttttttttccctttnnnnnnaacacaaaaaatnnnnnnnnnnnnnnnnnnnnnnnnnnnnnnnnnnnnnnnnnnnnnnnnnnnnnnnnnnnnnnnnnggnnnnnnnannnnnnnnnnnnnnaggnnnnnttganngatacnnnnntaccaaa

SEQ ID NO: 101 - DNA, 522 bp, Zea mays
agtctcactcgccaaataatgctggttctcaagaccatgagactcacaagcagtacacgctggagtcctcggcggcttccggttgttcaaggcatggttctccctccagccaaagcgtccatgccgggagtggcagccctgtgtctcacgacgacagccactccggctccacgaacggccatggatcacctgtgagcgcgtcgtgtgtcaccggcgaggaccctactgatctcaagcagaaactgaaggatcttgaggctgtaatgctggggacgtctgagactgaccccgagatagtcaacagtctcgagatctccgcggcaaaccaactctcgttggagcccgaggagtgggagcacatggtgagcatgcccagagggaacctgaaggagctgctgattgcctgcgctagggcagtggaacgtaacaacagctacgccattgatctgatgatcccagagctgaggaagatggtttcggtgtccggcgagccgcttgagaggctgggagcctacatggtgg

SEQ ID NO: 102 - DNA, 384 bp, Zea mays
ggagggctttggtgtcaatacctacaccttgatcaacagggatggaaagcctcaccttgtgaaattccattggaagcctacttgtggtgtgaaatgcttgctcgacaatgaagctgtgactgttggaggcacctgccacagccatgcgacgaaggatctatatgattccatcgcagctgggaattaccctgaatggaagctctacatccagactattgatcttgaccatgaggataagtttgactttgacccgctcgatgtcaccaagacctggcctgaggatatcatcccgctgcagcccgttggacggatggtcctgaacaagaacgtcgacaacttctttgcagagaatgaacagattgctttctgcccagcgattattgt

SEQ ID NO: 103 - DNA, 382 bp, Zea mays
ccgtccgactaccgccacatggaagggttcggcgtgaacacgtacacgttcgtgagcgcggcggggaaggcgcagtacgtcaagttccactggaagccgacgtgcggcgtgcggtgcatcctgacggacgaggaggcggcgctggtcgggggacggaaccacagccacgcgacgcaggacctgtacgactccatcgcggcggggagcttcccggagtggacgctgtacgtgcaggtgatggacccggacacggaggagcagtacgacttcgacccgctggacgacaccaagacgtggccggaggacctgctgccgctccgccccgtggggaggctggtgctggacaggaacgtggacaacttcttcaacgagaaacgagcag

SEQ ID NO: 104 - DNA, 594 bp, Zea mays
  misc_feature (65)..(65): n is a, c, g, or t
  misc_feature (90)..(90): n is a, c, g, or t
  misc_feature (495)..(498): n is a, c, g, or t
  misc_feature (524)..(526): n is a, c, g, or t
  misc_feature (533)..(541): n is a, c, g, or t
  misc_feature (548)..(553): n is a, c, g, or t
  misc_feature (560)..(567): n is a, c, g, or t
  misc_feature (569)..(575): n is a, c, g, or t
  misc_feature (577)..(581): n is a, c, g, or t
  misc_feature (585)..(589): n is a, c, g, or t
ggagggaaggaagaatggtacttgtgtaattcatgtgtaaaactatcttgttcctgtcagcatcnaacagttatgcatatctgggctccntgtttgcctgaagttttattaaacaacataagggcttcattcaacagctcactgcagtaacaatgcaccctcgtttaatatggaatctattcagtaaaccaagtagaaattctgactttgttcaacttacagaaagtatgagttatcaaacttaagaggctcctttgtccaggcaccatcgaatccagacctctcagggtgagcccttccctaaaagaacaaatgtctcaagatgtgcgtatgaacaaatgagtactccttcagagacaaaccatttaccagagtatgtccccctgatagagctacaatatctttgtccgataagcccatccgataaaagatgtccctcagatgtggtgcacctattcacgaaatgaatccaaaaaaacaagagatgtacattannnncagacatgatcaaataataagtacannntgacatnnnnnnnnnagtatannnnnnctggatnnnnnnnnannnnnnntnnnnnactnnnnnaataa

SEQ ID NO: 105 - DNA, 314 bp, Zea mays
tgtttcaggtgatgttttacagtagaaattccttcagctgacgacttaacaaacgtgcaataatgcaggagcttgatctctcagtcgatttgaacgcggctagtgctactgagcaagaagctgcttgaacaccccggcggcctcttttttttgcagctctacacaatagctatttcttcgattttttttttaaaatgttccatagatggataagtttattgatgaaatccattattgtatgttttttggagttccattttttgtcacatgcatgtaatgaacaacggtggcaatcatctataaaggttcaaaaa

SEQ ID NO: 106 - DNA, 642 bp, Zea mays
acgccatttgtgcgcacgcacgagcacgagcacgtcccctactagtgtgccggccatcactcggccaccagaacaccacagctcacggtctgctgcttgtcatgtcatgtcacgcggtgcagttgacagagccaaggagatgctcggcacgttcagcccccagctggagccctacacgtacgtgacgccggaggacaccaccccgtcgggaatgtttgcccgggggtcctactctgccaggaccaaggtacgtacgtacgtggatgcagaaccagtcctttttcggttcacacagaatccttcaggctcgatagttcacgaggtttggtttggcatcctgttctttgacagttcctcgacgacgaccgcaagtgctacctggagatcaactacaccttcgacatccgccgggagtggccgtcgacgagctgaccatccttccctccctccatcggtggcctgagcagaccagtcgtttcgttctgtgttcttccttttctatgttgcctcgtcctgtcctgtccctaggtttttgtttgttcaccgtgttgctgcgtgcgtctatatgtgcccttctccatgcgccagctgtctgctgcgttgacaccgttactagacagtgcaaatgtcaggtcgggtcta

SEQ ID NO: 107 - DNA, 420 bp, Zea mays
  misc_feature (296)..(297): n is a, c, g, or t
  misc_feature (311)..(325): n is a, c, g, or t
  misc_feature (338)..(345): n is a, c, g, or t
  misc_feature (352)..(354): n is a, c, g, or t
  misc_feature (372)..(374): n is a, c, g, or t
  misc_feature (404)..(405): n is a, c, g, or t
acgtacgtctcagcattactccgcatgctggccgtgcgctggtcactgaagatggccatgctctttctgtcatgcgtggtgtggctgcagtgttcaggtacatcccctggatccacaacgtggtggccgtggacgaggacgggtacaacggctgcacgacgccgccggggtcgcggacctacacgtccggcgccgacagcgtgacgctcgccaggggggacaacttcttcatctgcacccggttcggccactgcaacctcggcatgaagctcgtcgtctatgccgcgtgatctgtnngagctagcgactgnnnnnnnnnnnnnnnactgggggcgctnnnnnnnnggctgtnnntgctctcgagcgaactgnnntgtttgatttgtgctatttcgtgtaggctnngtcagtcgcttggtt

SEQ ID NO: 108 - DNA, 327 bp, Zea mays
tacgccagcatctcgccaggaaaatggcgggcactactccgcgccgcttgctcctggtcatcgtccccctcgtcgccgtcgtgccggcgtccgcaaaagactacatggtcggcgactcgtccgggtggaagtccggagtggactacgctgcctgggccaagggcaagccgttcgccatcggcgacacgctctgtacgtgccaaataaagctcgtcgtcagattcagatacgtacagtacagtagccgccaatgctgtgtccatgcatgcatcatgttctcgtatataatgtcagtggcacgttcgttcgatcgtccgcgtgtatatc

SEQ ID NO: 109 - DNA, 645 bp, Zea mays
ggtccgccgtattattgcaataacaacgctcctccctcccggactgtcgccgcagtcttcgagtaccagaacgggcggtcggacgtggtgcaggtggacgaggtcggctacgacaactgcgacaaggccaacgcgctgagcagctacagcaagggccacacctacgccttccagctcaaggacgccaaggactactacttcatctgcagctacggctactgctacaacggcatgaagctccacgtcacagcaaagtcgtcatcctcatcctcctcttcctcgtcgccgtccggatctgactcctcctcctcctcctctgacaacgatgacgacgactcttcctccccctcgccgcccgccaagaagtccaaggccaagaccagcgccgcgccgccaccgtcagtcctcgctgccacgcccatggctaccgccgccgccgccgccgctctgctcctcaacaggatgctctgatctgatctggtctgcgttactgcgtatgtagtcacgtggctccagatcttgcttgggcgctgatgagctacactacactacactagttttttctgcttcttttagtttttttcccccctcaccccttgagattggggaggcctcttctgcttctagcttgcttgcttgctgctt

SEQ ID NO: 110 - DNA, 369 bp, Zea mays
gtttcccagcacggggtgactgctcctgccggaatccacaacctgttctccttgataagcaagaggatagagatgaaggggttcatccagagcgattacgtgcacctgttcccgcagttcgtcgatgacatcaccaggcattacagagacgggaagatcgtgtatgtggaagacatgagcgttgggctggagagtgggccggcttccttcgtcggtctgttcagcggtaaaaatgttggcaagcaggtcgtctgtgtgtcgcgggattgaaaggcctggattttgttccctactggccagtacccttaaataaaatcaggaaaacattattttcaactccgagaaggaccccactagccagtaccacgg

SEQ ID NO: 111 - DNA, 358 bp, Zea mays
ctcgcgcgcgacgaggtgaaggtgatggtggaggacgacacgctggtcatccgaggggagcacaagaaggaggagggcgcggagggcggcagcggcggcgacggcgacgggtggtggaagcagcgcagcgtgagctcctacgacatgcggctggcgctgccggatgagtgcgacaagagcaaggtgcgggccgagctcaagaacggcgtgctcctcgtcaccgtgcccaagaccgaggtggagcgcaaggtcatcgacgtgcaggtccagtagacaaactgagctgtcacgacgggtctttgtgtagcactagcgtgggttgggctcttcgcgccgaccgtatcagtactcgtgaccc

SEQ ID NO: 112 - DNA, 580 bp, Zea mays
gcgttgcggctttctgcttccgtgaaatgccgtcggcgggcactcaccgtgacctgtgcgctcccggagaaagaacggccggcggcattcaacatcccgcccactggtgagtacatgcacttccatttcacttagcatcattatgcaacaatataataatgcgtgctaagcagcttacgcacaagagcatgcatgcgtttcagctctgctgtgccccgtgcccccgccggacggcaaggaacggtgggacatcaaggaggaagatgaccgcgtcacgctgtggctccaggtgccagggctgtcggcgagcgacatcgaggtgaccaccagcgaggacgtcctcgagatcaaacgcagggtcgtcgccccacagcagccggcgcccgtggacgcgcacggcgtcggcgcgttccacatccggctgctgttgaccaaggagtacgacggcagcaacgtcacggccgatctcaaggccggcatgctggaggtcaccgtccacaagaacccgcaacgccccggcgaacgcgccgtgatgatgggggcgaccaagcccccgcccgagccccgtcaaaacgaggag

SEQ ID NO: 113 - DNA, 404 bp, Zea mays
ctggtggacatgccggggctgggcacgggcgacatcaaggtgcaggtggaggacgagcgggtgctggtgatcagcggcgagcggcgccgggaggagcgcgaggacgccaagtacctgcgcatggagcggcggatgggcaagttcatgcgcaagttcgtgctgccggacaacgccgacatggacaagatctcggcggtgtgcagggacggcgtgctcaccgtgaccgtcgagaagctgcccccgcccgagcccaagaagcccaagaccatcgaggtcaaggtcgcctgaggtgggactaggtcgaccgatcgtggctctgaagatgtgggagcagtgccagcgagttgtgaggactgaggacctctacctgtgtggaatgtggcgaggaataatcgtagtctgta

SEQ ID NO: 114 - DNA, 688 bp, Zea mays
  misc_feature (516)..(516): n is a, c, g, or t
  misc_feature (556)..(560): n is a, c, g, or t
  misc_feature (572)..(576): n is a, c, g, or t
  misc_feature (580)..(581): n is a, c, g, or t
  misc_feature (624)..(625): n is a, c, g, or t
  misc_feature (629)..(641): n is a, c, g, or t
  misc_feature (643)..(645): n is a, c, g, or t
  misc_feature (647)..(648): n is a, c, g, or t
  misc_feature (650)..(651): n is a, c, g, or t
  misc_feature (655)..(658): n is a, c, g, or t
  misc_feature (663)..(667): n is a, c, g, or t
  misc_feature (669)..(670): n is a, c, g, or t
  misc_feature (672)..(677): n is a, c, g, or t
cgccgtcgtcgtcggcggcggcggcctccgagactgccgccttcgccagcgcccgcatcgactggaaggagacgcccgaggcgcacgtgttcaaggccgacctccccggcgtgaagaaggaggaggtgaaggtggaggtggaggacggcaacgtgctgctcatcagcgggcagcgcagcagggagaaggaggacaagggcgacaagtggcaccgcgtggagcgcagcagcggccagttcgtgcggcgcttccgcctccccgagaacgccaagaccgaggaggtgagggccgcgctggagaacggcgtgctcacggtcaccgtgcccaaggccgaggtcaagaagcctgaggttaagagcatccagatctccacggccctcacctcctcggtcttggcgttctcggggaggcggaagcgccgcacgaactgaccgctgctgcgctccacgcggtgccacttgtcgcccttgtcctccttctccctgctgcgctgcccgctgatgagcagcacgttgncgtcctccacctccaccttgacctcctccttcttcacgcnnnnngaggtcgggctnnnnncacnntgcgcctcgggcgtctccttccagtcgatgcgggcgctagcgnnggcnnnnnnnnnnnnnannngnncnncacnnnngcgannnnngnncnnnnnngcggaacatgc

SEQ ID NO: 115 - DNA, 442 bp, Zea mays
gtgcacactggcgccagatgggtatgtgtgcagcccttgatagcctgagcttttggcaaaactaatggtctgtgacagactaaccgatctttggttttttgctcttggacagttcaatgacatgatcaacgtgccattcacgtcgaagccgttcgtcgctgggttggtagcctatatcctggacaacaccctccaggtaaaggagagcgcggtgcggaaggacaggggcaaccactggtgggagaagttcaggagcttcaagaaagacgcgaggagccaagagttctactcgctgccgttcaatctgaacaagttcttcccgtcggtctgatctcaaatggcgccgccgctgaatcaattctggaagcaacccttgttcatatgggccttaatgaggaacataattctgctggtctggccagtggaagcttctgtgtctcca

SEQ ID NO: 116 - DNA, 788 bp, Zea mays
  misc_feature (721)..(721): n is a, c, g, or t
  misc_feature (736)..(741): n is a, c, g, or t
  misc_feature (746)..(757): n is a, c, g, or t
  misc_feature (768)..(773): n is a, c, g, or t
gtttgcttcgcagctgtttgtaggacatggagagaaatgtgtaaagagattgtgttgagcccggagttttgtggcaagctcaccttccctgtgtctctaaaacaggtaagggaaagaacaatcaacctccttcagttcgagcaatcttgaaccggatgttgagaattgcctccaaaccttgagcagcggatatctatatctccctctggtccttgatatattgcttgtttcttttgacagcctggtcctcgagatggaaatacaatggtccagtgttttataaagaggaataagtcaaaatccacttaccatctctacctgtgccttagcaatggtacgtcacatgatttgcacattttcaagattcaatagcaatgttcataagtttatactgttttattggagcatatgggattattgttagccagatatgtttctcctttttgagtgtttgattttgtgattatatctcgtatcttgtaatcctcataaattctgaaattgtgtggccttttaatctcatattcatgagagtatttacagttaaatgatcaatggtctgtttatcttgtttcactttatcaaatttgttgactcattttcttctgtgcacagttgttacttcagaaagtgggaaattcctcttatcagctaaacgacaccgcaaaaccacatgcaccgagtacactatatcaatggattctggcaacatctcaagatngaaaagaacctacannnnnnaaatnnnnnnnnnnnnatgtttttgannnnnntgttcttgtttcccc

SEQ ID NO: 117 - DNA, 1094 bp, Zea mays
  misc_feature (129)..(129): n is a, c, g, or t
  misc_feature (154)..(156): n is a, c, g, or t
  misc_feature (232)..(232): n is a, c, g, or t
  misc_feature (366)..(368): n is a, c, g, or t
  misc_feature (375)..(376): n is a, c, g, or t
  misc_feature (416)..(420): n is a, c, g, or t
  misc_feature (541)..(543): n is a, c, g, or t
  misc_feature (1045)..(1048): n is a, c, g, or t
  misc_feature (1063)..(1063): n is a, c, g, or t
aattaggtggcacatgacaaaatatttttgaaagcataacttaagatacacaaaatgaatgaagttgcaggatttgtgagttctaactggtacctgtgttttgatatgccttgcccttcaactacctgntaatatgttttgatggtttacacgnnncactgtctatgtactcttattgaagaacaaactccctgaacctgctagcatgccttgtacattacttggtattagngcttgcaatacatgaatccattgcaactttgcaattgactgcttaagttgtgttcttgcactgctgacatatttggtattgcaaaagttcgttgaccatctaaatgttggagaagttagcacttcactgtcttnnnctcttannttaggttatatgacacttccccttgtttaaattctctgtnnnnncatcatactctttccctcctgaaatataagggatttgagttgtcctaagtaccgtcataagtttgaccaagcttacacttacacagaacaatatatttctgacactgagttagcatcattnnntacattatgaatatattttcttaatttacctctttgatatggtagatgttaatactcttctctataaacttggtcaaactttggacagttttgactagaggacagcgcaaaatccattatatttcaggacggagggagtagattattgatctcctgttatgttttaatgcttgtattgaaacttctttccccatcttaatatacaattctacttctgcaccttgtttagatctgatttctgggggacaaacttcaaaatatatgatagcaagccaccatatgatggtgctaaagcatcaagtagtcgatctagtcgtcgtttcggaagcagaaggattagtccccaggtatcgtctggcaattatgaagttggacaggtttcatacaaatacaacttgctcaaatccagaggccccaggagaatgtattgcactctcgaatgcccttcagcgcaagagacttgggaaaactcactcaagacaaagttcaggcgccccctggnnnncacaactttacgaantaaagcaccccgctggcatgagcacctgcaa

SEQ ID NO: 118 - DNA, 1291 bp, Zea mays
  misc_feature (1226)..(1235): n is a, c, g, or t
  misc_feature (1272)..(1274): n is a, c, g, or t
  misc_feature (1277)..(1280): n is a, c, g, or t
gcattgaggggaattaaactacttaaggagctgaaaggtcctaatattatagagctgattgattgtttcccttacaaggaaaatttgcaccttgtatttgagtttatggaaactgatctggaagctctcataaaagataagaacataatactgtctccagctgacacaaaatcatatctccagatgctgttaaaaggtctatcgttctgtcataagaaatgggtgatacacaggtacctactaccttgctaatccccttctaatgaaaacatcatttgataagctgtgttgcagggatatgaagccaaataatttactcattggtgccgatgggcagctcaagcttgctgactttggtctggcccggatgtttgggagtccaagaaggaacttcactcaccaggtatttttatagcttatgtgtatgtgcgtctagttaattgttccctgaacttagaagctggttgcagaagcaaggttcacttagagcaccttcctttaacattatatttctgatgcagtgtattctagtcactggatatttagataaatggatttaattttccctttaccaaggaaaaccgtgacacatgcatgcccaaatttgtcgtctctatgcagtttccttgcaagagcagtgataattggaactgtgtcagttagtaaatttgtttagttatttttgtactttgtttagtgtaatctattttggagctttatcatagcccttttgctagaaattatctggtaatacaaacgatgcaatatcttaagtcaccaaactattttttgcaactgctgactttcttaataagtagtgaaaactgcataatcttgtgcaaaagaaaacacatatacatgaggaaatcttagtgtatttccaggatatcccagtggacatacttcttcatataagagattttatattgcttttttccttgcatgacacaattagaaaaaagcctgatctttttatttgggaagtatgcttccagctagtaaacttttctgattagggaggatgataacgtattattcatttgggaaggatatcatccttcttacaaaattaccattgctcgtttttgtctgagcattgcagacttggaagttctgctaatcatagttcctatttagtagcatactttatgcagtcaaaggccacctctagttatctgtgttgagcagttatttaatgttgccattgtatttcgttcctttattannnnnnnnnngatttattttgtcctggtggtggcaggcacatgaatnnnacnnnntacacgtagtc

SEQ ID NO: 119 - DNA, 447 bp, Zea mays
gtgaatttggggctatacttgctgatgttgtaaccaacatgaaagttcctatcacagtactaaatgtaactttaatgggatcgtttcgaagtgatgcacatgttggcacttggagttatcctcccactatacttgattgcagccactggtgtcttcctggagtccctgatgcttggaacgaactcgtgttttcgtaccttttgacaaatggtgagttcttagttatgctaatgtctatcttcatttctgtgaatcctgtgggtaatggatgtcagttagacaaattttttcacttaggagtaaaaattttactttcttgcaaggtatagtgttgttccactgcagctacagtgttatgaatttccaggacttacatatacaatacactttttatctctgccgaaccatggtggcatggtgcccgtggaatgtcatgcatagcatgaa

SEQ ID NO: 120 - DNA, 219 bp, Zea mays
tcaaacaaaacatttgaaccccatggctttgttcatctagacacattttctttgggctagcccctagcagttggtttccaggcgtatgtatgcaggcaccaattcaccatcagaggacctgatcgttgctggggaagaagagcttccagtagagcagctcgttccacgtgtccggcacgccggggaggcaccagtgcgtgcagtcggcgtagctcctgg

SEQ ID NO: 121 - DNA, 1028 bp, Zea mays
ttccctttgtatatttcggtgtgatgaatggaaagcttagaaatagagtgaagcattgctcataatgtggtgcatctctctctctctctctatctccctctttttgctgttcaccagaccatctgtgatcgccaaagatatttttgctaagctttgtacccacgcagctgtacctttttttattgcacagtaaattttttttatcattgatatggccccttgtggctagagctgttaagaggcatagagcaaactccgattcaaatatgttatattgttatatatgtaccggtaaaagaaaaaaatagttatttgattcacaccttggcctttatctgttcttttctaagcttttgtggtacatgcttctttagtttcatccatgctgaaaccttaacgtttcatgtttgctaggactacaatgccaccattgagttctattgggctccctttctggccgagtcaaattcggatgatgctgttgtgcaccggatcgcggatcggattgtaagagggacatccattgagaagcatgccaagttttggaagggggctgacatcttggtattcaacacctacctatggtggatgactggacaaaagatgaagattttgtaagcgtcttcctctactaccacgccgagttctttcaccatgtgtttcaaaccgaaagtttgcaagtcattgaaaaattggtcgtgtactttccagtttgaagatatatatattgtcttaaaaaacacctcctggtttcaggcggaactccttcgaagataaaagcaaggatatcatagagatggaaacggaggaagcctatgagatggtacttaatgctgtgctgaaatgggtggagagcaacatgaaccccaggacatcaagaacattctttgtcactatgtcacccacccacacaaggtaagcctgcctggcagcctgattgcagtagtagcctctgtttcacggttctagcttcaaaagaagtgcgcgtgcgtatatggcatatatacacacggctacggctaaacatg

SEQ ID NO: 122 - DNA, 703 bp, Zea mays
actggctggtgcggttcctgttcgggccggtgccggtctacttctcggcgctggccatcctcatcgtgctcaccaacgcgcagtacttcgggctggtgggcgtcggcgtggcgccgcgcaccgcgaagctggcctcctcggcgcccgtggtcagcgtcatgaagtactgcgacatcttccgcggcgagtgggtgccggacgcggaggcgccctactacaaccacaagacgtgccacatgatccaggagcaccagaactgcctcaagtacggccgccccgacctgggcttcctcaagtggcggtggcggccctccggatgcgagctgccgcgcttcgacccgctgcagttcctgcagttcgcccgcgggaagtcgctggccttcgtcggggactcgctggcgcggaaccacatgcagtcgctgctctgcctcctgtcccaggtccgttggttacttcgtttatgtgctcggctgctcctgagtgatgatgatgacaacggcctgctctgccgccgagacgcatcagactttgcgcagctgaagcttccacttccacactacaccacaccaccagagcagagacagccacatgcaagcagcgaactgacctcgcgaccactgtgtctccatggctggctgcaggtggcgtatcccaaggacctgtcggcgaacccgtcggaccagaacaaggtgtaccactaccg

SEQ ID NO: 123 - DNA, 701 bp, Zea mays
agctgaaaaagatggccctaaaggttactgtcttcatattaatgcttacttggctagttttcctttacctaatgttttttttccaaatatgtgtgcaggttattgcctcaaaccttaacgaggaagagatcaaggggctaaagcaaatgttcatgaacatggacacagacaatagtggcacaatcacgtatgaagaactcaaagcaggactagccaaacttggatcaaagctgtcggaagctgaagtaaagcagttgatggaggctgtatgttctaatctataatatatattgcaataccattattagaatcatgttcttgactgacatgcttacctttcgacctattccaggctgatgttgatgggaatggatccatcgactatgttgagttcatcactgccacaatgcatagacacaagctcgaaagagacgagtatttgtttaaggcattccagtacttcgataaagataacagcgggtgagtacttgcaaattgatatatcaaatgctaacataacatgccgccacactttttatcccatcaaaacatgtttacgctatcgattatgtacaaaaaaatcgacccctgggggaatgaccacctcctttttgcatgtaaaagtatctggtccacatttattggcactggctgaaactggttttgtttaacatggagattacgttgattttatgcagttt

SEQ ID NO: 124 - DNA, 473 bp, Zea mays
aagataatgccaaagtctgtggagacaacatatgtggatgaacaaactgcaagagcttcacacaccctagcagagagcaacgggacagctagcgttccagtgactgtacctgaaggaactcatcctgatcaaacaagtgatcaagtgggaatcaatggaagcatgaacccatgcatccatccaatggtttctgcagacccaaaatttggtagtagtgccacaccacagacttttcctcataattatgctgcctttgctccaatgatgcagtgcaactgcaaccaagatacgtacaggtcattcaccaacatgtcatccacgttctccagcatgcttgtttccacgttgttgtcaaaccctgccatccatgcagctgccaggctcgcagcatcatactggccagcagctgaaggtaacactcctattgatccgaatcaagaaaaccctgcagatggcgtccaaggaaggaacat

SEQ ID NO: 125 - DNA, 490 bp, Zea mays
tgtaagcagggtgagatcgaggccgtggtcattgccaccggagtgcacaccttcttcggcaaggccgctcatcttgtggacagcaccaaccaggtcggacacttccagcaggtgctgacagcaatcggtaacttctgcatctgctccattggggtcggcatcctcgtcgagatcatcgtcatgttcccaatccagcaccgcaagtaccgcagcggaatcgagaacctgttggtcctcttgatcggtggtatcccaatcgccatgcctaccgtgctttcagttaccatggccattggttcgcacaagctgtcacagcagggtgccatcactaagaggatgactgccattgaggagatggctggtatggacgtgctttgcagtgacaaaaccggcacactcaccctcaacaagcttagcgtcgataagaacctcgtcgaggtgttctgcaaaggcgtcgacaaagaccatgtcttgctgttggctgcaaggg

SEQ ID NO: 126 - DNA, 147 bp, Zea mays
gtccatgggatcaacagaatgggcaaagacagggggatggtccctcatgaattctgctcgcttgtctctgggcacctgtggcatctgaacttgcacttgaggttgaggtgggggtggctgctgctgtacctgctgcatatgtggaga

SEQ ID NO: 127 - DNA, 713 bp, Zea mays
taagatatactatctgatatctctcatacataccatacattaatgctcatatgtataaagaacaaacacaacgccatcgtccatgtctatatactgtacaattgtaagaatgataacacatttccgtgacctttacgcgatgttaacactgcttgcttcagaaccatgaactgaagcagaatgtattgtataacattgttactgatttaatgtttgttcgagcaggagacggagaagattgcgctcgcagaatcaacgggcctagaccagaagcagatcaacaactggttcatcaaccagaggaaacggcactggaagccatcggaggacatgcctttcgtgatgatggaaggcttccacccgcagaacgccgctgctctgtacatggacgggccgttcatggccgacggcatgtatcgcctcggttcatgaactacacacttccatggacgactgtgtggggcctatatatccaatcgtcggaccgtgggagtatatttcagtgtaccaggaccaggatgcgttgcagtgcaaggacattgttgtggaatttttgttgctgattgccaaggggtgggtcggtcgatgtagcgtctatgcatggcttgtagttctcctgtaatgttgttgttaatttccgcttggcggcttgtaatcttaggtgtatctctggaacttgaatcctgggtgattaatccggcaagcagctgcct

SEQ ID NO: 128 - DNA, 724 bp, Zea mays
ggacgtggcgttcgcctactcggggcacaacgtggtgctggagatccaggccaccatcccgtccacgccggacaagccgtccaagaaggccatgtggaagggcgcctttgtcgcctacgtcgtcgtcgccatctgctacttccccgtcacgttcgtcgggtactgggccttcggcagcggcgtcgacgagaacatcctcatcacgctctccaagcccaagtggctcattgccctcgccaacatgatggtcgtcgtccatgtcattggcagttaccaggtacgtacggtacaaacatttcacttctccatatccaagtcacatacactccatatccatgtcattggttgtcggtgcaggtttatgccatgccggtgtttgacatgatagagacggtgctggtcaagaaaatgaggttcgctccgagcctcacgctccgtcttattgcccggagcgtctatgttggtatataatgcctctatctgaactgaaccctaaagcagtagatcgatgagaatctgacgtcctaacaaacaagacgtactgacaagtgcgtgcaacatgtgtgcagcgttcacaatgtttctaggcatcactttccccttcttcggtggattgctcagtttcttcggcggattagccttcgcaccgacaacttattttgtaagcttttccaaagatccatgcatgattgcattaattgacccattttttttcctgcaacaa

SEQ ID NO: 129 - DNA, 510 bp, Zea mays
gcgcttttcgtgatcccggagtcccctaggtggttgatgatggagaagagagtttcagaagcaagggcagtgctgctgcagattagcgagtctgaagctgaagctgaagaacggctggctgagatcgaggaagccgcaggtctgatgaaatcaatgaaatctgaggacaaagaagtgtggagggaacttttgaacccgtctcccgccgtccgtcggatgctgtacgctggttgcggtattcagttgttccaacagatcacaggaattgatgctactgtctattacagcccaacaattttcaaagatgctggcatcaagtctgatcaggagcttctcgctgcaactgttgctgtgggtttcactaagacagtgttcatcttggttgcaattttcctaattgatagagttggacggaagccacttctttatgtgagcaccattggcatgaccatctgcttatttctcttgggggttgcacttacactgcaaaaccatgccgtggggcttatg

SEQ ID NO: 130 - DNA, 469 bp, Zea mays
cccttgcttctgaaactctcttctccatcatcaaccacctaggggactccgggatcacgaaaagcgcaaagccaatgaagactgatgggaggataccgacaccaagcataatcctccaattgatgtgctcagaaaggcctgagaaggcataattggaaacatagccaagaaggatcccaaaattgatgcagatctcaggaagggatgtgagcgtccctcgggcacctgcgggggagatctcagcaatgtacactccagataccatggcaccaaagccaatgccaaccccagcaaggagcctccctatcataagcacagtgaatgatggagcaaacgtcatgatggtcgcgcctatctggaacacaattgcaccgaggcccattgtccattttctgccaattgcgtcagatgttcgcccccctgataggcttcccaagagtgagaccacgctcagacagcctactaggat

SEQ ID NO: 131 - DNA, 398 bp, Zea mays
ctccatcgtggtgccacagatggtcatcgcgattggctctgggccgtgggacgagctgttcggcaagggcaacatcccggcgttcggccttgccgccgtcttcgccttcaccgctgccgtcgcagggatcatcatgctgccaaagcagcccaagaccagcttccggtccgtctccatgggaggaggccattgatgatcacaactctaggatgcatggtccactgtggttcacgattcttttacctttgggagttggacggccaggtgtttgttctcaaggccgcttccgaggcctaaaccggtgggtttatttctaggccggatcatgacgaacaatctgtttcgctgggttgtaaaggaaaagttttacacgaacacacaacgtgtcgggctattta

SEQ ID NO: 132 - DNA, 621 bp, Zea mays
acataaatgcactgacaagatggtggctatctgacacgcagatgatggccatgggaagtggactgtgcattcctcccatgctgctgccgcgagccatgcagctgcaaattccttcaattgctcatttccatcatctcggcatgggattgggttatgggatgggtgtcctcgatatgaacagcacagcggcagttccatttcagcccatccctggcgctcactatacttgtccgatgatcccaggcacgccaccacaaggtcttggaattggaatgcctggcacaaacacgatgccagtgtttggagtccctgggcaagcaatccatccctcagcgtctagcgtacagccattcccatcgttggcgggtcttcctgttaggccaaacctggcacctcaagtcccagccgtcatggctaacatggtgcaggagcaacagcaaggcgtagcgactcagcagcagcagagtctgaataatgaagctcaacagaaagcaaataccggagatccacaaatactacaaaaatagatgaagagatcttcgccagtaatcagtttctggatggtggtggcaacaggactaatactatagggagaaatgaggctgaaacattaaaaacggt

SEQ ID NO: 133 - DNA, 355 bp, Zea mays
ttggtggtggcgagaggtgcaagagcatgaaccatttcatttgggggttcttgtgtgcccttggtgaggcacaattcttgaaccggactcttgtcatggacttgaatgtctgcctcaatgcacggtatacttcgagtgacaaggatgaagaaagagatttcaggctctactttgattttgagcatttgaagcaatctgcgtccgtgattgaccagagccagttctggcaagattggggacagtggcacaagaaagataggctcaagaacttctacactgaagacatcaggatgaccccaatgaaacttcgtgacatcaaggacacattgatcatgaggaagtttgggaatgttga

SEQ ID NO: 134 - DNA, 618 bp, Zea mays
  misc_feature (398)..(401): n is a, c, g, or t
  misc_feature (453)..(456): n is a, c, g, or t
  misc_feature (500)..(505): n is a, c, g, or t
  misc_feature (517)..(521): n is a, c, g, or t
  misc_feature (527)..(529): n is a, c, g, or t
  misc_feature (547)..(559): n is a, c, g, or t
  misc_feature (568)..(582): n is a, c, g, or t
  misc_feature (584)..(604): n is a, c, g, or t
  misc_feature (608)..(615): n is a, c, g, or t
aaggagggatatttttctgtcagatttggcacgtagggagagtctccaattccagtatgtttacgacctctaacacagatcggttctcaaagctataaatttaacggcagtctagtcagcttgcaagagaaaattggattcagagttatccatgaagacttcatggcaacattagctgtgtttgtcatagaccaagatgtttatgaaagcgctcatactatttctactacggtttttttttaaataaaagtgccattataccgaccaatgttaaatgttccaatgcagcgtttcagcctaatgggcaggctccaatttcaagcaccgataagccactaaagcctcaagtgagagccaatggtatagacgtggctactttcgcagttcctagacgcttnnnnactgatgaaatccctttggtcgtcaatgatttcagggtagctgctcgaaatnnnnttgaagctggtaagctccctgtttgcactctgaatgttcagatnnnnnnacaaagaaagannnnncaaatnnntatctgcttcagaccgannnnnnnnnnnnngcacacagnnnnnnnnnnnnnnntnnnnnnnnnnnnnnnnnnnnncgannnnnnnngac

SEQ ID NO: 135 - DNA, 630 bp, Zea mays
  misc_feature (7)..(7): n is a, c, g, or t
atgcatngaaaggtggttgatgctgttcatgccaagggagccatctttttctgccaactatggcatgtaggtcgagcttctcaccaaggtatgttaataatagggacaaattccataaaacaaatatatttcacgattctgtaattcccccatggactacattgcattgctaaaaatttcttgcagtcagattatatctgtcttgaatgaaggtttagtccactgaaattatattcagtcggaaacaggagtcgttgtttgtaggcaattttaggatgatttagtcaggtcagtggagaccagagtttctggttgggaactggaaagttgcctgatttcttacttttctactatatcgcttcttctcaaggcgtctctaatagtctagcttagagctagttggatcaatgtttgctaaacagtgcaaaaaggaagagatagtcacgatgcccctatctctcacacaaatcacaacacgatatgcctactgctgtttgtctccatgtttggctagaggtattgctagcttatattataggataagagacgccctgcaagcaaggaacaaaggttgcctttcattaatcttcagtcagagcactacaatctgcacctcttgagatagtttga

SEQ ID NO: 136 - DNA, 587 bp, Zea mays
gcaagggcgccatcttcgtctgccagatctggcatgtgggcagggtctccaccaacggtacgtgcatgtttctcagctctcgatcatgctacttgcttgacttgcttaaccaggagctgatgttctagtcggttacccatccaacttgcagagctccagcccaacggcgacgcgcctatctcgagcacggacaagcagatctcccccgacgccaagtccggaacggcgtactcgaagccgcgccggctgcggaccgacgaggtccccgggatcgtcgacgacttcaggcgggccgcacggaacgcgatccaggctggtttcgacgccgtcgagatccacggcgcgcacgggtacctcctggagcagttcatgaaggacagctgcaacgaccgcacggaccagtacggcggcagcctggagaaccggtgccgtctcgccgtggaggtcgtggacgccgtcgtccgcgaggtgggcgcgcgccgcgtcggcatcaggctgtcgcccttcgtcgacttcgtggactgcgtggactcggacccggtggcgctcggccactacatggtgcagcagctcaacaggcatagcgg

SEQ ID NO: 137 - DNA, 797 bp, Zea mays
gcgacttcgtcgaggcgtgcaagaagaatccttcgctcctcgccgaccccaacctctccttcttccgggattacctccagaggtccatctctcacccccccctcctcgctatatctttcgattcgcccccatcgtccttcattctttctgatcgtaggagcccccgtttttttgcagtttgggtgccaaaattcccgccgccgccccctctttcgaaagtcccaaggtaacattacccatccatcttctcctctatccaccccgcgtaagtatctgctcggatccttcttttttttaagagagagggagggagggaaataatcttctttgcaaagcatgttatattttgtatggcacttcaagtgaaattactagggcgcagagaaaaaaatgctgaatttctttacccactccgtatcattcacaagacacttatgacttccttgtcgtgtgttgcccatccaaggttctttctcgagtccttgctttttcatatgcaattttgcgctgcagagatcttccatggacgacattgatgacgacggtgatgacgacgacgatttggatatgagggatcccactcctgagcgagacgagctcgatgaagagattgttgagtctgatcttgagctcgaaggagaaattgtacagtctgaccatgatgacccaccacagaaggtaaccactctattctcttgccactaacatgtcctctttcccttctgttaggatcctagcgacaaggtagatgtgctgctaaggttttttttgtgccatgacagatgggaaatccttca

SEQ ID NO: 138 - DNA, 373 bp, Zea mays
cgtctgacagtttgttgcaaagcactcgtggtttttacataccaagcttatgaactttgtaatctacatgtaggtggggaggtttgaccccgtgacccgtgaggctcttgaaccgcaccagctggttcctaatcttgccatcaaggaagctgtgcatgcgtttttgagtgagcatggttgggcttacaagattagatgatcgctttggaatacaggttttggatactgtcggatgtgacggtgggatttttttgttcactgttggggggcagattttaatctgggatggctgcgtacagattcaccttctccagttgtgtacatatgagatgctcattatgatagtaattgtgaacagtacaccaaaggaagt

SEQ ID NO: 139 - DNA, 759 bp, Zea mays
  misc_feature (682)..(687): n is a, c, g, or t
  misc_feature (715)..(721): n is a, c, g, or t
  misc_feature (730)..(730): n is a, c, g, or t
  misc_feature (732)..(739): n is a, c, g, or t
atgctgtttttctttgaaacattttcactttttttatagcgcacgaatatatttgcgtatgaaagcaactgcatgtgtgagaggaatgcctcagaattttgcttagcttattgctttatgtaccatgcatcacctttcttttctaaggaaatcaccctctcacttcacaaaatgtttccctgacttatttttcttcgcatttgaaaggacattgactgccccagtggaaatgatcaaatgtttgaagtccatcaaagaatacgccttctgtgcctcaaattatcctcttgttattactcttgaggatcacctcacaccagatctccaagctaaagttgctacggtatagtctacttaccacatcacctcattgcagatatcatgtttgaaaccttgattctaacttcaggctgttttagatgctcactgaaacatttggagatcttcttttcgtccctaatccagacccgatgaaagagtttccttctccagcatctctaatgaagagaataatcatatcaaccaaacctccacaagaatataaggagtttctcaaagccgagaataatcgcagtggcagcggaaacatagctgagttgccagaccaaggaagcctgagaagaatagattcaaatgccgatgaatctgatgggaaggtctgcaatatcactgccttgtgaannnnnnacccatgatttaacaaaaatgaatgaannnnnnnttttgtcanannnnnnnngaactggatgagcaagacga

SEQ ID NO: 140 - DNA, 694 bp, Zea mays
  misc_feature (644)..(644): n is a, c, g, or t
aaggtacaaaaggggtagcgcttctgctgattcagatagctctggggctattgagctaccatctgatgctgaaggagattcacaagaagtaaacagcaaagcaaaggtgagggatgatcatgccaattgcaaactcaatgaggtacaccaaagctctgaatcagagaaagataagcaacttgtaccagataacgcagcaacaaccaatatgtcagatgtacaacgtgaaaattctcatgtacagaacaatcagaagtacgaaattatcaatgtgccttctgattctaggccacttctagttttcattaacaagagaagtggggcacagagtggtgattcactgagacagcgtctgcaaattcttcttaatcctgtgcaggttggtatgcttcaagctctttaatcggttttcagttgtgcaagtttccttgtagatttgctctgtttacttgacacatctagcacccctttttattttatatgttttttgtctgtgagcataaattaagtaatgttattgtgtggctctgtatatatctttaagcctgactgtagctttaataaatcctcttatactcgacttatccaaatcttcgttctgtgcacaaccttttgaattggtaaagtttagttcatgttgcttngtcacgttcagttaatcctccacattgtctttttaaactgattcatttta

SEQ ID NO: 141 - DNA, 452 bp, Zea mays
gacgaacgcccgcatggtaataacataacgagtacagcactgatttgaaggtccagacatgcccaaagatttccatgttgttgcaggtgtgaccggatactgtggcacggccaaggcatcgagcagctgcagtacatcaggggcgagttcaggctctccgaccacaggccggtctgcagcgtgttcgtgatcgaagccgatgtagatagcgggagcaagatcaggaagggctactcaacgctggacgctaggatccactgcgagtcccccgagatacccaagagacacagcttctatgatgacttctgaaattttggcccgtgatgctagttttgtctataacatagcagcttacaaagatcagacacgtttgtagcgaaaaggctcaggtttctcaagcctaacacctgtcttaatttgtaccaagcggtatactaactgaaagtcaatgg

SEQ ID NO: 142 - DNA, 725 bp, Zea mays
  misc_feature (707)..(709): n is a, c, g, or t
cctaaacggaatctaaagcaattttgttgtattcttgaacgctaactaacgttactgcgatccattcttcttcattctcagaaagctaactagtgtgattctagagggaacgccggtgccctgcctcttcttgatggtggttgccttccaaggcctcccatcttctctcacactgctggtggttgtcgagctcacgttgtagaactgcatacagacgaagccatgatcagcactgcagcttttcttaagcgggaaaccatggtctcccagatgaagctgttggattttcttcggcttggcagcatactcacctcacaaacaccgtggagcagtagtctctgaaatgggtcctgaacattcagcacaagagcatcgtctttgtcactagcgtcttcaatgaaggccctaacgcgttcctgcaaacatgaaaaaggcagaagcaaggtgacgtgaggaactgagaagctggatgagaagctggtacaagtggcataaatgaaattaagaagatcgtacttctaataagagggaaagaaaactcgatgtagtgccaataaattatctacatgttcttagatagtagatacatacatacatacagatacataatcaaagaactctgatgtcttctttacaagaaaaactaattagccatgatccattataatcatttcggtaaatagaggtcaaaacttgaggaaagaagnnngtctcaaaaaaaaaaa

SEQ ID NO: 143 - DNA, 774 bp, Zea mays
  misc_feature (120)..(120): n is a, c, g, or t
  misc_feature (700)..(701): n is a, c, g, or t
  misc_feature (740)..(746): n is a, c, g, or t
  misc_feature (751)..(763): n is a, c, g, or t
gcatattgaagatgctaccactgaattgacaccgcaggattctatttcaaagcattgcgttgagcgacaatgctattgttgctcaaagcctattgacatacctagatggaggtacagtanatgtgaagttttcttttttacgatctgaaatgctagtctttgtatgctattttttttcttttctgtaaacagtggaacctttaagatagatggaaaggaacacatatcactggctggacatttgtcatccaaatcttgtgagaaagtgtggaaattgtcatcattgccgaaggtggttcaagtgacaaaggttcctagaatggcagtgtggcctaagatatttaaagcatcagaacccagtggtgacaatattggcctatatttcttccctcctgaaatgaggtgacttgcttagcctttgtgtttctttccattacttgtactatcattttcttgtgtataaatgtctaatcattttatattcctccctaggcacgatgaagaactagatcaactagttaatgaagtcatggataaagatttgatcttgcgagctattattggtgaagctgagatgctgatattcccgtctgttctactacctgaaagatatcagagtatgatctttcttttgtttgtaaaaatatggcctcttttggactacataacatatctagtaattttctattacgccgatcannttgaagcggaactaattgttagattattgtatgctggtnnnnnnnggagnnnnnnnnnnnnnagtatggcagc

SEQ ID NO: 144 - DNA, 503 bp, Zea mays
gcgggagagacgagcttctacaggtaacgaagatcgattactgtttacatggcccttgatttttacccttaaagcgtcttctggcttaaagcctttgacgatcacagtgcaatgacatgggggcagttctggaacatgcagatcatggactactcctccctcccccatttctgcagacaggagggctcgggctcatccaaacattcgtcaggcgacgccgataactgcttctctctcgaccacccgttccaccaggagctctacagcttcatccaggagcaggcgctgaaccaggagctcatcaagcagggctccttgcacgtgaaaatccccgagcaggaccctgaggacgcaaagatcgtggaggtcatcgaggccgagttccacaagcttggcgtgcagaacgggtccgccaatggcatcgaccaagcatagcacctttgtctaataaggccagcctgattcaaccgagacgttgcttgccacttctgatgcaactaatc

SEQ ID NO: 145 - DNA, 718 bp, Zea mays
  misc_feature (51)..(51): n is a, c, g, or t
  misc_feature (53)..(53): n is a, c, g, or t
tgacgtccgggcatacattgccgctatagagatcttgcaggtatacgttcntntaatcatgttcatccatcacttactactagctactatttcaattccgccttcagtaaatataatgcacgtaactaaaaccacacaaaaaggttccatttttctttctttttccccttccttgggaaacgatcgaggcaagatttcttctctgactctcctcctctcatgtcgtctcctgcagaactactacccggagcggctcggcaaggcgctgatgatccacgtgccctacatcttcatgaaggcgtggaagatgatctaccccttcatcgacaccaacaccagggacaaggtgagcgtactgtactgtgtacccccgtctcggtcgatggtctccgaatcccagcggtcactactgccgttttcattttggggaacaatgagaaagtagctagtagcgtaggttgctggcttcttcatagtccatccatctcctctcgatcgtctcctcactaaccaccgttttgcgcgacgatgcgattcgcatgcgcagttcgtgttcgtggaggacaagagcctgcaggagacgctgcggcgggagatcgacgaggggcagctcccagagttcctcggcggcaagatggacgtgatcccactcaaggactatggcgtgcagcagcagcctcaggccgtgtaatgccatgcgtatatacagcatacacga

SEQ ID NO: 146 - DNA, 764 bp, Zea mays
  misc_feature (724)..(726): n is a, c, g, or t
ctacaaaacaagtaataagttctctcttctaaaatgccgcccttgctattcttttctagtttcggaaaattttcaggtctcccgagcttcctgaactcaggattcacctgtatgctatttcgaaatttcagaatacttcatcccatgaagggcagatacggttcctagtatatactttggagaatgcaatcttcagcctgcctgaaggccaagaaaaaatggtatggctgattgatttcacaggatggacagtgtctcatgcttcgccaataaagacttgtagagaaactgcaaatatactgcaaaatcattttcctgaaaggctggccattggatttctatttaatccccccaaagtatttgaagctttttataagttaagtgctctcgacctttgcgcatctatctgattttaattttaaaaaaactgagaaaccaacatgtagtgttgatacagacaaaaacattgcattttccattctttaccaacttaagtttttcaaattctttcaggtcatcaagattttcctcgatccaaaatcagtcgagaaggtgaacttcgtgtaccagaaggatgaggagagcatgaaggtcatgtacaaatacatcgatccggaagtccttcctgtagagtttggggggaagagcaatgtggtgtacaaccacgaggagtactccgagttaatgagacaagatgacatcaaaacagcaagcttttgggcannngatgcgaaaactaaccatgctaaccctgccatcaatgg

SEQ ID NO: 147 - DNA, 667 bp, Zea mays
gctcctcgcgcaggctctccagtccctcgtcaaacaggtcccttctcttaatttctcttgtgcatgcatgcaagtgcaacatcatgtcagcttgcttcttgatgcattgcattgcgtttgcgttgcattgcatgcatatgtatggcatgcagggccgtgtgaagaaggataagctggactccttcaacctgccgttctacgcaccttcgatggacgaggtgagggacgtgatcacgcggagccaggcgttcgacatcacccacatccagctcttcgagtccaactgggatccacacgacgacgacgacgtggagatgaagatggaagaagacgtcgccgccgtccagagcggcgtcaacgtcgccaggtccatcagggccgtgatcgggcccctcatcgcccgccactttggcgagcacatactcgacgatctcttcgagctgcatgccaaaaatgtcgcagtgcacctgcagaaagtgaagaccaagtaccctgtcatcgtcgtttccctccaggcgaaatgagccgcgcgccaaataaaggaccaagctagctgatgaaaaatctggcgtcaagttagctattagtaccgctactactatatgcatgcagaataattagtcaaacaatcagaaaaataaagtgcctcagagactgttagtggcag

SEQ ID NO: 148 - DNA, 594 bp, Zea mays
  misc_feature (382)..(384): n is a, c, g, or t
  misc_feature (528)..(532): n is a, c, g, or t
  misc_feature (547)..(564): n is a, c, g, or t
  misc_feature (583)..(589): n is a, c, g, or t
acttgacgccagattttgcatcagctagcttggtcctttatttggcgcgcggctcatttcgcctggagggaaacgacgatgacagggtacttggtcttcactttctgcaggtgcactgcgacatttttggcatgcagctcgaagagatcgtcgagtatgtgctcgccaaagtggcgggcgatgaggggcccgatcacggccctgatggacctggcgacgttgacgccgctctggacggcggcgacgtcttcttccatcttcatctccacgtcgtcgtcgtcgtgtggatcccagttggactcgaagagctggatgtgggtgatgtcgaacgcctggctccgcgtgatcacgtccctcacctcgtccatcgaaggtgcgtagnnnggcaggttgaaggagtccagcttatccttcttcacacggccctgcatgccatacatatgcatgcaatgcaacgcaaacgcaatgcaatgcatcaagaagcaagctgacatgatgttgcacttgcatgcatgcacaagagaaatnnnnngaagggacctgtttnnnnnnnnnnnnnnnnnnctgcgcgaggagcccccannnnnnnctgac

SEQ ID NO: 149 - DNA, 341 bp, Zea mays
atggaagaagacgtcgccgccgtccagagcggcgtcaacgtcgccaggtccatcagggccgtgatcgggcccctcatcgcccgccactttggcgagcacatactcgacgatctcttcgagctgcatgccaaaaatgtcgcagtgcacctgcagaaagtgaagaccaagtaccctgtcatcgtcgtttccctccaggcgaaatgagccgcgcgccaaataaaggaccaagctagctgatgcaaaatctggcgtcaagttagctattagtaccgctactattatatgcatgcagaataattagtcaaacaatcagaaaaataaagtgcctcagagactgttag

SEQ ID NO: 150 - DNA, 450 bp, Zea mays
  misc_feature (133)..(136): n is a, c, g, or t
  misc_feature (144)..(146): n is a, c, g, or t
  misc_feature (150)..(154): n is a, c, g, or t
  misc_feature (156)..(156): n is a, c, g, or t
  misc_feature (180)..(188): n is a, c, g, or t
  misc_feature (192)..(196): n is a, c, g, or t
  misc_feature (246)..(248): n is a, c, g, or t
  misc_feature (250)..(250): n is a, c, g, or t
  misc_feature (252)..(258): n is a, c, g, or t
  misc_feature (264)..(271): n is a, c, g, or t
  misc_feature (280)..(281): n is a, c, g, or t
  misc_feature (291)..(297): n is a, c, g, or t
  misc_feature (309)..(320): n is a, c, g, or t
  misc_feature (329)..(333): n is a, c, g, or t
  misc_feature (440)..(444): n is a, c, g, or t
cacgagttcctcatagcgtagcctgaggaagagggagaagtccttctgaaactgctgttgaaacaacttcaccatcgatggtgacatagtctttgtgatgtagatatctaggcatgatttttgggtgcccttnnnntgctctgnnncctnnnnntntatacatagagagagaaaaaaaannnnnnnnnacannnnncaactatatataggtttgtttcaaattaaaacactcaaaagcatggatcnnncnannnnnnnacaagnnnnnnnnggtaagacnngtgagtggtnnnnnnnatatctcttgcnnnnnnnnnnnnggaatgcannnnngagagcgccactgaaggcagaacagagagtggaaaagatgaacgctttcgctagggaagatcctagtgtagtaggagcccggcaatccggagatatagcaaggaggnnnnngtgcct

SEQ ID NO: 151 - DNA, 485 bp, Zea mays
  misc_feature (8)..(9): n is a, c, g, or t
ggcactanngcctccttgctatatctccggattgccgggctcctactacactaggatcttccctagcgaaagcgttcatcttttccactctctgttctgccttcagtggcgctctcaggtatgcattcccataaccgtaccgcaagagagatgcagttcaccactcacacatgtcttacctgtcagagcttgtctgttgcttgtccgatccttgcttttgagtcttttaatttgaaacaaacctatatatagctgctctttgtttgaccgtctttttctctctctctatgtatacatatacaggcaccagagcaactgaagggcacccaaaaatcatgcctagatatctacatcacaaagactatgtcaccatcgatggtgaagttgtttcaacagcagtttcagaaggacttctccctcttcctcaggctacgctatgaggaactcgtgtctggtggccaaatggttctaacatttattggaag

SEQ ID NO: 152 - DNA, 450 bp, Zea mays
atgatgccgggtatgatgccaccgatgacaatgatgccgatgccgagtatgatgccatcgatgatggtgccgactatgatgtcaccaataacgatagctagtatgatgccaccgatgatgatgccaaacatggtttcaccaatgatgatgccgagtatgatgtcttcgatgataatgccttcgatgatgacgccgaccatgatgtcaccaatgatgatgccgagtatgataccaccgatgatgatgccgagcatggtgtcatcaatgatgatgccaaacatgatgacagtgccacaatgttactctgattccatctcgcacattatacaacaacaacaattaccattcatgttgagccccacagccatggcgatcccacccatgttcttacagcagccctttgttggtgctgcattctagatataagcatttgtgttgtacccaataatg

SEQ ID NO: 153 - DNA, 480 bp, Zea mays
  misc_feature (472)..(477): n is a, c, g, or t
gccttcgacaaccacatggacgccaagcgcacgctccgggagatcaagctgctgaggcacctcgaccacgagaacgtatgtcagtcaaaacagagcatatctatataaaatagttgttggatgatctgacgccgattattgccgctgctccgatttggaccaacaattgaaacagatcatcggcatcagggacgtgatcccgccgcccgtcccgcaggcgttcaacgacgtgtacatcgggacggagctgatggacacggacctgcaccacatcatccggtccaaccaggagctctcggaggagcactcccagtacttcctgtaccagatcctccgcgggctcaagtacatccactccgccaacgtgatccaccgtgacctcaagcccagcaacctgctggtgaacgccaactgcgacctcaagatctgcgacttcgggctggcgcgcccgtcctccgagagcgacatgatnnnnnnagt

SEQ ID NO: 154 - DNA, 1203 bp, Zea mays
  misc_feature (197)..(199): n is a, c, g, or t
  misc_feature (1007)..(1008): n is a, c, g, or t
atatcatattaccgtattattcttcggcatcattgttgcttcatgatagtagtgagctagtagatattggatacatcaattcactcactccaagccatctacccaccatcttcactcatattaagacctgctcgtttatgtattattcacatgcagtacagtaatggttgaagtgttgaaaggctggtattgatcgnnngaactcagtgacaggcagaaatcatcccattagggatctcaacttttgtgttttaagaaaagatgaaatagagttgggcaatattttagcctgggcaatgagtctgctgcgtctattcattttcaaattgttacttcgctggctccaaattatacactacaaatatgtatgtaatggttttgtgtggtcttaaagagcaaacatcatatgagttatcacgattgaatgtaaaaataataataaacataatataaccccatagatacttgctgttttccgtataccagctgtcatgtaaatctagccatgcataagaaattcttcatattaatccaagtccaaggctcagtagagaatttaatattttttttaaaaaaaaatattgtgcactttgtttcatgtttaatttctcaccctatttctttcatgcagctcattggaacaccgaatgaggctgatcttgattttgtaaatgaaaatgcaagaagatatatccgccaacttccctgtcatgctagacagtccttccctgaaaaatttccacatgtacaacctttagcaattgacctagtggaaaagatgctaacttttgatcctagacagagaataactggtaacacttttgaaggcttgtccatcttttgtttctatatatatatttttgaagctttctttatttcaaaatgttgtttttgccataaatagtcaccattccacttcgaaaatagcaagtgcacttatggcatcttttgtcagatcgtgtttcaaatattggaaacacatgtcttttattagcacactattcttnntaatttgctgattgtgtcaccaaatttgaagttgttaaattctccctttttattcttatctccttttcatttaacagttgaaggcgcacttgcacacccttacttggcatcacttcatgacataagtgatgagccagtctgctcaatgcccttcagcttcgacttcgagcagcatgcattatctgaagaacagat

SEQ ID NO: 155 - DNA, 432 bp, Zea mays
  misc_feature (60)..(62): n is a, c, g, or t
  misc_feature (392)..(393): n is a, c, g, or t
cctcttgccttgatctgaggagatgcttcactaccaccctgaagttgctacagcaatacnnntgtcatgagagattccacagcccccaggacatcagcgggggctcacctcttctttttttgtctttgataaaaagtctactggtattagccgattattgcggcacctagctgttatagtacacttaatggctggttggaaccaattatggcctgaagttgctacagcaataagcatgtcatgagagattccacagcccccaggacatcagcgggggctcacctcttctttttttgtctttgataaaagcctactgcgagtagccgattattgcggcacctagctgttatagtacacttaatgtctgcttggaaccaattatggggcctagnngtggcagaacacttaatggctgcgtggaaacaataatgg

SEQ ID NO: 156 - DNA, 704 bp, Zea mays
tagccatttacatcctgggtagaccatacgttactcagtcaatattggttttatgatcttctcgctgcaaacagattttggagtaccatccccagatgcttcaggagtacatcgaaggtggagatcagattcacttcctatacccaaggtgcagatttgcactattgatttctcctgtttagttcagtgcagaagtacatctaccataggcctctgcactttttatagcttgatgctcaatgcctcactgtcttttaatttcttgtctaatacctgaaacagtggcacttttcgctaacgctacaccattgcagtggggtcgatcgcttccagcgacagtttgctcatctcgaggagaactacaggagaggagtagcaagcaccccgccgcgaaggcagcccacatctctgccgaggcatatacacaacaccattgatcgttgcagttacagggtagcgtaagttttgaattttttttcttgtactggcttaatgtggttctgtaactgtgacagagagcgagtctgctcatcagaagatggccacagtcaggactctgacagcgaagagcaaagagcagcatcctacgttgcccgaacaaccataagccctccaagatcacaagaggagggcggcaagctccagcctgcctaccagagcgccgccgccgccgcagactcctgcgccaagagctatctgaaggg

SEQ ID NO: 157 - DNA, 412 bp, Zea mays
ccaaggactgacggaacggatcggatggattgggcgattggcatcgcaggagattctggatcagattgtcttcgagcgcacgccgcaatggtcaactgcgcagcgctggcttggctgctgcctccgttcactcttcgctgtcagagcgaaacagcggtaacagagcaagacacgaggggtctgcactctgcagttgtgcaggaggaggaacagacacagggagaggagggcgcgcggccggacatggcgtggaacagagatcgtcgtcaccgccggcgggggtgtggtcgacgacgcgacatgcgaaacactacgtgctagctagcataggaaaaaacaacatgaaatcgtacaaccaaccaatccctcgcactgttttagttgttagctgtaggcgaaactgttcatccaa

SEQ ID NO: 158 - DNA, 348 bp, Zea mays
gagagcccaagcaagcgatggcgcgtatcggcgcgagtcatgtactcctcgtcgtcttgctgctctctgcggtcctgagctccggctcggctcgggttcccagagaacgaccggacgcgatgctgccggccggtcagacggcggcaatggccgagatgaccgtgcccggcgaagggcagagcagtgggccggcgtttggagtggcggcgcacgagtccaagcgcctgagccccggaggccccgaccctcaacaccattaggtgatggtagtaaccgtgatgagttattagctcgtgtgctgcatgcctctggaagacggtttcttatgtatcgtacgtcgcctcgtcg

SEQ ID NO: 159 - DNA, 337 bp, Zea mays
tgagagacgaagttgtcattgccaggggccctgaagggaacacgacctctgcctcagcctctgcctggtcggaggaggcgccggggataccgtacgacaggtcgaagaggctcagccccggtggtcccaacccgcagcatcactaatcgtcgtccgatcttgttggcaagtgccactgcggacatcttgctacgggaatctgtggttgattactacactttggttctgatcagcttttcttttctgtcctttctgatcagcttttcttttctgtcaaggccgtgtgatcaaggagtaaacgtaacaaattatcgccacgatttttctgaatgtatcc

SEQ ID NO: 160 - DNA, 357 bp, Zea mays
cgaagagttgcagaactgggtgcgttagccgtgagcgacagcggcggcggtggcggtggctcgccgccgggcaaaggctgctgcttgcccaaccagtcatcttcttcagcgtcagggcgacacctcggtgacgattgttgcaagcaaatgcgtattgtgtccaagaggctggtgccccaggggccaaaccctctgcacaactgaccagctccgggctccaggtctgcacttgcatgcatcgagagataggcagaggctttttcctttttgtaacgcagccatgcagagtgattagtggagctgcaggtcttcctcttccatgaggtcatgtaaattataggcctacagcttagtttg

SEQ ID NO: 161 - DNA, 456 bp, Zea mays
attctgtccttgtttgtttgtgctcttgttgcttcaacatctgtcaatgctaatgtgtggcagactgatgaggatgctttttatagtacaaataaactgggagtcaatggcaacatggagatggcacaacaacaaggtggatttattggccatcgcccaagacttgcattattcaatagggcatcaaaacaactggaccgtgaaaaaagacctgtgcctagcgggccagaccccatacatcacagcatcccatcacatgctcctcagcatccaccatcatatggcaaagctccttatgaagatgacaagagcatagcatctcctggtctgtccaacccgataggtcctccaccatttttagatagatactagttcatgcaaaagtagtgagtatttatgcacctatgccaatgaataacctctaattacctacatgtattggcctggtgtttggta

SEQ ID NO: 162 - DNA, 559 bp, Zea mays
acaactgctgtgttccagaacaagcacatcctgttggacttcattcacatgatttgcatagattatgagatgaccatagacaaaccactagcatgggttgatgataatggcaaacgcttctttccagatttatctgctgggctctacacatctaaaccatctcagcatgagaatggtgaagctgatgagtgtgatggaacgcctacaagtgtagctgaaagttctagttcggtatctgttggtgaagtagtttctcatggtaagaggatcaatgatattgcagaggacaacatgagagcacataacatattgtatgaagctgttggtgaaaatatttcaggtccttcattccatttgaatgaatattctagtggaaccatacaagctactggcaagccaaacgattgtcgacgtattgattcagctgtgcggaatttgttgctcaaaggattaggtcagccgtttagtgaggaagatattattggtatctatagaacaccactgctagatcagcgagggcaagttcgttgtggtctcttccagaaggagatcgaagaga

SEQ ID NO: 163 - DNA, 384 bp, Zea mays
gaggaggtggccgtcgagcagctgccgtcctaggcaggcgcacaccggcgtcctcgctttcttgtccgtccggccgcccatttgattttcggagttgcatctatctcatctaatatggatcatccatccatccatccatctatagcagtattatgtatgcatccacatggtaataatctggctgaccgcatccgcatatggtcgtctcatcgtccatctataccttgaaagctactaattaattactgagttattattactactgtttttactactactactacgtactactaatattactacaactacctcatctagctagctggtgtattaattgattttgtttgttactgctgtactactgttgttgtggagatgaaccat

SEQ ID NO: 164 - DNA, 707 bp, Zea mays
ccattctttcgacgaggctgaagcagctgaaaatgcaaaggtaacttgtcacttagaccaggctgatgctatcaggaggttatgattttgtgttggtaagcagcaacacttggttccttctgacattagcagtgtgggtgcagtctgcagacattgaccggaggattttgcaagaaacaaaagccgaacaacacatccacaagctcttacttctcggtaatgccaacttacttgaacttaagagcttttttttcttcttcatgtgaagtatatctgttctgtagttttctctcttgatagtttgctggatcagccaaaagaactgttgcgaagttgatccctagtcacttctctttccatgcattctagacttgataatgtgcctgtccattgataaggtactttgcctgtattcctaacagtcatcctccttttcaatcacttctttataaggtgctggagaatcggggaagtctacaatatttaaacaagtaaggtttatgccactccctggagaatcataattcttatgtcatcatcaagacagcaagtcacggatgtgtcttaccgctcattcgcagataaagcttcttttccaaactggctttgacgaggcagagcttaggagctacacatcagtcatccatgctaatgtgtatcagacaattaaagtatgctatactaaaaagggtgtgtctttttttttc

SEQ ID NO: 165 - DNA, 683 bp, Zea mays
  misc_feature (641)..(678): n is a, c, g, or t
gggtgggtctcctgcgtcaggttctccccaaacacatttcagcccaccattgtctccggttcctgggaccgcaccgtcaaggtctggaaccttacgaactgcaagctgcgctgcactctcgatggtcatggcggatatgttaacgccgtcgccgtgagccccgatggatcgctctgcgcctccggcgggaaggacggtgttactctgctgtgggatttggctgaggggaagaggctgtactcgctggatgcgggctccatcatccactccctctgcttctcgcccaaccgctactggctctgcgctgcgacccaggactctgttaagatctgggaccttgagtcgaagcacgtcgtgcaggacctcaagcctgacatccagatctccaagaaccaggtttgtacccaaccttacctggcttaacatgcatgttaccttttcggaaaaccctaaaggttagggtcagtaattgtatatgtttttgtcccgatgccttcctttttcctgttaatgtcgctgcagaaatgacaatgtgcttaatctttagtgttaggccgtgcgcttatatgtactgtagagtctactgtttatagagtgaattttgaaatggggagtgggataggaaggctgctggaaacagnnnnnnnnnnnnnnnnnnnnnnnnnnnnnnnnnnnnnntttgc

SEQ ID NO: 166 - DNA, 504 bp, Zea mays
agcagattttgagcgtgtagcgttgtgttttccacatcatcatcatcacgtgctgtttcttctcgttgttgatgtatggttgtccttgtgaacgaaacagagtggtcacgagtacggaagggaagcctgacccgcttcttcctgtgtaagtgctgttcctcttcttgttttcaaccaccactgccattaccataccctgcagaatccttacagtaccggtggtctctcggtcttgtttttacagcaccagtggcccggagaactcgtcttgggacaggtggttccagcgggtgcgctcccgcagcaacaaatggtgggcatcgaaaggccctgacttctcgtagctcctgcaaacaaagcggagaccatcctcaccagtcgtgtgcagattagaatgaaacacgttgagatgtatcgtccattggtgtcctggggaaacagaacaggcggcggcggcggcgagtgcggtgtggctctcgcaacgcctgatagtttttttttttt

SEQ ID NO: 167 - DNA, 773 bp, Zea mays
  misc_feature (697)..(697): n is a, c, g, or t
  misc_feature (700)..(705): n is a, c, g, or t
tatttcttacgagctgaatgttctgggctccaggtatggtcattgactgtcttggtgcgacaaattacatctggacttttattttggtaaacataattagctaccctttactaggaataagctctttatatgtgaatcttgggtccaaagattttgatggtgataattgcaactgcattggtaggtcaatggtctcaccggttaaactgtttatatgtaacagtctatggagctgcttagcttttagtttgcattcatggttaaagaactatatagacatgttgccgcctttgataagcaaaactttaagatgtttctgttgggattagggttacggaggtcgtacgagtggtagatttagggtctagggttctaggaccaggaccccggcgcttgggcgctgtcgggctgttggtggagaaggtaaggaactgttcacgcgatgaaaaagtaacaacgattaacagtaacgcgtgatgaaaagtaacgggatagggaagcacagtcaagataattgtatcttgcccgctttcctctttctttaaccagagggtacaatatataggctgtgatagcaaccctaacaaactaatcaactctatctaggagttccaaactaatgcttatccatctaaacaaactaatttgatacttatccatctaaacaaactaactggaactagctgattttattagngcnnnnnntcataacagtttcactctacatggaaaatgtagatatacatatgaatggacaacatgactaactgtct

SEQ ID NO: 168 - DNA, 1211 bp, Zea mays
  misc_feature (678)..(679): n is a, c, g, or t
  misc_feature (1181)..(1184): n is a, c, g, or t
atttcttacgagctgaatgttctgggctccaggtatggtcattgactgtcttggtgcgacaaattacatctggacttttattttgataaacatagttagctaccctttactaggaataagctctttatatgtgaatcttggatccaaagattttgatggtgataattgcaactgcattggtaggtcaatggtctcaccggttaaactgtttatatgtaacagtctatggagctgcttagcttttagtttgcattcatggttaaagaactatatagacatgttgccgcctttgataagcaaaactttaagatgtttctgttgggattagggttacggaggtcgtacgagtggtagatttagggtctagggttctaggaccaggaccccggtgcttgggcgctgtcgggctgttggtggagaaggtaaggaactgttcacgcgatgaaaaagtaacaacgattaacagtaacgcgtgatgaaaagtaacgggatagggaagcacaggcaagataattgtatcttgcccgcttgcctctttctttaaccagagggtacaatatataggctgtgatagcaaccctaaccaactaatcaactctatctaggagttccaaactaatgcttatccatctaaacaaactaatttgatacttatccatctaaacaaactaactgganntagctgattttattagggctgttggtcataacagtttcactctacatggaaaatgtagatatacatatgaatggacaacatgactaactgtcttgttgcttgcttgttgcagaggtccaagaaggatgaactgtgttatggattccatccctgcatcagctgttaaggaaggagggaaaactcctacacagactgaatttccacttagcagccttgactctttcccatcatttccattcttcagatctaaatcagctcggatagacagttcaacgtcgcaatcatccagtcagagggaagataggttggtgcttaagaacaagtctcctaggtggcacgaacagctgcagtgttggtgcctgaatttccgtgggcgggtcactgttgcctcggttaaaaacttccagttggtggcttctgaggacaatggaccagagaaccaagagagtgacaaggtgattctccaattcggaaagatcggaaaagacttgttcaccatggnnnncggttatccaatatcggcatttcaagc

SEQ ID NO: 169 - DNA, 594 bp, Zea mays
tatatcacgatcaagtgatggctgtgttggaaaaatgaggtggagtatcttacctgactacactatttctgtctaacctcaaatgatttttgagctgttttctgtttggacctgacattgtaatggcaacaggtcaaattttcttggcactaaattcatcgtgcatgacactcgagcaccacacaatgctgggagccttgtctcctgtgagcgcggcagccgcagaatctcctctaggagggtttcccccaaggtacccactgccagctaccccattgcccgggtgaactatgagctaaacctgcttggcacaagggggcccaggcgtatgaattgcacgatgcattccatcccagcctcaacgctggaccctcaaggcatggtgcctgagcctggccaacccaagcagctcttcatccctggctcgtcgtccttcgaagaatcctttcgcagtgcaaacaacaccccttccagctcaaggttctcggtcgcagaccgctccttggactggagctcctctcgattctcagagacgagcggattggctcagcaggacgacaatgacagtgaccaggctaagaagaggcctttggt

SEQ ID NO: 170 - DNA, 487 bp, Zea mays
agctccgacacgctcgccctgggctccagcgccgtcaggagcttccagttcgggtgcagcaacgtggagtcgggcttcaacgaccagaccgacgggctcatggggctcggcggcggcgcgcagtcgctggtgtcacagacggcggggacgctcggcagggccttctcgtactgcctcccgccgacgccgagctcctccgggttcctcacgctcggcgctgctggcggtagcggaacctcgggcttcgtcaagacgccgatgctcaggagcagccaggtccccacgttctacggcgtgcgcctccaggccatccgggtgggcgggaggcagctcagcatacccgcctcggtcttctccgctgggacggtcatggactcgggcacggtcatcacgcggctgccgccgaccgcctactcggcgctgtcgtcggcgttcaaggccgggatgaagcagtacccgccggcgcagccgagcggcatcctcgaca

SEQ ID NO: 171 - DNA, 436 bp, Zea mays
atgcctagtcattgttagcttctctcccgtctttgctactgcgaaaatgggttattcgatctcaaaatacattcgttcttcggctgttcaggcaggggagaaggtgatgagcacggccgtgggggccaaggacacggttgtcagcacggccgtgggggccaaggacacggttgtcagcaccgccgtgggagccaaggacgcgatgatgaactcgctcggcatggccggcgaggacaaggacggcaccaccaccaccgacgccggcaaggacaccagcacccgcaagcctggcactggcagggactattagaggacacggcagccaaacttctcagtgtttctgttccagaagtttctgatcccatcatttaggttcaaaagtttctcatttcatttcaaactttcagtgtttggtgcatgctgtaaactctcttca

SEQ ID NO: 172 - DNA, 863 bp, Zea mays
  misc_feature (773)..(780): n is a, c, g, or t
  misc_feature (791)..(798): n is a, c, g, or t
  misc_feature (802)..(805): n is a, c, g, or t
  misc_feature (818)..(827): n is a, c, g, or t
  misc_feature (834)..(854): n is a, c, g, or t
ggtgagcatcatgtattatttcactaaagattaatgacattcctcagagcagaacggccatcaattcaccgccttgacatgagttgcagaatgtttctgggtgaaaatttagaagaatgctccattgaagaactgcataatctggaggttaaactggcgaagagccttcacgtcatcagagggaagaaggtaagtaaatgccacagttgtcacataaaccctagtacgtctctaaaatttctgcgtattacgataacaaagaaactgttcgcccaagttgatatgcacgtcctaccttttgttttcacagacacaactgctggagcagcagatatccaagctgaaggagaaggtaagataacgcatagagcccagaccccagagtatcctgaaactcttagtgaccaattcctgacctctgctgttccttgtacaacttgcaggagaggaccctgctccaagacaacaaagagttgcgggataaggtaaatcaaacgaacacaacattgaaaaccgcagagaaggcatgtagggttttttttaataacattgcaaactgtaaattaaactcttaacgttaacatgatatgcgcaagaaagacagtctcacagccatcatgtgtggttttctaaaacttaacgtgctgcctgttctgttcttgtggcttcagcagcgcaacctccagtctccaccggaggcgccaccggacctgaaccgctgtgtccctccttggccgcgtagcctgccggcaccgagcaatgacatggacgtnnnnnnnnagctgtacatnnnnnnnnccgnnnnggagcgctcctcnnnnnnnnnntctgatnnnnnnnnnnnnnnnnnnnnngatcggcta

SEQ ID NO: 173 - DNA, 1094 bp, Zea mays
  misc_feature (98)..(100): n is a, c, g, or t
  misc_feature (161)..(163): n is a, c, g, or t
  misc_feature (348)..(349): n is a, c, g, or t
  misc_feature (391)..(394): n is a, c, g, or t
  misc_feature (632)..(635): n is a, c, g, or t
  misc_feature (658)..(658): n is a, c, g, or t
  misc_feature (660)..(660): n is a, c, g, or t
  misc_feature (670)..(671): n is a, c, g, or t
  misc_feature (680)..(705): n is a, c, g, or t
  misc_feature (715)..(760): n is a, c, g, or t
  misc_feature (766)..(777): n is a, c, g, or t
  misc_feature (781)..(1089): n is a, c, g, or t
ccgcttcctgatcctgccttccttgctgtgagtactgcatcaaataaattgagatggtcagatgaatgaatcagttgtcttactcgactgctgacctnnngactgagaatctgtggtgctgcttcaatggctatttgcaggtcaggccgtgtgtatgtcgnnnacacagcgacaaacccaagggcgccatccttgcataaggtggttgagtctgaggacattgctgagaatactgggcttgggttccctcacacgtctcattgccttgcgtctggcgacattatgatttcttgccttggggacaaggaggggaatgcagctggcaatggcttcctgctgttggattcnnagtttaatgtcaaaggacggtaagttcttaccgtttaggccnnnnccatcggtgttgaagtgtaagtgtaacatgttactatgcccaattacagagcatagcctgttaccattgaatcacatcatgctgttatacactctgtgccatgtcacagtaacataagagcacacgatccagacttgtatgatgggtgtgattcatgtaatgtgctctgaaatagctgcagatatacgacaaaattgcttgacatgtgaaaaacggacagattcattatgctgatctnnnngtctttattacttattaagtttntnctacatgcanntgggaaaannnnnnnnnnnnnnnnnnnnnnnnnnatgacttctnnnnnnnnnnnnnnnnnnnnnnnnnnnnnnnnnnnnnnnnnnnnnnccctgnnnnnnnnnnnncagnnnnnnnnnnnnnnnnnnnnnnnnnnnnnnnnnnnnnnnnnnnnnnnnnnnnnnnnnnnnnnnnnnnnnnnnnnnnnnnnnnnnnnnnnnnnnnnnnnnnnnnnnnnnnnnnnnnnnnnnnnnnnnnnnnnnnnnnnnnnnnnnnnnnnnnnnnnnnnnnnnnnnnnnnnnnnnnnnnnnnnnnnnnnnnnnnnnnnnnnnnnnnnnnnnnnnnnnnnnnnnnnnnnnnnnnnnnnnnnnnnnnnnnnnnnnnnnnnnnnnnnnnnnnnnnnnnnnnnnnnnnnnnnnnnnnnnnnnnnnnnnnnnnnnaaaaa

SEQ ID NO: 174 - DNA, 779 bp, Zea mays
  misc_feature (279)..(282): n is a, c, g, or t
  misc_feature (673)..(677): n is a, c, g, or t
  misc_feature (750)..(756): n is a, c, g, or t
gccgcgctcaccaggatcatcgtcggggtcgtcgaggcctgccactcgctcggggtcatgcaccgggacctcaagcccgagaacttcctgctcgccaacaaggacgatgacctctcgctcaaggccatcgatttcggactctctgtcttcttcaagcctggtaagctgctgctgctgcagaatcgcaaacttctgcccgttgttcctttgcgacatactagtactactgtttttagtcaacggctgaaatttgtgcactgcatgtgttactactaatcnnnncagtagtagctcgtacagttgtgcttgcctagttgcgttagctctgctttatccatgttcgttgtcgtaggacatgaaatggatgattgcagctgaaattctctaacagcatcttctttggagtcaactcaaattttgctacagaaaagggttgaaagctaactttgcaatagtgtggtcttaccggaaataaatgcagctagctacttgcaattgcaatagtgtggcaattggcaaacactaattaatactgtaagtttagtctcctaacctgctaggcagcagggagcatttattagctgagtggcagttggatgattggatatgatggaagctgcgggtgtgtttgttttcccctcctaaattatataaattaaattatggtgcaagnnnnnagaataaaatatcactttgttactataaataagttgaaataagctagcattaagtagcttatttataatctcnnnnnnntatctgatattttactcttatat

SEQ ID NO: 175 - DNA, 835 bp, Zea mays
  misc_feature (252)..(252): n is a, c, g, or t
  misc_feature (313)..(313): n is a, c, g, or t
  misc_feature (794)..(798): n is a, c, g, or t
  misc_feature (825)..(831): n is a, c, g, or t
agtgctctacattattactcttgcgcattaaactcatgatggatggatgtgagccaagcatacactgatgctaaaattgaagattgtaaacctcaactgggtctagaatgatgttatacgtgataggctaggggtagcaccaattgaagaaaagcttgtccaacttgagatagtttggacatgtccaacagagatcgccagaggcgtcagtgcatagtgggaagtgggaacctaagacgcgatagcaatganaaaatagtaagaccgaagttgacatgagaagagatagtaagatgagacttgaaaggataanatatacctaaagatttagcattgaataggagtgcatggaaaacaactatttatgtgtcccttggttacatatcccttttagtgatgttcctcagttatgtaattgtgtaggtgatatgttcactgaggaacaaaatgagctcgtagaatcagctgcagagatgctttatggtctgatacatgcacgatacattctgaccagtaaaggactggctgcaatggtaattgttcttctctaaccggtgtactgacactttgatgtagttttatttattaaggctgctttcttgtacagctggagaagtataagaactatgactttgggcggtgcccgcgtgtttactgctgtggtcaaccatgcctgccagttggacaatcagacatccatcgatctagtaccgtgaagatatactgccccaagtgtgaagacatctactacccacggtccaagtaccaaggcagtatcctaaccatactcttannnnnctgtcttaatgcgtatatgtttcaaannnnnnnctct

SEQ ID NO: 176 - DNA, 536 bp, Zea mays
  misc_feature (321)..(321): n is a, c, g, or t
ttcttcccccgtacctctcaccagcggtgtcttcggtatgtgaaaacccaattcttcaaccctacaggatccaacaggcaatcgcagctggcatcttacctttatcacccttgttcctccaacaatcatcagccctattacagcagttacctttggtgcatttattggcacaaaacatcagggcacaacaactacaacaacttgtgctagcaaaccttgctgcctactctcagcaacagcagtttcttccattcaaccaactagctgcattgaactctgcttcttatttgcaacaacaacaactaccattcagccagctanctgctgcctacccccagcaatttcttccattcaaccaactggcagcattgaactctcctgcttatttacagcagcaacaactactaccattcagccagctagctggtgtgagccctgctaccttcttgacacaaccacagttgttgccgttctaccagcacgctgcgcctaacgctggcaccctcttacaactgcaacaattgctgccattcaac

SEQ ID NO: 177 - DNA, 617 bp, Zea mays
tcccactattgctgaaggcgatgagtctgtatttgtcaactccaattcaaacagctcgatggtgcctcctgtcctggagaacaatgctgttgatctcactgatgggctgacagatttggaatcctatatgaggtttcttatggatggcggtgcaagtgattcaattgatagccttctgaaccttgatggatcacaggatcttggtagcaatatggacctctggaccttcgatgacatgcccatcgctggcgatttcttctgaggaatttgaagcttggccataggactatgtacatagggactagggtaagcatcggcgtctgcaaatttctctgaagttacattccattttcacctgggctaatattttttttgttccatgtttcaggaataaagactgggagattgggaagcacctgcttggcaccttggggtagcatatgctcgtgtctagctcagatgcagaagtcgcattctgaaactctttggttatcgacctgttccctattttaactatctctgtatgagagccatttatgagactgaaccattttaccattttgttttcccccttctttcgttgttacagtatatggtttaacattatgatttatgga

SEQ ID NO: 178 - DNA, 499 bp, Zea mays
  misc_feature (492)..(494): n is a, c, g, or t
ccttagatctgaaatcggccggctaacagagagctcagagaagctcagactagagaattcagctctaatggtaatgaactttttccaatgcctctgtatactacattcaggcgatgtcatgtcaatctgcctttcctctgacgcgaggtgcactgtcacttatcaggtgaagctgaaggacaccgcagaaccgtctccgattaaagcatccgcatccccgtcctctccccgtgcctccgcggagaacttcctttccatgatcgacagcgccaacgcgccgagcgtcagcaggcacacggagcacggcggtcccaggctccggcagctcctggactccagtccggcgacagacgtcgccgccgtaagctgatgatgaagccggtccggcaaatacgccacagcacatgcatgtgtcctggggattccgcaggctcatgctgctcgagtgctcgccgtaaacgtcagcgttacggactcggactctgtactccnnnttagg

SEQ ID NO: 179 - DNA, 811 bp, Zea mays
  misc_feature (131)..(131): n is a, c, g, or t
  misc_feature (140)..(140): n is a, c, g, or t
  misc_feature (152)..(152): n is a, c, g, or t
  misc_feature (355)..(355): n is a, c, g, or t
  misc_feature (364)..(364): n is a, c, g, or t
  misc_feature (583)..(584): n is a, c, g, or t
  misc_feature (596)..(600): n is a, c, g, or t
  misc_feature (608)..(615): n is a, c, g, or t
  misc_feature (648)..(650): n is a, c, g, or t
  misc_feature (751)..(757): n is a, c, g, or t
  misc_feature (767)..(786): n is a, c, g, or t
  misc_feature (797)..(805): n is a, c, g, or t
tcgtctctttttttttgctatatacttatttctggatgcgactgttgattcgatctatttttggttgcctttttatacagggaggaatttcgcaaggagttcaaggagaagaaccctaagaacaagtctgncgctgcggnaagaaccctganagctgctttatgaccggccccatattattactatctactttgacttttcccttaatgacgacttattatttgatttactcgtcacgattcccctctcctggtcgaacttttcaggtggggaaagctgctggcgacagggggaaatccctgagcgagtcggtaagctccatcttctgtactaaagtagtagttgattggactanaaatctcgngctgattaattgttttacgcgtgcgtttgtgtggattgtaggacaaggctccctatgtagccaaggctaacaagctcaagctcgagtacaacaaggccatcgctgcctacaacaagggcgaggtagggaaactgatgcttcaattgcgttgttacttaatgtgtatataaactgctcctgctggtcatttattcaaatacgtatgcttactgaaccatnngttgtttgttcnnnnnactgcagnnnnnnnngctcctgccaaggaggaagaggaggaagatgannnggagtctgacaagtccaagtcggaggtcaatgacgaggatgatgaagagggtagtgaggaggtatacaaaatctattcctgtcttctccatattttttccnnnnnnnaaataccaannnnnnnnnnnnnnnnnnnntgctcatgcannnnnnnnnttgcta

SEQ ID NO: 180 - DNA, 707 bp, Zea mays
ctctttcttcaggtgaccttggaagcaacacctctgtgatacagctaaaatgcaagcacacaaaggcgcttttctcatttgtcatttgttccaggtgcttaacatccccaccaagattaacaagggtaccgtggaaattatcacccctgtggagctgatcaagaagggtgaaaaggtgggctcgtccgagtctgccctgctcgccaagctgggtatccgccccttctcgtacggcctccaggtcaccagtgtctacgaggatgggtccgtgttcagccctgaggtgctcgacctttctgaggaggacctgattgagaagtttgccactggtgtctccatggttgcctccctgtcactggcgatctcgtacccgacccttgctgctgtgccccacatgttcatcaatgggtacaagaatgtgcttgctgttgctgtcgagacagactactcatacccacatgctgacaagatcaaggagtacctcaaggtaaaacgtgctttcttgggttatggaagttgttaagcaactcaaggccttgcataattctggtttaatttgattacagtccatatctatgaatgtgtcttgttggcatttaaactaccatgcatacctatgcttctttgtccatatcatatgtactgtatcatcagatcacgatgtagctagtttatgtcttggaaccatgtgtttttaactattctga

SEQ ID NO: 181 - DNA, 503 bp, Zea mays
ggggtccccgcaagaatggactgatcaagcagttcttaaaggatgtcgattggggggagattgactatcttgttgtggacgctcctccaggaacatctgatgagcacatctcgatcgtgcaataccttcaagccacaggaatcgatggcgcgataatcgtcacgactccgcagcaggtctctctgattgatgtgaggaaggagataaacttctgcaagaaggtcggcgttcctgtcctaggtgttgtggagaacatgagtggcctgaggcagccgctttcagacctcagattcatcaagtcagatgaggcgggcaagacagatgcgacagaatgggccctgaactacatcaaggagaaagcccctgagcttctgtcggtcatggcctgcagtgaggtatttgatagcagcaagggaggcgccgagaagatgtgccatgaaatgggggttcctttccttggtaaggtgcccatggatccgcagctgtgcaaggcggctgaggaa

SEQ ID NO: 182 - DNA, 744 bp, Zea mays
  misc_feature (667)..(667): n is a, c, g, or t
  misc_feature (682)..(682): n is a, c, g, or t
  misc_feature (684)..(684): n is a, c, g, or t
  misc_feature (700)..(724): n is a, c, g, or t
tggttctgatcttaagccatctcaagtgatgaatgagccaagggtccacgtcggtgggcgtgacatgaggactctttacacacttgtaagtgtgtgattgtcatcgcatttttattggttaattcttgtttcttgtgatgataatttgtagattagttcttgttttctccttttattttgctcaggattcatatctgggccatatatctatatatactatcagttgacctagtttagggtatatctttaagcatcttctacatccgtgatgataataatagatccatgaaaagcaaagaatatgttttttttgaactctcaagcccttttgtatgcctttaggctgataagacgaactggcctatcatattttctagaaggtgcaattttggatcatataacgactaaggatcgttgtttagtaaggttaaatccatatatattgttgtctgggtgtctttatgtgatgtcgttcacacatacactcataatgtaacaattaatccaaataaaatgcattagtgcatgaaatgagaatatatatgtcaattggagacctgattacttagtatgtatctagatttgctaaactatagttaatgtctgtcaacctatctatttatcctgttactaggtcatggtggacccagatgcaccaagccccagnaaccctacaaaaagngngaaccttcactggtannnnnnnnnnnnnnnnnnnnnnnnnaatccactggcgctttccat

SEQ ID NO: 183 - DNA, 359 bp, Zea mays
  misc_feature (343)..(343): n is a, c, g, or t
ggcggtgtcggtgaacctagagttgagattggaggtgatgattttcgagtggcctataccctagtaagccatcacgtactccgcagatcgagtccatttggcgcgcggtaggccatatctatggccaagatgtctcgactactctccaaactctcatgtccaagtgacatccatggcttttggctcactgtgtgtgacggctaaatcagtctcctcgatcgtgcccatagctcggttgactacaaagattggctcatgctaataaatatatagtagtattatacactgagagagacactaacacccccccccccaaaaaaaaagggcagggatttctgatcancccacccccaaaaaaa

SEQ ID NO: 184 - DNA, 497 bp, Zea mays
ggccgctttgtcaagcgcgccgccggcacctcctcctcctcctcctcgggtgccggcacatcggacagcatcgacgctgctgccaagttctggctctccttctccgacgacgccagggacggcttcttcgtggacgccggggcctacggggtcgtgccaagcttctagaaagtttgtgccttgaaaatgaatggcatcacagcgggcagcgcttctgggcttctggcggtggcgttcgcccagtttgaagcaagttaagcaaccgcccttctcgtttgtgtcgtgtcgtctcgtcattcatgtgagcagcatccgtggtgaaattccgccatcgctatttttaaatgatggcgcggaatttcgatgggtcatcaccagttggtgaacgaactaggggatttattgtgtcttgtatcttgtaagatacaactttactgggttgtctatcaaattctgcgttggctcatcgtcatcgctttactggggctaacaatata

SEQ ID NO: 185 - DNA, 472 bp, Zea mays
tgccatttatttattttttaaaatcaatacggaagtgtaaatttttttgatggtttgttctgccgcgttaccttgtgaatggagggaaccaacgacttgagaacgaggaacatctcgttgagcttctcccggcgctttcgctctaacatgacgtggttcttggcgccgttttcctgggctgttaccgtcgtgcccccgccaccgcagttcgtgttcgcccaagcaccgccgccggccaccgctttcttcagcaatttctgcggctcttcgatgaccggcaccgccgccgcttcacccgagcaggagtgcgatgacctcgtccaaaccacgaaacttgtcgcgcgagaaccatcagcgggtgcgcttgagccatccaccgggagcgctgacgacgggacttcgaaattagacccgtccattatccaggcatcctctagcggctgcacgtccatttcctcgcagaggctgtaga

SEQ ID NO: 186 - DNA, 670 bp, Zea mays
  misc_feature (616)..(616): n is a, c, g, or t
  misc_feature (663)..(663): n is a, c, g, or t
  misc_feature (665)..(667): n is a, c, g, or t
ctgctcttcttttcagatcatggaaagagcaaattgtgacgtcttttagatcggtatatggtattccatgtatactcatacaatattattattagtataacctttaccgcagttttgacagtgcttctctttcgcaaggttccatttgttctggttagtactgaattaggaaatcctacgggagtggtacatataaatgtggataaggcggatcaaccgttgcctcttaccacagtgtttcataaacttatcccacttgagacgactccttacacattgtttcaaactattattggcaacggctatccggtaagttcttttggttgtggcattaagaacatatatttatctatgcaatattcagccatggggtatatctcttaagctgttatgttatttgtgctatagattgcgttgttggatgaagaaaaaatactaccgattggtaagaaaattacagcaataggactatgtcaagcaaaggatgcagaaagtgttgagataacatcgtgcccagagatcccctttttcttgtaagatgttatttggtgttacggtttcatattttttttcttttcttgctgatgccatacaccatttttttcctctatgaatntccttgtgaataagggagggagggcatgcattctcttggtgcgctantnnntaa

SEQ ID NO: 187 - DNA, 658 bp, Zea mays
tgctttcagtttgcggcatcagtcggtggcgcctgcgatggagtctctgttcggccaatcgcagcggaggaggagggcgggcggcagcggcttcgaatcgctcaagcgtctgggtcacatctcacccgctgtgcagtcccacctcaaacatgcaagcccctcgtctccttctccaatcccggctctcttctcacgcttggctttagctgatcccgttcccgactgcaggtgtacctcaccctatgctccgcgctggccttctctgcactcggcgcgtacctccacatcctcctcaacgtcggaggcgccctcacgaccgtgggatgcgtggcctccatcgccttcctcatctccctgcccgcttcacgggaccaggagaggaaccgcttggcgctgctcatgtctgccgcgctccttcaaggcgcgtccgttggtccgctcgtcgaccttgttattgacttggattcgaggtcaatcgtcgtcactcatccattacattacacaagaatgatgagctgtggtctgctttgttgatgaaactgcttctcatgtaccaggattctcgtcactgcgttcgtcgggacggcagttgcttttgcatgcttctctggcgctgccatcatcgccaagcgcagggaatacctgtacctcggcggct

SEQ ID NO: 188 - DNA, 519 bp, Zea mays
gtctgcatcagcttcgccgtggggctgagctgcctgacggcgaacgggccagtgatactggaggcggtggtgatcacgatggtggtggtgctggggctcaccttctacaccttctgggcggcgaagaggggctacgagttcgagttcctggggccgttcctggtgtccgcctgcctcatcctcatgctcttctccctcctgcggatcatcttcccgctgggcaggacggggaccatggtgtacggctgcatcgccgcgctcgtcttctccggcttcatcatctacgacaccgacaacctcatcagggtctactcctacgacgagtacgtcgccgccgccatcgagctctacctcgacatcatcaacctcttccaggccatcctagcggtgctcgaaggcgtcgactgatagggtcatatatataacacggccggctgaggctcatgggctgtgagcatatatacataggatcatatatatgcaatctatacatgagctaccactaccactaccgagaga

SEQ ID NO: 189 - DNA, 1158 bp, Zea mays
atagtggaactgcacttgatttgccttacctctgcagaatgaacaggtaactttatattatgcatggccatttgatcttttttatgttctcccgcttacccttggcatatgaagagctgtttctgaacctaatgggaactttattatcttccgatatctggaattagcactgcaaaaaactgcgctatccatcccataaaaagtctgctacctatttctgaacctaatgcaaatctcatgttagttttgttatgtttaaattcatcatgatatggttttattgaaataaaatctgggtacagcaccaaatatcaatgagctagaattgctgactgcattaccgctagcacacatttcattactttcatgaattcgaatttagaatgctatgctatgtcacttccatttgtttgcaacaggtgtcatatcatttttttattatcacatacctctgttccacatcgttgcaatctttgcagcatgaatctgtccagataatttatccctggtgcatcagttaaaaagtttatctggtatagaataattatgtaatttttgtaaggctgattctagtcctatgtttgtatttgtattaggtatggctcataatcatatacatctataagagattctagttatgatagacatctcttcagctaaggccttttatctaaattgatattacaggagtgggcaatatgtatgggaagatcaccgaccgcgatctggtgtctggaaaggcactagtggtggggaagctatttcctttagtggttgtgatgatgatcagacctctgcagatacctctgtaagttctagatccactcctcaacaatttattgcagtcatgtctatgtgctactctttaaattatgaggcgagtctgtttaagggactgctggcagatcatctttttatgcagtttcttgtttactatttgttcgatcaagtttgttttggtctgcttcaacccactgtcgttcatagcatttgattcaactggaattgttctgatcaggctttatcaaagatcacttcgactggtgcaatgacattctgcttcatccaagctattgaacgtggacagggcaccacctacggtagtatcctgaactctatgcgttccacaatacgcaacacaggtgactcagcgggtgt

SEQ ID NO: 190 - DNA, 767 bp, Zea mays
gcaagtccgtacacacagacacacaacgcacgtcaccgccatgtctgccgccactgcttgcatgcccctggtccttgatccgtctcctctccatggatcggcggcaatggcagatgccgttgagaggcggcagcccggtggcatggagaccaccaagaccggttccgagggaacgctcggccgcgtcgtcaggaggtatatatatttccgttccgtgcggaaaacatctgttgttcattaccaaccattttaatttctcagccagctgcaggctgcagctgcccggatcgatgtggccggctgcccggccggcgtaatcaagaacggccggccaggcagcactagtataattttcattatggaacgtatcctgttcttcttccttaagctgacaaacatgatgcattcgatcgatcagccaagtgtttggcaacgaggacgacgaccgtgctgggcacgacgccggcgacggcgacgaggtgagcaagccgcgggcggtggtccacacactgacgtgcgagcgcaagccattgttcgagggcttcgcgctctggcggagcatcggcaggtaaccacccatcgatgtcgatccaccgctcgactcgcaatcggcaggatggatctcattttgcattgatatataatgatgatcttcatgcatatatacacagaattcatatggtaattattatatactatatattaagctgtgatcgtttcgtttctcactgcaggcctgagcttcccgaactggatccaatcttatc

SEQ ID NO: 191 - DNA, 563 bp, Zea mays
tgatccagcacaatcagcgttgttcttttcagcacaattgtaagttctttctcaaactgcagcacctaaagattacacaatataataagccatattgattttcaagcctatattgcagacaagtactcctaccaaacataagaacattcctttccctgctacaacatgggtctgactcagaacaattattctctgtttatgcaggtctttgggctgctgacgaagccactgatcaggctcttgatcccgtcaaggcacctatccagggaaccaagcgccctttctgaactatccagcccgaagtctttctttgagcagctggccgccaacagccctggacacccggatcttgagaatggcataagcctacgacgcccggcgagcctccgttttctcctagtaagcccggcacggtccgtccaccattactggcgcaagttcgatgacagtttcatgcggccggtgtttggtggccgtggcttcgttcccttcgtccctggttcacccactgagagcagcttgccattgcttcctggcaatgagaactgaaaccaggcgtatcg

SEQ ID NO: 192 - DNA, 355 bp, Zea mays
  misc_feature (304)..(306): n is a, c, g, or t
  misc_feature (315)..(318): n is a, c, g, or t
ctttcggaatcaaccatgatttcactgggatgtgctacccactccttgttagctctgttggtatcattgtctgcttgatcaccaccctttttgctactgatttctttgaagtcaaggctgtgaaagaaattgagcctgcacttaagaagcagctcatcatctccaccgccctgatgactgttggtattgctgtaatcagctggttggcccttccagctaagttcaccatcttcaactttggtactcagaaggatgtctccaactggtatgtttttttctgttaatctttgctatttatttggannntggaatgtnnnntgacaactgccatatctttgcaggggcttgttcttct

SEQ ID NO: 193 - DNA, 568 bp, Zea mays
  misc_feature (494)..(495): n is a, c, g, or t
  misc_feature (522)..(524): n is a, c, g, or t
  misc_feature (538)..(553): n is a, c, g, or t
  misc_feature (562)..(565): n is a, c, g, or t
gagctgtgatatgactgttcatgttggtggcaagcgaacccatggaagatacctgctcctaaggcaaagggttgaagtaagtttctattctttcattgatctggattgctactccctgcatttttatagctctcaaaacagaaagctatgattagtttccaggagataaaccgggccatatggatgacgtgcctatggaaatccaagatcctgaaaaccagagagaccagaaaaagccgcccaaggagcaaacggcaaaccaccataacggcgatgatccggccactgatggcaactgtgatgaccagggtaacattgattcaaaaatgatcgatcttaatatgtgcccggttcgtacgcatgggcaagaatcaaattcccaggtctgtcatgctcactgcaattgatgtctactgtacttctcattacagtttcgatcttgtaacaagtgttctttctgatggtaaatccagactcagggggtaggtcttagnntgaacaaccatgactctccaggggtgnnnccaacaagcaattnnnnnnnnnnnnnnnnacaagcaannnngaa

SEQ ID NO: 194 - DNA, 827 bp, Zea mays
  misc_feature (804)..(807): n is a, c, g, or t
gtaccagtgaaattagtcaactccagattgttacagtaagtcatatcctctgcagtgctcagagcacaagagatcctttagcatacgtatcttatctggctcctttctgctaagacgaagtgcactgtctgttcctgtcagactgctgcctaccatttagtgacaatttacaaagcatatacgtgagcctctgtcacatctgaaagcaaagagaagaaaggattgtcagggtatttatattgaattagaacagattttctagtgcattttctgtatgcaggcatctaagtgcaccaatctatctatcctgctgcatgtaccgagttatggcatggaatctgtactttttttaatttgccgtctcatgtcccccctccctcagtcctcttagttctgtactccaaccttgaatttcggcatacatggtagatgaatacaagatgttaattttaaatcataggttcgtttcatggcacttgttcaggtggtcggccattgcaacccatctaccaaatcgcacggacaatgagatcaagaactactggaacacacacctcaagaaaaggctggccaagatggggatcgatcctgtcacccacaaatctatcagtggcactcgcattggcaccacaaacaacaaatcaaccaaggccgccgcaagcctcagccacatggcacaatgggagagcgcccgcctcgaggctgaggcacggctggctcgagaatcgaagatacggacagcaacgccaacaccaactgctctccatgcgcagccaacgatactacctgcctctgctgcttctnnnngccttgacgtgcttcatgca

SEQ ID NO: 195 - DNA, 1047 bp, Zea mays
  misc_feature (275)..(295): n is a, c, g, or t
  misc_feature (308)..(325): n is a, c, g, or t
  misc_feature (331)..(336): n is a, c, g, or t
cggacgacgacggccagcagcaacagctgcagtcacccccgcaccaccaccacgagatagaggacgacggcgatgaagacggcgacgacgcccgcagcgacgcgcctgcccgccacggcggataccactcggtaagcctgcccgtctccttccccgccgcgattccgattcacctcggcagctttgctgttccccgtcgaacctgcctggggctgggcagggcttaggttttcggattcgttcgtgggactcggggatgcagtgttttttttttnnnnnnnnnnnnnnnnnnnnngggggggaattgnnnnnnnnnnnnnnnnnnttttgnnnnnncgcttgattttgttttattgtgtacatgcagagagaggttgatgaatccatgaatttgtttgccttatattgactccaagtccagtcctctgttctactaaacccaaacactagaaaaaaatggagtttcaggttcacaaggtctagacacgtgcttcattgcatttacaggagtatagcgcatgttttctctgtcatgttttgctttacaagtttcattgctactcagttgggtttaggaaaactgtagtttagttgatttctgcaagcgcaccaacctgtgctgtgagttactaaactgtaaatctatttacatttttgggaaattttgagcgatatcaattgatcttaacaacaccggacctattctgctgagaatttgggccaccgtgctcttctagtgtcactaaggatttcaagcttaatgctcatgtaatttcccttctgccaaagctgttcatccttacatactgttccaatcttccaatgctttgtacttaataaagcctcctgaggtaacactgacctatttaatacatatttatctaggaagaagtggatggagaggcagagaatggaggagaaggtgaaggcgaaagtgaggggcaagttgaaatggaagaggaaagtgaaggcgaagctcatcgtgctgaccttgatcaaggagaaagtgatggggacaaagtccatagctccccagaaagagaactc

SEQ ID NO: 196 - DNA, 888 bp, Zea mays
gactgacttgcaattactgtagaatatatattgttgacaagaacttacttcattttttttaaaaaaatctctgcgcctggctttccagcatgacaatttcagggtgggtgttcatgatctccgttgggttcaatgcagcagccaggtaaaaaatatatacacgctagagatctctttttctattccgatgaggcgatgacaggaaaagataaaccttgcattttttgtttccagcaaggtaaaactgaactatcttctgttgtcttctgttgtttcttccagcgtaagagtgagcaacgagctcggcgccggcaacccaagggcggcggcgttctccgtggtggtagtgacgctgctctccttcgtcctgtcggtcctcgtctccgccgtcatcctgctgtgccgggactacatcagctacatcttcaccgagggtgaggacgtgtcgcaggcggtctcccggctcaccccgctgctggcgttcacgctcatcctcaacggcatccagctccagcccgtcctctctggtcagtacatatatatataatacattgcatactgagagagtactgcatcgctcatgtatatacacacacagtacatagccatgcatgatgactcacgctgacgattctctctgaatacatacaatacaatacaatacaatacgatacgacaggggtcgctgtggggtgtggatggcaggcgttcgtcgcgtacgtcaacgtcggctgctactacatcgtcggcatcccgctcgggtgcctcctaggcttctactttgacctcggagcagcggtacgcacgacctctctgcgcgtggcgttcttcgccgtcactttgtcttctacgtttgatacgatggctgctggatacaacggttgcagg

SEQ ID NO: 197 - DNA, 833 bp, Zea mays
tatctaatgtacctaatgggtcgaagaggtgtgcaacagatcataatctaactgtttccaactctgtaatcacactttctacttttctagggtctacaccttgcttaaaaggaagaggtgtggccacatatttaatactctccatgttttgttcaggtttatagctcacttgggcatggcttatgccatcacattttggacctgttatgtactgttgaaggagtatgaaattatttctaacatgaggctgcgctttctagcttcagagaaacgccgaccagatcagttcactgtatgttcttttgctactctgttcctgtttattatagtgtttattttgtgttgcatatcacattgaatagttgaaaaagtagatatgccctggtaatttcaccaactctgcattaacttttttcattctcagaagttgggcaacgaaccaaatccgtgttcagatccatctattacttggctaagttttcgattttatggggtgtacaaataaatatgaacttctggagaggtttcatccatgttctagatgaattgcatctgagccttgtggctgcaaatccaacatgtttctttagatccttttctggaaatcagaatatcttcatatcaggactaactttacatagctgtcatgataagttgatgcacctttagttcgcaaattctaagttactaatttgccaatgtgttttaggtccttgtgcggaatataccaccagatcctgatgaatcaatcagtgagcttgtggaacatttcttccttgtcaatcatcctgatcattatctacaacaccaggtacttctactaaactgcggat

SEQ ID NO: 198 - DNA, 542 bp, Zea mays
ggtcgacgagatcgtagacgcgctggcaaagatcataaagtctccaatctgtcctcaggcaaccaaggccggcatggtcgccacctatcacctggcgctatacgacgagcgtgtcgcggcgcgccttgccgctgccgggctcgtccccgtgctcgttgaggtccttgtagacgccgacaagagcatgtccgagaaggcactggccgtgctcgacgcggtgctcgcctcggaggaaggccgcgcgagcgcgcgggcgcacgcgctcgccgtgcccatgctcatcaagaagatgttccgcgtgtccgacctggctacccagcttgccgtgtcggcgatgtggcggctcggaaaggcgcacagcgacggcgaggatgacggtgcggtgacgcggtgtcttgtcgaggcgctgggggttggggcgttccagaagcttctcctgctcttgcaggtcggctgcagggacgcaaccaaggagaaggccaccgagctgctcaagttgctcaacaagtacaagagcgtaggcgaatgcgtcgacgctgtgg

SEQ ID NO: 199 - DNA, 790 bp, Zea mays
  misc_feature (758)..(759): n is a, c, g, or t
tgtacgcaagctaaattttctcagcttgtctgcgtgcttcagttccgttccggttagtttgatggccaatgctgcgtgcagcctcggcggaggccggcatgcgtgtcggcgtcgctgtcgtcggagcgcgaggcggagtactactcgcagaggccgcccacgccgctgctggacaccatcaactaccccgtccacatgaagaacctgtccgtgaaggagctgcggcagctggccgacgagctccggtccgacgtcatcttccacgtctccaagaccggcggccacctcgggtccagcctcggcgtggtggagctcaccgtcgcgctgcactacgtcttcaacgcgccgcaggaccgcatcctctgggacgtcggccaccaggtacgctgatgcggcatgggccgcgcgcgcggcatggctctgggtaacgtgcgctccatgtgagcgtgccgggcaggtcgcggacaggctagctaattaaccaccccggacccgggccttttgtttgtttgtttgattcgcgcgcatgcagtcgtacccgcacaagatcctgacggggcggcgcgacaagatgccgacgatgcggcagaccaacggcctggcgggcttcaccaagcgcgccgagagcgagtacgacagcttcggcacgggccacagctccaccaccatctccgcggcgctcgggatggcggtgggccgggacctcaagggcggcaagaacaacgtggtcgcggtgatcggcgacggcgccatgacgnncgggcaggcgtacgaggccatgaacaacgcc

SEQ ID NO: 200 - DNA, 770 bp, Zea mays
  misc_feature (721)..(721): n is a, c, g, or t
  misc_feature (736)..(750): n is a, c, g, or t
ttagattcagggccttttttgtttgtaatggtagttacttgtacattatagagcatgtcctcgttctgtatgcctgtctctcacacgaattggtcttgcagtggatcatacggtgctgacatcacagccgagaagctgaaggacttccacaggcgccggctgcaggttcttgcaagtgccggtcctgacctgattgcgtttgaggccattcctaaccaaatggaggcacaggtactttgtaaatcagagctccatgtgaatgaactgaaacatgatggtttaagaaacaaaggtttgaactgcagttgtgcatgcctggtgttgaaactgatccctttctcttataggcattggttgagcttctggaggaagagaaagtccagatcccttcctggatctgcttcagctccgtggacggtaagaacctgtgctctggggagagttttgcggactgccttaagatcctcaacgcgagcgagaaggtggccgttgtaggcgtgaactgcacacctcctcagttcatcgagggcatcatatgtgaatttaggaaggtctgtagtcacctctacgcagagcagttcctttatgccatttcttcagttgtctggagtctctggacacgatgacgtgttaggcatgcttctgtttgatccgttctcccttctgtctccatcagcaaaccaagaaggcgattgcagtttacccgaacagcggcgaagtntgggacgggagagcnnnnnnnnnnnnnnngagtagacaccacatttttg

SEQ ID NO: 201 - DNA, 820 bp, Zea mays
  misc_feature (764)..(790): n is a, c, g, or t
  misc_feature (802)..(815): n is a, c, g, or t
tatttacaactacttaacgacacagatcatgtcttcacgtactcatgccagatattcacttccgtttcgctgtaaatagtggggattatggtgaagctggtacgaaagagttcctgaaggactttcatcggcggaggcttcaggttcttgctgaagcaggcccggatttgattgcttttgaaacgatccccaacaaattggaagctcaggtctgctactttgtgacctggatcttttgccttgcatatctacccattcttatgaaatagtctctgatggctggctactttgtcgtttaggcatatgttgaactccttgaggaatgtaacattaatatcccttcatggctttccttcaactcaaaagatggagtgcatgttgtgagtggtgattcgttaattgaatgcgctactattgctgacaagtgtgcaaaggttggtgcagtcgggataaattgcacacctccaagatttattcatggactgatactctccattcgaaaggtacccctagtatccaccacattttgcatagtacttaccatattttttgcccctcaattgcaaatcaatgttcctgttatccctgcgaagtgcacatatcatgatttccgttcttgttttcccttggcatgaatcactgttgggggaggctgcagttctgttttatctaactagtaactttgttgttttaccacaggtcacagacaagcctattctgatatatcccaacagtggtgaaagatatgatggtgaaaaaaaggnnnnnnnnnnnnnnnnnnnnnnnnnnnctgggcttattnnnnnnnnnnnnnnatctt

SEQ ID NO: 202 - DNA, 600 bp, Zea mays
aggaagaaggcccccgtgtcgcgctcgtcccgcgccggcctccaggtaccctctcgcttctttttctttcgaatttcatctcgatctgtgcacgccatatgttactcagatgctaactttttaactggcgcttcttgtttgcagttcccggtgggtcgtatccaccgccagctcaagtcgcgtgcctctgcgcacggccgcgtcggcgccaccgccgccgtctattccgccgccatcctcgagtacctcaccgccgaggtcctcgagctggccggcaacgccagcaaggacctcaaggtcaagcgcatcaccccgcgccacctgcagctcgccatccgcggggacgaggagctcgacaccctcatcaagggcaccatcgccgggggcggcgtcatcccgcacatccacaagtcgctcatcaacaagaccgccaaggagtgaatcaaggccgtgctgctgcttctgcctgactacagtcccatctcgttctgtacttgtgcaatctgagtttaagtgcatgttggcacagttctagtaaactcatcctgttcacctatgcttctatcttgttaatttaagctctattccgcgagctttttg

SEQ ID NO: 203 - DNA, 874 bp, Zea mays
  misc_feature (768)..(787): n is a, c, g, or t
  misc_feature (792)..(815): n is a, c, g, or t
  misc_feature (833)..(868): n is a, c, g, or t
cgggccgtggcaaggctatcggcgctggcgccgcgaagaaggcaacgtcgaggagctccaaggccggactccagttccccgtcggcaggattgctaggttcctcaaggcgggcaagtacgcggagcgcgtcggcgccggcgcccccgtgtacctcgccgccgtcctcgagtacctcgcggctgaggtttgtgccccgcttcgttttctttcccctctccttgttgcgattcgcttcgggtccgcgtcgctgcggtctcggatctggttgttttgccgtggaggattgttcctggatctgaaatgagtcgcggcattgtacttcataaaaagtctcaatacatttcccgattccaattgcttcgattgcacatctatgcatcctgtaatttaccaactaatttgaacagacttggcactgaattattcgcattgtaatttctaggtgaaccggacaattttctggaataatatatctctgaatcctgcaattaagcagttggtagtaatgttaagcatgaaccattgtagaaaatcggagccaaatgcgtccttactcttactatttctagcattttctcccgtcatttctcaatggcaatatatccagtgttccaatggttacaacagtttctgactatgttcatttatccacggtgcaacaacaggttctcgaacttgccgggaacgccgcgagggacaacaagaagacccgcattgtgccgcgccacatccagcttgctgtgcgcaacgacgaggagctgaccaannnnnnnnnnnnnnnnnnnnatcgnnnnnnnnnnnnnnnnnnnnnnnnatccatcagcatctgctnnnnnnnnnnnnnnnnnnnnnnnnnnnnnnnnnnnncgacga

SEQ ID NO: 204 - DNA, 481 bp, Zea mays
cggatcgggcgctacctcaagaagggccggtacgcgcagcgcgtgggcactggcgcccccgtctacctcgccgccgttctggagtacctcgccgccgaggttctggagttggcagggaacgcggcgaaagacaacaagaagacgcgcatcatcccgcgccacgtgctcctggcgatccgcaacgacgaggagctcgggaagctgctggccggcgtcaccatcgcgcacggcggcgtcctccccaacatccactccgtgctcctgcccaagaaggcggcggagaaggcggccagcggcggcagcaaggagcccaagtcccccaagaagggcgccaagtcccccaagaaggcttagaaagtagggtcttcatttgcgctgtgtgctgtagcatgttcgtgtctagatctgtggatgggatgtgtcatgctctagtatcgtccttgtgtcttattgtatgttcgtcttcatcgagaagatcttc

SEQ ID NO: 205 - DNA, 621 bp, Zea mays
  misc_feature (568)..(570): n is a, c, g, or t
aagccggtctctcgctccgtgaaggccggcctccagttccccgtaggccgtatcggccgctacctcaagcagggtcgctactcccagcgtgtcggcaccggcgcccccgtctacctcgctgccgtcctcgagtacctcgccgccgaggtcagtcggaccgcacctattccccacccgtcgcggaagacgcggaaggcctgatttgtctcgcgttgcctcgtgtctccttcctatttttagctcctcgagttggcggggaacgcagcgcgggacaacaagaagaaccggatcatcccgcgacacgtactgctggcgatccgcaacgatgaggagctcgggaagctactggccggcgtcaccatcgcacacgggggggttctgcccaacatcaaccctgtgctgctccccaagaaaaccgctgtcgctgctgccaaggaaggcaaagagaagaagtcacccaagaaggccgccgccgccaagtcgcccaaaaaggtggccgcctcgtaggtccctggcaatgctgatgcactgtctctctctgtcctctctgaactgaaacgctcctaannntcgttgtcggtcatggtcgttgttgtttgatgcgcttttattgtggttgtt

SEQ ID NO: 206 - DNA, 723 bp, Zea mays
  misc_feature (702)..(719): n is a, c, g, or t
attggggctttgaagaaggcaggcaatggggccgtggacgaagtggtggacaagtagtgccttgatcttattctaacaaatatacacaggtttctacatgctttgtgcttatatattgtttgtttatttcataggtgagagatgagtaccgtacagattatgatcctgatatccttcgatgctattctattacagtttactccattccgatttggtgttatagaatatagaaagccatatgatgtttccataaatgccccacacctcctggtatcaacttaaattcagctataaaattacatgtttctctgtgcctgttgccttttactggtgcaattttgattatggtgtacctttgcatgtttcctttgttcaacaactgttctcaggagttaccaagtttccttaatgaatcaaacgtagaggtggttacggtaagatggttcagagggaactagaagcacaaagagaactagttgactatggtggatctttccaaccaaatgcaccacctccctgtaagttggatgttatttggattatgttcttttgagaataattttccatgaatttacatttgttttgtgacgcctatggttttggtctttgattgagttcttaggggcttgtatagtaacaactttggttgattcaacatgtaatgtttgctggaatatctgaaacaattttaccttttcccannnnnnnnnnnnnnnnnntcct

SEQ ID NO: 207 - DNA, 828 bp, Zea mays
  misc_feature (811)..(817): n is a, c, g, or t
ggaatctgcatgggattcttgttgggtaatacttgagaaatactcgctactctcactgcttatgtgaaatatcacttctgctcttaatcttctttataaactgttttacaggagggaggtgttccccaaaggaatattgtatgcttctcgtgagtcccattattcagtattcaaagcagcaagaatgtacagaatggattgtgtcaaagttgacacccttatgtctggggaaatagattgtgctgatttccagagaaagttattgcagaaccgagacaaacctgccatcattaatgttaacattggtgagtattaactccaatccaagactaatgcttggccttcgcatatattctgcttctaaacagcattgctgtgcaggaacaactgtgaagggggcagttgatgatctagacttggttatcaaaacccttgaggaaaacggctttaaagatcggttttatattcattgtgatggtgccctttttggattgatgataccatttgttaagaaggtgctatttttgattttccatgctgtatatactaattacatcaggctgtactactagttcctcatccactttgaattgatggctcattctcctgcttatatgtatatgcatcttcactaggcacctcaagtgacatttaaaaagcctattgggagtgtcagcgtctctgggcacaagtttgttggatgccccatgccatgtggtgtccagataacaagattggagtacataaatgccctgtctagcaacgtggagtatctggcgtcaagggatgcaacaatcatgggaagcaggannnnnnntgcccctatct

SEQ ID NO: 208 - DNA, 593 bp, Zea mays
  misc_feature (428)..(452): n is a, c, g, or t
  misc_feature (478)..(492): n is a, c, g, or t
  misc_feature (501)..(520): n is a, c, g, or t
  misc_feature (525)..(540): n is a, c, g, or t
  misc_feature (548)..(570): n is a, c, g, or t
  misc_feature (575)..(581): n is a, c, g, or t
atatctactataactatcagagaactattgttgcagcaatatgagcattgatatgttgtccattttataccaggcaaattggggagatgaatatgtccggttaaaatccaaacttgatgcacttcagaagagtcaaaggtaccccagacttgctcaagaggacccttattctggttatgataatgtttactgacactgacttactgtatctgtctatcctaacggaaggcagctgttaggagaacaattgagttcactgaccataaaagaactccagcaactggagcaacaactggacagttctttgaagcatattaggtcaagaaaggtgaataaattgggtttaaatttgttgttcggtgcacagctagtttggttatttactaacgtcttagtcaattattatattatagctctatttttttttnnnnnnnnnnnnnnnnnnnnnnnnntcaatttccgcgcttcaaaaaaaggnnnnnnnnnnnnnnnattcccttnnnnnnnnnnnnnnnnnnnngttannnnnnnnnnnnnnnnaaattatnnnnnnnnnnnnnnnnnnnnnnnttggnnnnnnnaagcaaacgtta

SEQ ID NO: 209 - DNA, 504 bp, Zea mays
agcttcccgaggcttcccgatgcacagagtgttttgatggagagagaattgaggagcactccactaccacctcaccagacaactgttgctcctatccgtggtctgtttcactccaatactggatctgttggtcctttgtgctcacctccgtctgtaaggttctcttcgcattcaaatcctgagcaataccccaaccacaattcatacaattctcaagtaccaagcactgcaagttcctcaacgctgaattatgggtcacaatatggaggctttgaaccatccataaccgatttcccaagagacattgaaccaacttggtgccccgatccagttgagagcattcttggatactctggtgatgtccctgctgggaataatttgactgggaccacttctattggagcttcagatgatcttactaagcaaactgaatggtggacagagtttatgaatgaggattggaaggacatggttgataacccgacttccacagaaactcaaccg

SEQ ID NO: 210 - DNA, 759 bp, Zea mays
  misc_feature (238)..(238): n is a, c, g, or t
aagctgcatccatgaaaaagactctctttgatcaggcatgtattatactcgttgtggatatttctaatcaatactttatctttatgcttgcacaaggacctttttcatatgtataagcatgcctgcttgtggtcccatccatggcagacactgctacatgctgtcttatggttttcaatgtttttctttgatatgtcgaatgctgactcagttttatttcgtcgacaggggtacctanatgagcaattttgccaggtggaagacttgcaggatgaagctagtcctaatttcgcggaagaggttgtcactttgtttttcaaggactcggccaggctaatatcaaatgctgaacaggctctgtaagtaaaacatgcagagcaagggagaagtgatttcttgttcagaaaataaagaaaatatgatgcaagcagaagtgttggacttgactgattaaaattttgtgacactgctgcagggaaaaataccccaaagatttcaatagatgggatgcatacatgcagcagctaaaaggcagctgttccaggtatcttggtgctgcatctggatattttttttagttgcatacgatccattctgtgtgactgattcattacagcacacagaccttactttatagttctgtgaacaatgaggactactgagtttaactactgaacatcctgcaaagctgacactatcatttttgaaacaactactgcatgcttcaccttcttaaaaaaagtggggaaaaaaactgaa

SEQ ID NO: 211 - DNA, 780 bp, Zea mays
  misc_feature (724)..(724): n is a, c, g, or t
gagtacggacaagaagaaatttttagctcttcttggcttcgaggttgcgcgaacatattctcgtatccctttatactgctatatatcttacccgttgcgacggcgcaacgccgtggacacaatttcacaaaatcttctatcttccaggtccttgtggttgctttctcctccgttctctggtttatgttcaaagatggctatgttgataccagcggatccagctttgaatcttggacgttcgggatgctttgggataccacagtttcgtttccttggataccagcattgtacactggggttctttctacggtgttatgcatgtgggcagaggtcagtttacttctctgagtgttcttgtagtgctcctctcgttgaaggctcgcttgttctaagcttgtggactgcttgcatgtcctccctgcagatggtggcgatgggcgatgtttcagcaaccgaaactgcagttgtttacgggttggagccagtttggggagctgcttttgcttggttcctccttggtgaaagatgggatgacgctgcatggaccggagctgctctcgtattatgtaaagcttgtgttccctttccttagttctttgccttctttgtgaacgacggagtgcccgaattaagtattccttggagctaacaggatacacttgcttttcatcaggtggcagtttgacagttcagctatttgggtcagctcctgagaagtccaagnaagtcaaaaaacgcagcagcaatgctttagaaactccggtgaaacgacgagactac

SEQ ID NO: 212 - DNA, 869 bp, Zea mays
  misc_feature (743)..(743): n is a, c, g, or t
  misc_feature (757)..(758): n is a, c, g, or t
  misc_feature (804)..(813): n is a, c, g, or t
  misc_feature (819)..(819): n is a, c, g, or t
  misc_feature (835)..(860): n is a, c, g, or t
atcatgtactcctttccagggaatgaatatttatgttttcttctcacttagaattgaacataaaatagtcctcgtcgtcaaagtaccagtccactgtttcagaattgttgttcattaaggaaatcaggagtgtaggtattgtcatttgttataatataggttaaagtgtttaaacagatcatttaatagggtgaagcatggttggttctgttaactattatttggaccgtctcattgtgtgcatgacaccatgagctagttggacaactattgagggagtttttttttcaattccaccgcaattattgttaaaagtcttgtctttctggagtctactattgatgtattattaaggcatggatgagcttatcccggattattcttttgaaaggttttgacagaatatgtccttgtttctgtgactagcgctgtcacagtgactgtagcaggaattgtgaaggaagctgtcactattctggtataactaaactttgattttgctttccatgttagtttatacaaagttcatctatgctagttcattcatgtgattgtgaccctgcaataaaaaataaaacaggttgctgtgctattctttaatgatccatttacatggttaaaggcgcttgggctggcaataataatatttggtgtcagtctattcaatatttacaagtgagttgaaacatttacatttcatttttcatgttattattggtacagaaacacaattggtaattcancacacaggtttcanntttgaatctttaaaatagcaagcatatgattatttctaatgcatgnnnnnnnnnnactaanacttgtttgtgctgcnnnnnnnnnnnnnnnnnnnnnnnnnnaagggcatc

SEQ ID NO: 213 - DNA, 666 bp, Zea mays
cttgctcttgccctgtgagcagcggcgtgcgatcgatcgaggcagtcgtcgtagtaacaagccaacaaattaacaaccggccggaacgccatgctggaggagtacaaaccgtgtgcggccatggtggtgacgcagtgcatctacgccgctctagcgctcttgtccaaggcggcgttcaccggcggcatgagccccctggtgttcgtcgtctacaggcaggccgtcgccaccattgtactcgtccccgtcgtcatcgcggccaacaggtgcgcgcgcgcgcgtcgtacgtcgttcgtccgtccctatagctagctctagctgctgctaccttgacaacttcttcttcgatcggcgcgccacacagctgtgtgcctgtgtctcgtcaccctctggttcttagtcgttgtccgtcgaccgtcgtcatatgcatggctctccgtgatgatctatctgcgtgcaggaagaagatgaaggagatgacgacgggccttggactgacgggcttctcgctggtcttcgtcgcctcccttgtcgggtatgcaagcgccacggaagatcggtcgcagcaaccgattcagcagattcttgttatcttgtatgtgagttctgacatgaagttttacgctatgcatgctccacgcatgcgatcgacagggcaacggtgaa

SEQ ID NO: 214 - DNA, 827 bp, Zea mays
attgcttttgtgcttgagaggtaaatcgatacgactcttgcttgtttacaactactactacatagctgatgctgctcacaccatgacagaatgaattcaggcttcttcttttttttcaggaaaactgcccctccactgtcattcagagtctctctgaaattgtttttccatgcactatacgggtaggtgaaagtagtggttttgtctcttcatgcatgtttaaccacacaggtttcgtaatcttaagttttggaagctcctgtcagacacctatgctttgacttacatatgacttcgttcgagtgcataccttgtgcgaagctatcaagttcccagtgaattgttatacttaatattttctataaatctaatcaaatctgagaaactttgaccggtcatattatatcgatgattattttagaacggagggagtatatgatatgcgcagaatttatcaaaaaagtttgctatttgagcccagcagtgaattgttctgttagtaaatggtagtactgtgtagcgagtttttttcgttcagtttgtgtcctttgttacgcttgcatagtcactaataattgtgattttttttgtatgaaaggatttaattgattcacaattactacatgatcgagctggtacaataaaagtgaattcacttcctgcatctacctaaacacaaagctgaatatctgtttttttcttcttattattttaggatctctggagcaataaacatatacggcctcggtctcagctattcttcagcaacatcatcgtctgcgatatttaacctcctgccagctgtggctttctttctggctgttctt

SEQ ID NO: 215 - DNA, 912 bp, Zea mays
  misc_feature (780)..(810): n is a, c, g, or t
  misc_feature (837)..(851): n is a, c, g, or t
  misc_feature (873)..(878): n is a, c, g, or t
  misc_feature (907)..(907): n is a, c, g, or t
gtggggttctccgggatgtacatcgtctccgtcgcctccctcaagcgcggcatgaaccacttcgtcctcgtcgtctaccgcaacctcgtcgccaccgtcgtcatggcccccttcgccctcctcttcgagaggtacgtacgtcctactacctgtatgtcgccggctcgccgcagatcagcgatcaacctagctgatgacagggcctagctaattaacacttgaacactggctgatttaactgccgcacctgagaagcatcctgctgctgcacgtatagaacagaaaatcatgcatgcatatgttgcatcgctgttggttctttttctcgtaatgaagtcatcgttgctagtagatatggtgaccaggcttatcatcaatttcattgcaggcgagtgaggcccaagatgacgccgctcatcttcctcaagatcatggggctcgccgtgctcgagtatgcatgtattcatttttattttatttttgcttcttgcaacaaagctgcagtgaacagtacaaaagaaaatctgctgttccactaacgacgtgcatataatccgtttgatcaggcctgtgctcgaccagaacatgtactacctcggcgcgaagctgacctccgcgaccttcgcctcggcgctggtcaacattctccccgccatcacgttcctgctggctctcgccctgaggatggagaggctgaggctccggagcctccgcagccaggccaaggtggtcggcacggtctgcaccgtcgccggcgccgtcctgatgatcctctaccannnnnnnnnnnnnnnnnnnnnnnnnnnnnnngcgggtcgtcaccaccacgccgcgacnnnnnnnnnnnnnnngagccagagcagcgcctcctgnnnnnncggcatctgcatgatcatcggcagctgcntgtgc

SEQ ID NO: 216 - DNA, 562 bp, Zea mays
gtcggcaaggccgaggtggaaaatttctggaggaggtgctcatcgtcggcgggctcctgctggtgcagtgcgtgctctccggctacgtggtcttcaccgaccacctgctcgccctcggcgccgacccgctggccgtcgtcgtcgtcgccggagccgcctacgccgccttctgctttcccttcgccgtcgccctcgagaggtacgtgcggtctcggtttcctccgcagcatgaatggatggattatattatgcgtgaatacgatacgtacgattacaattacatcatgctacgtacgtacaggaagcgatggccttccacggtttcggggactctggtggcgcaatacctgctcattgctcttggagggtacggtagccccatcatcggattcatccatccatcacatctgcttctgctgctgctgctgattctgtaattcaattcatacatcactcatcaggacaaccgcgttccaagcgctgatgctgctggggatcaagaagaccacgccggccatcgcatccgccatgcccaacctcagccccggcctcatcttcatcg

SEQ ID NO: 217 - DNA, 732 bp, Zea mays
  misc_feature (665)..(668): n is a, c, g, or t
  misc_feature (712)..(714): n is a, c, g, or t
  misc_feature (727)..(727): n is a, c, g, or t
ttatactgggcccctttgtggactactatctaaatgggcggtcattgttgaactaccctttttcaggaggggcaactgtaagttatcctagtcacaattcttagttcttgagagcattgctatctttatgaccgctagttgtcctgagttatctatcttctactttaaattcactggcagtgctctcatctcttcaacttatatgcttaactatattatttttgccattctaggttatgtttggatccagcccaggatcagcacgcacacggtcttcatgtggcccaggacctggaacgaggtcgctgagaaccgcccgatgcagaggtattggctcatgttgcagaacacggccagggagcaggaaagcagtatgaagaactgcagaatggataaaaggtaagcggttagatcatactcactgcgtcccaaaacataattcgttttagactaaatatgcatctacgttcattatcattcgaatggatgcggactgaaaaatttggaacggagggagtaactggtagtccgcccacctctccagtatccagttagtacgaagaatgcaaaatgagtagggcatatagcagcatgagcaacttcattcgtagctgcaatcaactgctaatgacattttggtaacatttggcaatcataaatttaannnncaaaaccaagaagaaaatccatatattcaaatcaaccaatatgnnnattctcattaagnatatt

SEQ ID NO: 218 - DNA, 631 bp, Zea mays
  misc_feature (168)..(168): n is a, c, g, or t
  misc_feature (170)..(170): n is a, c, g, or t
  misc_feature (294)..(294): n is a, c, g, or t
tgtcgtcgtctgaatgattcaccactattcctttttttttgtgccccagcgccgctctctcccagtacaccttcttctacgggctgcagtacaccaccgcgacgttcgccataactttcaccaacgtggctcctgtgctcactttcctcattgcagtcttgctaaggngnggggtggtgccttctttccggtctccctccgatcccgatcccggcagctaatgagactgtctgaaaccggccctctctgcttcccttcccttcgtcggccagggtggagtcactgagcatgaanaacaaggcaggagcagcgaagatcgccgggacgctgacgtcgttcgccggcgtcatgctcctcaccctctacaagggcgtctcactgacgcaccaccaagctggagaagcgagcccggaggatcacagcctcggagcagcagcagcatcgccgtctgacaggaagagctggacgctgggcaccctggcattgctcgccaactgcctgtgcttctccttctggctcctgctgcagtccaggctgaccaagaagtacccggcgctctactccagcacggcctacatgttcctcatcagctcgatgcagggaggggccctcacggcggccattcagaggc

SEQ ID NO: 219 - DNA, 794 bp, Zea mays
  misc_feature (756)..(759): n is a, c, g, or t
ctgtgctagctctcctctgaccagtaccacgaagtagctcctagaacactggagcttgcttttgaatcaagtatcttaattatgttttgttgtctggtcactcaaaagtcaaaactgttgcaggccgccacgctgaagaggtacgacgcgccgctgtcgctgaccaccctcatctgcttcgtgggcaccctgcaggccatcgtcgtcaccttcgtcatggagcgcgagccctccgtgtggaggatcggcttcgacatgaacctcctagccgccgcctacgctgtcagtataccaaaccaaaccgcatctgctgctctccgaccggcaaagaagcacatcatgcgtgatgcgtgtcctcctgagtcatgacgctgaccacgcatgtatctgtgtgtgtgtggtgcagggcatagtgacgtccagcattgcctactacgtgcaagggctggtgatccagagccggggccctgtcttcgcctccgccttcagccccctcatgatgatcatcgtcgccatcatgggctccttcatcctcgcagagaacatctacctcggcgggtaagtgctctgactggccgccatgcatgtgtgtcgtgcaaaagtactaccataccagacagcacaagcagtaacctgtcccccatggcatgccatttcttgttcccaggatcatcgggtccgtgctgattgtcgccggcctctactcggtgctgtggggtaagcacaaagagaacgaggagaaggagggagaggcgnnnntggagatccccgtggcgatcaaggccgtcgacggc

SEQ ID NO: 220 - DNA, 829 bp, Zea mays
atgtaccaatcgtcctgcgtcgacggcagaagctgcaagtaagagtagctgcatcagctaacccaggaaactgttgcgattcatagctcactgtcttgagttgtcttgcagatagcttggtactggtacctagctctggccttctttgatgtacaggggaactatcttggtgagtagtacagacacgcactacacagtcacaagtcaatgaagttttgttaggtctctcttgctgctactgagtagtacagacacgcactatacagtcacaagtcaatgaagttttgttaggtctctcttgctgctgctgctgatcgacatctaatgtcccagttgtgaaggcgtaccagtactcatacattaccagtgtgactttgttggattgctggactgttgtatgggtcgtcatgctcacctggtacgcactgggcacaagatactcactctggcagttcgtgggggcagggacctgtgtggcagggctcgcccttgtgctgctttcagatgcaaaatctcaagatgagcaaggtaagctactccaggcatcctacagttcaattagaaagtcaacaacattcaacattttgagaactcggaaatcatagtgctagtaggactgtccataccatctcccttaaaagaaacggtagcagaacaatcaagaataccgatactagcggtgcataagattgcaatgcaatagctgtagatgtaaacaaggctttatgaacgatatggtcgaaatatacctttttagtttctgtagttacagaattgtttacttcacatgtaaatctttttttttctgcagatccgaaaaaaataccac

SEQ ID NO: 221 - DNA, 717 bp, Zea mays
  misc_feature (711)..(712): n is a, c, g, or t
tgtacatgttgataggatgaaggtgtacatatcttattaattgtgattcatagtttctgggtttttttggggggtttgtaggacattgctcttgcagatctggctccaacccaccccatcaggcttggcctcgctctcaacttctcagtgttctactacgagatcctgaactcccctgatcgcgcctgcaaccttgcaaaacaggtttgcttctcttctccttttatccctcctttgtgacttgctttcattttgagaccctttgtgatttgttttaattttgagacatgatgtctcctagattgtgtgtagcttctgggcaacggattgagtgtgcataaacagctcctgtctccatcagcttatgtaggggtttggttgattcaattaaaaaaaagatggtgcaaaggaaatagttcacttgcctccgtctgcatgcctattcactgaaacaatttttttcttacattaggcactgtgtaagtgatggatctaattactctgggtgctaacaaaatgcttcttttgctaccacccacggaggctgttgtttattttcactcaatctgtcacgtcttcttgcatacatgttctactacatattgaacattgacaagctacaacctaatgattacaagtcacctagagaattctcaatttcccttgtatgatggttgcactgtctaacttgtctgcaatccatgaagttgnncatga

SEQ ID NO: 222 - DNA, 811 bp, Zea mays
  misc_feature (753)..(755): n is a, c, g, or t
  misc_feature (775)..(779): n is a, c, g, or t
  misc_feature (788)..(808): n is a, c, g, or t
gatctattccccatcttgtcctccctttgctaaaaataacgaggcagaggcatcttcgttttgacgtgcgcttcctcttcctcgctcgctctcggtcgcaggtacctacgtcctgttcttcatcgcttatggatttctttacgcgtagtaggtagtagatctctctttgctcgatctgttttcgttttgtaagattcattcacgtctgcgctgtggctctattcagatttggtcgtgatttctgggtttgaccagcttaagcatcggccccgatctggattctggagcttgactatatctccttttattttttttttattttgtactatctaacatagattttgcttctaacaatcattaagttacacgcacgcatgattatatttgaagtttaaccttgccgtgttgtggttaagtgcacttctgagcacattatgtactgaattctgcaaattagtaaaggattataaactgtagagtcaacttccgttagggtacgctaataacatgcccgagaacgtgtatttccttaagaggaatttcttctgcttataaaatactctttgtgcctttgtttctcggaggtgctgcttttctaaaataaatatcacagctttagtgatcagcgattattgactaggttacctgtaaccaccacagaatctgcagtgatctctcttggtagctctagctctggcttcctgcaaccctacttacttataaggtgcatatatttgtttatctgttctagtnnnggctgatgtcgatgagtacnnnnncttcattgnnnnnnnnnnnnnnnnnnnnnctg

SEQ ID NO: 223 - DNA, 691 bp, Zea mays
  misc_feature (624)..(624): n is a, c, g, or t
  misc_feature (626)..(626): n is a, c, g, or t
  misc_feature (673)..(677): n is a, c, g, or t
  misc_feature (681)..(687): n is a, c, g, or t
tgctgcacggctcatgtctaccaagctatttattggtggtgagtttttgttgtcttgtttccttcaatataccagcaacctttcgtttaatgcttattagcgttctttggttaggtcttgactggggtgttgatgacgtgaaactaagagaagcatttagcagctttggagaggttactgaaggtttgtatacaaatttgaatgctattatgttgtgtgttaatggctcactgaatcatattaatccattttcctctgctgttgtcttgtggttcacgttccgttttaaaatggcaaatattcatgttgcagcgagggtgatcacagacagggagactgggaggtcaagaggctttggctttgtgaactactccgacagtgatgctgccaaggaagctatttctgcaatggatggcaaggtgggttgaacattttccttatatgtttcaagcagtaccatgtgaaagagttcgttttgatttgtgctagttttccataaagttttatttgacaaatcctgtactctttggtgatgtcagtgtattcacattcatgttacttgcaggaaattgatgggcggcaggtacgtgtcaacatggctaatgagagacctgctgggaaccntngtggtggtggctatggcggcggcggctatggaggtggtggctacggnnnnngcgnnnnnnncgga

SEQ ID NO: 224 - DNA, 719 bp, Zea mays
  misc_feature (83)..(85): n is a, c, g, or t
  misc_feature (655)..(655): n is a, c, g, or t
  misc_feature (672)..(686): n is a, c, g, or t
  misc_feature (707)..(707): n is a, c, g, or t
cgctcttacttttatcagtcctaaattcttctgtttttttcctgtagagtatgctgccaagcgtcctatttgcaagagataannngcttaagcccgggggtcttattcttccttctcatgctacggtataattagcacacaaaaacgtcatacctcacctatttgcttgttcaagtcatttactattttttagtttacataggcagaagtaatatctctgataactcaaaatactacctgttttaaattgaagggtctatcatgtgagccgttaatggttttccagatcaaaatcttgatttaccattttattgaatgagacaccaatggtttatcattgtccaaagctgaatagtgaatacttatccatgattcttttccatagctcttcatggcccccgtaacaaatcgtgagagatatgaagacagcgttgatttctggcgtgacgtctatggcataaacagtaagatactgccctatgtattttagagtttcagtatgcattgtgggtgctgtcatatagtcaaatcctgtatggtggcttctgcatgctatagtttgatcagaaacctaccttttctggtgcagtgtctgctcttgtgccacttgccaaaaagtttacatctgaggaaccctccattgaaacaattggtngagagaatgttataagnnnnnnnnnnnnnnngagtctcggcgaagcttctgngtatcacaaaag

SEQ ID NO: 225 - DNA, 930 bp, Zea mays
caggttggtttcctggaatctgttaccagctatagcctgtagttactaaattttcgatcttctcttctcccgcgacctctaaacattgactgctaacaaaagaaattttgcgaatggagggaaaagaactatatattttcccttttgaatttatataggcagagggcaaagcttctcttaaaaaaataaaagagaaggggaaaaaaggaactttaaaaaaacatgttgatttcaccagaactgctctacaaatgaatgcttttatttgaggcgttaacttttgcaaaacaagctactctttcagctggttttgccgttattgaaatgcacactgctcatggaacagttaactggtctagaaaacttgatcagaacattgttatttttttccttctcaaggtattcttgctgactccacctctgagtgtgactaaaggagacaacgttaacgtttccttctcgatggttcgctcgaaggaaaaccatcggcttatggatatggagttcacatatgaattgcacgagttatctggcaggaagcacccagcagtcaaaaccaagatgtacttagagtagaacaaggtaaagactataatatgcttacaaatttcgcacattcaaatttttagtagtagtatcatacagaaattggagatatgccacagtatttactattgcctgagaaattacctcaggttcgccagcataatgatctgtgacacagatgctcacacatgaagcatgctgcattgctttagttgataacatggttcaatcttacccttgttcatcatcaatcagatggaaagacggaacctcacgacgccgttgctgaaacctttgctcagaagctgagcatgtagtgtgcttgttacacccatgatgggtacattgagaccatttatgttgtattagtaatatattgttgat

SEQ ID NO: 226 - DNA, 551 bp, Zea mays
tctgacggttggctggttgtgctttaagtgttcaaggggtggattaggaccgggaaactctgtactgaagggaaggtcaaaagtgtcaagagagcttgttccaagatggatgaaggtcagggagttaggtattggtgccacatgtgtcaggaggtgatagatcccatgccccagatgaagtgcccaggctgcgagggcgggtttgtggaggagatggactctgaagactttgagccagctgcgaacgcgaggtctgatcgctccgtctctctcttggctccactgctgcttggtatgatggggggttcgtcgcgcagatcaagactcaggagggaggccatggttgaagctgatgccgaccaggatgacgaagaggatgattcagatcatgagcttgaactttccaggaggaggcggaggaggaggcgctcatcagcgcttttcagtgtgcttgaggctatgcgtgaccgtgatgaagtaaggggctcggatgacaccgacagtgatacagagagagacctggagagagggagaagggagaggatggagag

SEQ ID NO: 227 - DNA, 550 bp, Zea mays
acaaattcgaggttggagcagaggcacgggagatgccatgcaagcacctgtaccatactgactgcatcatcccctggctggttcagcacaattcttgccctgtttgccgccatccactgccatcacagagatcaggcagtaccagtagcgcccggccttcagcttactacaacgaagccgctgatcctcctggggtcaccagagcagatcttgaacctgctccaagagacggtggcagggaaagccaggaaaggcgccgctccttctcgtttctgtggccgtttggcccgtcgagttccagatccagttcttaccagtacgaacagaatgttgatgagcctgcagtatacgatccaaaccagatagcatattctgagtggcactatgaccactgactgaaaccctgcagcaagtgcaagctatctgcaattcgtgccttcaaccctcagctttggagaggcattcatcagctgtaatggctgcttgccgtataaaaaaaggatggttcttgcctttatattgtgttcagtgcatagccttgctccgtatg

SEQ ID NO: 228 - DNA, 535 bp, Zea mays
tgccttcaccaagccctcgctttgcaacgctcagtgcttgatgctgatgaggcccgagatgaccaaggtggatctagcaatgatgatggcttgatggaagaatatgtcctgggggctgggctaaccctgctgcttcaatatttgactgagaatgatccaagccagtatggcacccctcctgcaaacaaagaggcggttgacgctctgcccactgtccaaatagcagaggctgtcagctgttcagtctgccttgatgatcttgagctagggtcccaggcaaagcaaatgccttgtgagcataagttccactctccttgtatactgccatggcttgaactccatagctcctgccctgtgtgccggtttgagctgccatctgaagagacagaagatttggatgagcctagcaatgtggacagaacagagaacacccatgaggaagtcagggccgatggccctgaagatgacagtgagagcagtaacagagcgtgggcccttgttccttggttcagtgggctattctcaacacctgaac

SEQ ID NO: 229 - DNA, 234 bp, Zea mays
  misc_feature (219)..(227): n is a, c, g, or t
gtcggcgcagtcctccggtagcggcggcagcagttcgcatcattgggagaactaagcaatattgccatggttgctgccgcttgaaagcttggcccgttggttggtcccaatgtacataggaaggagcaggagcatgccgggttggtgccatgtaaaaatctggagccttttttcagtttggctcatgttaatggtctctgatatgtatcatggctgaannnnnnnnngctcgtg

SEQ ID NO: 230 - DNA, 812 bp, Zea mays
  misc_feature (710)..(712): n is a, c, g, or t
  misc_feature (717)..(720): n is a, c, g, or t
  misc_feature (750)..(757): n is a, c, g, or t
  misc_feature (775)..(791): n is a, c, g, or t
gtgctcagtggtcagtgcgaggtgtccacgagtcaattaaagttggtttcttattcgtacaaagcatgcaactcttgaacagtttaataactacatatttgtcggatgatcctttcttctctcttagctttggcttgtcttgggagtcttcctaatggccacgagcctcagaatgtatgccacgtgccagcagcttgctcatgctgcagctgccaacagttttctcggccacactgagctgcgtgtgcatgtaccgccgtccattacccttgctacgagaggccggttacagagccttagacttcaactggctcttcttgatcgtgaatttgacgatttaggtgtgccaatacattccattcgactcatttgatggtttatagtgtttcctgaaaacttagtgccatggaaattttttgtttcagattatgacactctgagagcattggatgctgacaatagcccacatgctccatctatgagtgaagaagaaataaattctcttcctgtcttcaaatataaagttcaggcacaacagaggcatccccctgcccgaaaaaggtaaagccgaattgtcctttgggttgatttgttcatatcaccatatcgagttggttccagtatttcccatcaacacatgaccaacatttaattctgaaatggagacatgaagtaattttttctaatgtttgttttccaatagtgatggnnnatctnnnntatcagtttcttcaactgggtccggcaatnnnnnnnntgataaatactgacttgnnnnnnnnnnnnnnnnnttgaaaagtatcttattatca

SEQ ID NO: 231 - DNA, 363 bp, Zea mays
  misc_feature (331)..(334): n is a, c, g, or t
  misc_feature (345)..(349): n is a, c, g, or t
  misc_feature (357)..(360): n is a, c, g, or t
tgttccacgtgccgtgcatcgacggctggctcatcaagcacggctcctgcccgctctgcaggaggaagctgtaggcggatcgaccggacgacgccatgaacgatgttcttctctgcgatcgagccgatgatgtgtgtgtgtgtgtgcccccgccgccaccaccgatagctgctgctagggtcggaggagggaggaggaagaagagactgacatctatagaacccttaatttatagagagggcttttgctttgctacttgtacgtgctctactacgtacctattgcatctttttttctttttttgatccaccatgatcgacctccctcctcnnnnccatccatgcnnnnnatataccnnnnacc

SEQ ID NO: 232 - DNA, 366 bp, Zea mays
  misc_feature (99)..(99): n is a, c, g, or t
  misc_feature (145)..(146): n is a, c, g, or t
  misc_feature (180)..(180): n is a, c, g, or t
  misc_feature (191)..(191): n is a, c, g, or t
  misc_feature (290)..(290): n is a, c, g, or t
  misc_feature (295)..(295): n is a, c, g, or t
  misc_feature (299)..(299): n is a, c, g, or t
  misc_feature (301)..(302): n is a, c, g, or t
  misc_feature (334)..(337): n is a, c, g, or t
  misc_feature (348)..(352): n is a, c, g, or t
  misc_feature (360)..(363): n is a, c, g, or t
tgttccacgtgccgtgcatcgacggctggctcatcaagcacggctcctgcccgctctgcaggaggaagctgtaggcggatcgaccggacgacgccatgnacgatgttcttctctgcgatcgagccgatgatgtgtgtgtgtgtgnncccccgccgccaccaccgatagctgctgctaggntcggaggaggnaggaggaagaagagactgacatctatagaacccttaatttatagagagggcttttgctttgctgctacttgtacgtgctctactacgtacctattgcanctttntttntnnttttgatccaccatgatcgacctccctcctcnnnnccatccatgcnnnnnatataccnnnnacc

SEQ ID NO: 233 - DNA, 390 bp, Zea mays
  misc_feature (39)..(39): n is a, c, g, or t
cagcgcacgtctcgcgctctgcctatggatctcccagtngttacgtaagctcgtcacacatgtcccgtggatctccgagttgctactaccttggatcttcttcagggcagcagcatccttacctgaggcactgcaccttgtcaggcacgagcctgttcaccatggtgccccaatcaccgcaacagaaccagctgcagcacggtggagactcggaaaaagatctgtcagctgctgcatcaactcggccattccgtcagctctactacctgcagcattgtccagattctggcacgtcgtctcagtcgcttccagggtgctgattcttcattctcgctgcaaaattcaccattttaacattgatggtggctccagtaaagctcccggccgtga

SEQ ID NO: 234 - DNA, 828 bp, Zea mays
  misc_feature (722)..(725): n is a, c, g, or t
  misc_feature (738)..(738): n is a, c, g, or t
  misc_feature (800)..(805): n is a, c, g, or t
  misc_feature (809)..(821): n is a, c, g, or t
tactctgatttagttcccccgtctgtagtagacccgagacgtttgctgccagaaccatctaattggagttctgatgtccgaggcactgcaatatcaggaagtattcctcctgtatcaagagctaataacagtgcaactgttaatccgccagcaggattcagtcaccaaaacctcacccggcgccatcctcgaaatttatcagaggtatttttttcctccatttttcgcatttggttttctctatttttggattttggttttcagtttgattgctcatcttcccaccaaaatatcaagtgacgccatacttaaaatttggtttgatcatcttctcgatttgatcttttattttcttataggagattggtcggctatctggagcacttcgcggccatcaacccccacgcttaaggccggggtttctgctggagcgccagggcgatggtgtttggggtgttcctttatcaacaaggggtagagaaggaagaaggttaatggaggtaagacgatcggttctgttcaaaaaatggtttttagcatccacttggaaacataaaagtccatcattattagttgttttttgtgtggcagcaaagattacactaaatcatcctctaatttatgaatttctgcttgcaaaggtcccccttgttttctgctatcctctttgtgtttgcctatctaagcaaattaccctattctattcccacaccaaattggtnnnnctgctctactcgnaatgctttatttcattttgtttgtgcacttcatattttctaatttgatctagcatgcttctnnnnnncccnnnnnnnnnnnnnatactga

SEQ ID NO: 235 - DNA, 577 bp, Zea mays
tgctaatattcaaggtaaggagttcatggacaaatgccagtttttttttaatcatgagacatctataaaatctactttctgttatctaattgaacaatcgatcttgatacatataaaattgttgccaagtgtacatgattagtcaactcatacttgattagctttgtttgttaaaattacaaaaactaaaactctagtaagtagtcttctgagttgtttactggggtgatatgatctgaaatgttttgcttttaacaggcagatttgcccattcaggagccacagaaatcgcaaatgttggttttcatgaatatcagaatggcccttcaactatttgtcggggaccagtaccttatttccaccagcatgcgatgcatggcatgcaagctcttgatcctactcaaatgcaagttccttatcaacaatgccacagtaatggtttcttgcatggtggtattaattaccctggaaaccgtctccaattaggtccacgaaatccagttctcttcaccagttctgaacgtgcttttgggcttccacagcatccgttcctggcaaatccagttaaccaccgcaa

SEQ ID NO: 236 - DNA, 897 bp, Zea mays
acgagcacccggcaggtatgcccgccccatcgcttccctttctcctctgcgaaaccgagcagcattcgaagcctagtctaatctaatctatttggctttttgtaatcgggcctgatctaatcgcaagtgtatatgtacgtgaattatgcctactaacttcgatttctttttgtttttaccaaaaaaagtaccgatcgggtgttcttcactgggtccgctcctgcgtgctagaactagaagaatcctctgctcggctcgaacttgggaaggggagacgagggatggggtccctgctttgctgcatgcggggctcggaggacgtctcggcagcgccgcccgtgagctgcttgtgcctactatggcctttccattattaccacaatttgaactcggtatgcttctactactgctacgtatctatcacctatccttttgtcattgcaaatactgttgttttagggtgttagcgtgctgcggaggtaatgactgaatggatttgtggtgcgtttagattactgtctgtgttcttcggatgatggatgcttcttggatcctgcaaaatgtgtgatacaatttggggatccatgcgggcactgacagatggtcctcgtctatatgttcttggctcttgcattgcatgcattaggccgtttctgaaatcacattggtacaaagttgcgatagactccatggcgtttgagggttatatgttgatttttaataaatcgctctgaagtaccataattcaatttgcatgaagatcattcgattcttatcgatgcctgactctggcaattactgcgtattgtgattggcttattttagaagtttgagctcacacagtaactgcactcttccaatttcttccttcccagggctctgctgcttgtcacagat

SEQ ID NO: 237 - DNA, 669 bp, Zea mays
  misc_feature (28)..(28): n is a, c, g, or t
  misc_feature (125)..(126): n is a, c, g, or t
  misc_feature (627)..(666): n is a, c, g, or t
tccatctccaatgcattcttgaatggtntgtttctagctctaatatatccatcctacatgttacaatttttacaattttttatattattcccacctttcacatgaacagtacctagttccatcannaattcatctgggtgcatgagttatggttatcactaagcacacattttagaacatcgaataccttaggtatttgtgttgtttagttaaccatatctgtcaccttagactgtaacatctgattgtgactggaaaggcttcagtatgggttttgcacatgaaaattttgtccctgaattgatgtttgacttctctatcgtgtgcagctttctggacatgggatggtatattattgaactgtactgtcttggtactgagtactgacaaaatttagtgataacatcatatgctcaacaagcattttccttgctggcgttatgaacagttgtagtcaaaatgcttggacttttaattatcatatcagttgttgttggagtgctctccttatttctgtctatcaatgttgctagtcatatccatgccgaatgtttagtagacctgtactactatatttggttattgctcaattttattcatgctaatgcttgttgggatttttatagnnnnnnnnnnnnnnnnnnnnnnnnnnnnnnnnnnnnnnnnatt

SEQ ID NO: 238 - DNA, 381 bp, Zea mays
  misc_feature (72)..(72): n is a, c, g, or t
gatgaagtcagagatcatccgtctcttgatcgaggacgactgcgccgacaacgccatcccgcttcccaacgnggattccaagactctcgccctggtcatcgagtactgcaacaagcacgtccacgccgccgccgccgacgactccgccgccgcggagaccagcaacgcttcatcagctgggggcggcggcgaggtcgacctcaagaagtgggacgcggagttcgtcaaggtcgagcaggcgacgctcttcgacctcatcctggctgccaactatctcgacatcaaggggttgctggacctgacctgccagacggtggccgacatgatgaagggcaagtcaccggaggagatccgcaggacattcaacatcaagaacgactt

SEQ ID NO: 239 - DNA, 745 bp, Zea mays
  misc_feature (282)..(282): n is a, c, g, or t
  misc_feature (705)..(715): n is a, c, g, or t
  misc_feature (731)..(733): n is a, c, g, or t
cggttgtacgcgaagaagcggaaagagctccaggagcgccagaagctgaaggtaactatgatggactgtacatgttgtgtttggcaacattcattttccgacttcattcagtcatgctcactgtatttcaggatgtacaagtacaaaaggaggaaaaagatgagagatctttggatgagttactttgttttattaatggggatggaggtataattacagtgagttatattgactatatgacttatgttattctgttcactgtttgtttctgaaactctttanatgacttaaatctgacgttttactgaggccagatattggtcaattttactccctaagattctgttcttttgaagtattgactatctgttaccttggttcttagttgattttcatcattgtttcatgttcaaccaaagtctaaaggctgaaacatttgcttaattagtgttttgtttaaataaaaacattcttaggctccatataaaccatttgacaggttcaggaggtggggaaagtagtaccaagagtaagaaaaagaataaaagaaggaaggatcatgctaagaaccccgcaaaagctgactctgagtctgtaaatgtggttaggtttcctgactgtttctcctgctgtgtattccatataggatatgtatttcttacatgatctatctggggagtttaggagggagctgcttgtgtggtnnnnnnnnnnntggatagcagtaatgnnnctagacttccat

SEQ ID NO: 240 - DNA, 472 bp, Zea mays
  misc_feature (464)..(469): n is a, c, g, or t
ttatatttcctttttctgctatactaaagaagctggatttgcagtacactttcctcaccaccgaagaccattgccagctcattgcaaaatgcccgaacttactagttctcgcggtaatatctcctgctcatgtaaattatgaagatactcacttgttgatctttttttatcataattgtcattatatttttcgataggtgaggaatgtgattggggatagaggattaggagttgttgcagatacgtgcaagaagctccaaaggctcagaattgagcgaggagacgatgaaggaggtgtgcaagaagagcagggaggggtctctcaagtgggcttgacagctatagcggtaggctgtcgtgaactggaatacatagctgcctatgtgtctgatataaccaatggggccttggaatctatcgggacattctgcaaaaaactctatgacttccggcttgttctgctnnnnnnaga

SEQ ID NO: 241 - DNA, 388 bp, Zea mays
tgtgacggaggaagggttggtagccctatcttcgtgtcggaagttacagcgtgtgctcttctcttgtgttcgaatgacaaacacggcgctgatgacaatagcaaggtactgcccacggctaacgtccttcagactatgcattcgcaagcccaggtcagcagacgccgtcacaggacagccactggacgaaggctttggggcgatagtgcggtcctgcagaggcctgaggcgtcttgccatgtccggcctcctcacggacagcgtgttcctgtacatcggcatgtacgcggagaagctggagatgctctcggtaacgttcgcgggggacaccgacgacggcatggtctatgtgctcaatggctgcaggaacctcaagaagctggtaatc

SEQ ID NO: 242 - DNA, 789 bp, Zea mays
  misc_feature (734)..(771): n is a, c, g, or t
  misc_feature (775)..(780): n is a, c, g, or t
gagcctactctgagacagttttggttatggtaacttctatctgtgtttgatgctacagatacacttgtccaatatgctctaaaacagctcttgatttgacacatcattgggaaatgttggatcaagaggtatcaaatttctttctcgctggtagcagcatgcatactgacagagaaacaatgtttggtggtaacttaagattcaaaatctaggatgtgtattcctgtctatcaccttaaataatttggaaccaatttgagaagaagaaaacctttcagcaatcatgaaacattctttccagatgagatgatattgtagtaaaattagtaatatcatttggttggatatgaaaagggccactctagaaatatacttacacctgtgtgctgaatatgttttgttctgggcagctatattatgttgtttcctggtgcttgctgattgactgatggttagttccttgtcattttgtagatcgaagccacgatcatgcctcttgtgtatcgctacaaggtattctttctggtgtatgtatgcagcccaactcctagctagcttagtacattaacccaaggataataagttcatgacttggttatttgtgatgtaaatcagaaaccttcaccgttaggcgtttttcataacctacctagaaaacctctctagtcttttactggtgaatcatctatggtatagtggaataatagccacctttaactttatatctacgttcnnnnnnnnnnnnnnnnnnnnnnnnnnnnnnnnnnnnnntaannnnnncatgctgat

SEQ ID NO: 243 - DNA, 373 bp, Zea mays
  misc_feature (363)..(370): n is a, c, g, or t
aatcgcaagtcacacaacaccgtcagatctgaaatagcaaatcctgtgggggtttctgcatttcttcaagaagcgtgatggactgatggccccttcccgtgagctgctgagcaccgggatatctggcaagacactcatcactgtatccactccactgggtcctgcggaggcaaacagctcgagattgtatatctgctgctagctgccgcccttcgttatgcataagcctactcttgccgttttactcctgtcgctccgtgattctagtgtaataatgtcatatttactgttgcttcaagtatggcccgtacggctgcggttgaacggcggcgggggctgctgagccacagtaccttgctgtgnnnnnnnnctg

SEQ ID NO: 244 - DNA, 367 bp, Zea mays
tcgccatgaccggggtggtcgtcgacggcggcaagaccaacaaccaagccggcgcgggccaatactgaccgacgatcaagtgacgatcgacaccaatatgctcaagcaagaagccagcggcaaatcaattatgtcgccgctgggttttatgtattttgtgattctatatgcacgctagctgcttgtccgtcccggccaatggaaaaaaaaggggggaagaaaaaatgtctgtcggtatatgtgttctcgccgaataactctcgcgcatagctagctggtggggctgagtcactgccttcgctatatgtatacgtgcaaaaattagaggtggagggttgttttagctaatcccaccttaattccaagg

SEQ ID NO: 245 - DNA, 805 bp, Zea mays
  misc_feature (753)..(758): n is a, c, g, or t
  misc_feature (767)..(770): n is a, c, g, or t
  misc_feature (775)..(789): n is a, c, g, or t
  misc_feature (795)..(798): n is a, c, g, or t
cccgctctgctgccccaagggccacacattctgtaaggagtgcatcctcgagtgcctcctctaccagaagaaggacatcaagcggtaggcggcaacagttcacgctctttaattacttctctgtcttgttaattgcgtccttgctttagggggtggttggttgggccattgggggagtagagtagggtgcgccatggcagggaggagagaaggctgcatactttgagtatttgtgggaagaatcgtcaggctagtttatcactgctgtaaggctcaggcggctaatgattttttgtgcggacattaggggtgtttggttactttagtcacccttctaagctttagagactaaatttatttctatgcgggagatcttatttatcagtcatacagtttggtaatttaggcactaaaaattgactgtcactaaagtttaggaggtgggaaccaaacaccccctaacgccaaaggtgtccattatcaaacacttgacccttgccattactcactgtacctgcaaatgtatgtttgtttttctaaagtacatattaccagcaaccatgttcattagccactggtcattaaaatagtacgcctcttgtagttgccttacctagaattcatattgttcgtgacagacacacacaaaaaatttatgtatttggtcttaaactatctgcttttctaatacccttgttcttccagcaagctagcaacacatgaggcccagaaaaagcaagagaaagaagaggnnnnnnagaagctannnntgcannnnnnnnnnnnnnnggatgnnnntgatcag

SEQ ID NO: 246 - DNA, 835 bp, Zea mays
  misc_feature (812)..(820): n is a, c, g, or t
aagagtgaaaccaaggcaccagcaccaccaagcagtagtaaccacagcaatatcaaaccgaagtccaacaacaaaaaggtgacatctgttttgaaatatgcctatacggacggttataccatgagtttgactaatcttgaaatccttcatttaaaaaatatctctttgctatagttagttatccataaagcggagcagtgtgacatttatttttcatccatttcttatttatttcttgctaggggtggtaatagatcacgatctagatgtttcttcataattcgtttgagaccttagttaattttagtttaaaaatgaatgaaaatagatcatgatcctaacccgatcctatctttaaattttatagtgtaaaatttagagtcttaccaccacaatttcttgcatctcctcaatccatttgtcatatagtgtaaaatttagagtcttaccaccacaagcctcttgagtggtatttgttgtcgctaaccttaaccttagttcctcagtgtgtaaaatttatgtcatggtttccaacacgttagttgataaagctgtgaaacttcttttctgatttctacaatcacaccctgtcagcattgcttccacccaatctgtgttagtttgctgtctgtcgaaagctcatgaccttgtaagttatttatggaagctcaatttagttgtcgaatttctacacctagcgttctttacccaaacctaaggtcgaggggagcattcagaacactacccatcctctgcataaatgtatgttttaccctcttcccctctgaaacgtgcagaaaccaccggagccnnnnnnnnngcagccaaagccgcg

SEQ ID NO: 247 - DNA, 333 bp, Zea mays
gcgagtctacagctcggagcacgtccacggctgggacatgaagccggtgcgtttccagatgtcgacctccgacggacagcatgttcagtccaagtgctacttgagcgatcccggtatctggatcaaccaccatgtcggggacttcgtcgtgaaggactcgagcaggccagtgaacatcaggttcgcgatgattcagatagactgcacgcacacgaaaggcggcctctgcgtggattcggtcgtggtgaaacctcagcacctctcgcagaaaaaagcgccctggacttacgtgtagactcgtcgaacaagttgctgctgctgtctagggaggag

SEQ ID NO: 248 - DNA, 654 bp, Zea mays
  misc_feature (472)..(472): n is a, c, g, or t
  misc_feature (539)..(547): n is a, c, g, or t
  misc_feature (552)..(552): n is a, c, g, or t
  misc_feature (570)..(571): n is a, c, g, or t
  misc_feature (582)..(585): n is a, c, g, or t
  misc_feature (595)..(608): n is a, c, g, or t
  misc_feature (618)..(619): n is a, c, g, or t
  misc_feature (625)..(631): n is a, c, g, or t
  misc_feature (643)..(648): n is a, c, g, or t
ttatgccagttttctgaaaacaaagatggtctgttggcattaattgcgatggaatgggctgaagatatttactcatggtgtgattgatctgttccttttctttcttaacttagcacgtcattgattttatattcagctttcgaaagtagtgttactttctccctataatgatttatatggatgaatacctggtctcataattgtaggtatttattttaagatctgcataagcttttttttaccctggaacacaatagatgtgaatgcatacatgttgtcaaatgttaggattgagtaattgagctgattgtctctcttgaacaagagaagtagcttcctgcctcttgcacaagaggcctgcatctgttttgcaatattcatctatagaatgtttagaagtaatccaattcaatatttctagttcaaagtataggtgatatcatattcttggaagtcaaatatctgaccaatngttattgtttcttatcatgcagattccagtctgtagcctaccttcagcaaatctggtggtttgaggnnnnnnnnnaagtngatttctgcttccctgtnngaacatatagnnnntacttcaggnnnnnnnnnnnnnngttctacagnngatttnnnnnnngccagtgcaccnnnnnncatgtt

SEQ ID NO: 249 - DNA, 567 bp, Zea mays
  misc_feature (37)..(37): n is a, c, g, or t
  misc_feature (96)..(96): n is a, c, g, or t
tcttggcgagcatcagtttgcagtggcgaacttctcnaaattcgtaaccagattggtacgacagaagagctcttgtgtgtgttggcgtttgaaccngaaaacatgtggcaactttatgatcccctacgagacaagtggataactcttcctgtcatgccatctcagattaggaacatagcccgctttggcgtggcctcagttgctggcaagctctatgtaattggtggtggcagtgatcgagttgatccgcttactggagatcacgacaggatctttgcaagcaatgaggtttggtcttatgatccgctgcaccgtgtgtggtcccagagggctcctatgcttgtggctcgagcgatgtttgcttgttgtgcactggatgggaaaataatcgttgcaggaggcttcactaactgccgcaaatcgatatcaaaggctgagatctatgaccctgaagctggcatatgggagcctcttcctgaccttcgtctggctcatagctctgcatgtactggacttgtcatcaagggtaagatgcatgtattgcataaaggtctatcgacagttcag

SEQ ID NO: 250 - DNA, 381 bp, Zea mays
gatgaggaaacgtcacttttttggttcttgtgtaataaacaattgtctctatgttgctggaggagagtgtgaaggaatacagaggacgctgcagtctgcagaagtttatgatccaaataggaacagatgggcctgtgttactgaaatgaacaatgggatggtgcctttcattggagttgtatatgatggcaagtggttcttaaaggggctagattcccatcgccaagtaactagtgaggtctacttaccatcatccaatacatggtcagcaattgatgatgagatggtcacaggctggcggaacccaagtatttctttcaatggccgtctctattcagctgactgccgggatggctgcaagcttagagtctatgatgagaa

SEQ ID NO: 251 - DNA, 765 bp, Zea mays
gagagctctgttatgcagtgaagaatggcacttgtgccgcaagaggaataacttggacgagccgtggatctacgtaatctgtagggaagcaggcatcaaatgctatgtgttggctccagatcctccaagccggtgctttcgaatcatgcatgtcattgaacccccatgctcagggaggaaaggtgttaccattgaagctttagacaaaaagctatttcttctgggtggctgcagttccgtgtatgatgctacggatgaagtatattgttatgacgcctcctcaaatcgctggagctcagctgctccaatgcctacagcaaggtacttaatcggcaaagtccattgacatctttatattcactctcgagatcgagacatacctgtcaatctataattatagataacatgacacatgtactccattaatctgtgcctgtatatgtagtgcctcatgttttccctagaacagcacatatatgtagcatgtcatattcgtccttaggcaacaccttatatactatatctattggaccagttccttatgctccgccgcctccctttcaggtgctattttgtgtctgcatcccttaaggagaagttgtacataactgatggatacggcttgacggacaagtcaccaaattcatgggacatctatgacccggccacggactcgtggtgcacccacaagaacccgttgctcacccctgacatagtgaaattcgtcgcattgggcgaggagctggtgaccattcaccgagcggc

SEQ ID NO: 252 - DNA, 529 bp, Zea mays
aggctctggaagaagaagagtttctccaccagcagtaccaatacgatgatgacgaagatgatcttgacgaggaattttattacatgaacaggtccccaagcatccgtattggtaacaggagatggggtgacaatgggtacatcaggggaggcaggaaagaggcgaggccagtgaatactgatgtggctgctggtccatccaggactccgaagaagaaagagaaagccgcatcgtcttcggcgtcggtgtcagtgtctggttcggggtcaggatcggggtctgtatccaaggatgtcgctggaaggcgggcgaagagggcgcagaagcgagaagctgcagataaggcagctgcagagaagcacctgaagcacctgcagaggttggggctgaggaaatcgccagagcctgtagtgcccgcggaggttgggccacaggtgaatgagtgacttaagccgccgccgagtgctatatggtgctgctaaaaacactgcagccctttgggccacaaaataatcttccactgtgaaga

SEQ ID NO: 253 - DNA, 755 bp, Zea mays
gtgtctcctcggagtcgggcctagtgggttgatcaacatggttgtttgttagttggtcatggtgcgtgctgtcggtttacttggtgaggaagcataacatctatggagcaatgccaaactttgtattaaggagatctacatggccctgagagcgtgaaaccagcccgatctatgtgcgaacgtaggcttggcgctggaggccagcactgaattggcccagtaattaccacttaccagggatactagctttagcccaatagtgcagtctctcatccggtcatcccccttcccctctcccctccctccaagccagtgagcacggggtcttataccagccgctgctcccacatcccacaccaccaactttcatgacctctcggatcatgccatatgctccagtgcctctgccttattagttggctccccttctctggcttccactgtgctggcggatgcccagtctgtgcatgtcccttctctcgttcttgctcccagattaagaagttacaaagttattgattcccaaataactggagagaatcacaaattggtaatgccattttcacgacttcttggtctatttcagtctaatgttagttgttgcgtcggttatgatgtcagttatgatgtacgatgatactatgatttagcttgagtttatttaaacttatctcgtgtaacagttagcaatcctgttgatccagttccggcgcactgtttcttatgtcgcatccagcaactctgaaggatctttt

SEQ ID NO: 254 - DNA, 558 bp, Zea mays
gaacatgcccgagggtgagattcctcaccgcccaactggtcagaggcctgccccagccccccaggccgatgctaacaacaactttgccaatgccaatccaaatgcgaatccatggttcatgggcacaggagtccctttggctaatgcgcgctgggggaactacgcattctcagctgctttcgggggactattccctatgcttagcttccaagttcatgggtttccagatgctgctgcttatgcgcagcctgctgggttccactatgggtatggccatgggcatggattccatggcggccatatgggacacgcccatggcgtccaccgacaagcaccattggggcaacagcagcaggcagatatctacttgaaggccctgctcttcatgattggaattctagtgattgcaagcctcattgcgttttaaaataaaatttgttggcaacatctaccaggaggcctgctcgtcacggctgggacgtggaattctgggaatgcaatcctcctgacatgtcagagtccgttgatagcttgacatttgtgatggcatattggccc

SEQ ID NO: 255 - DNA, 509 bp, Zea mays
tggtcacccccatcccgcctcggccacaccatgtccgtctacggtacgactaaactgctcatgttcggtgggctggcgaagagcggctcgctccggctgcgctccagcgacgcctacacgatggacgtcggcgaagatagtccgcagtggaggcagctggcgacgaccggattcccaaacgtcggcccaccgccgaggctcgatcacgttgcggtgagcctgccctgtggacggatcatcatattcggtggctccatcgcgggactccactccccggcgcagctgttcctggtcgatccagcagaggagaagccgacgtggaggatcctgaacgttcccggcaaaccccccaagttcgcctgggggcacagcacctgcgtggttggcggcactagggtcctcgtcctcggaggccacaccggggaggagtggatactgaacgagctacatgagctctgcctggcaagcaggcccgacgacgacgacgatgaccgctactgactagtttc

SEQ ID NO: 256 - DNA, 246 bp, Zea mays
gttctctacgcccttgtcacgtttttgtttgcactgccctcatttttgatcctctactttgcctaccccagcttggattggcttgtcagagagatcttcgcttaattcgtgctgtctgaaatgtccgcgcagtttgtatccctgcgacaaatgatatatattggtatatgtattccatgggccacctgccctcgtaggccctgtatagtttcttcttattctctgtccttgtagcactctatttct

SEQ ID NO: 257 - DNA, 331 bp, Zea mays
aggctgttcaaatcccacaagacgccaccttccgctgccaccgccggttgacactacttcgcccaccgatgcaaatcatgccaaccatggggtccctgtccctctgctgaacgcagagagggtacaagcttcgctgcgcaagtccttgtcgttcctggttcacctgaccgccaagtttcccctggtgttcatcttcctcctgatagtgctctatgcgatccctgccagcgcagcagtcttgctactgtacatccttatcacggtgctgttcgcgctcccctcgttcctgatactgtatttcgcgtatccgagcctggactggcttgttagg

SEQ ID NO: 258 - DNA, 374 bp, Zea mays
attcgagggagaggcttctggttccgatcagcaacccagaaatccttcttggcagcacctgctacatcgagatggaccataacgctaagagagaggttgcaatcttttaccccgagggacgcccaggtggcaaaactgactctgtggcaagcattgtctctgcggagaggagaaacaaaaggattctcgagtcggtgaggcggagcctgcacgtcgatgatggcactgctgcgtactacttatctgttactgagggtgatccgagggctgccatgacggagtactccgaggacctgaggtgggagcagcaacgcgcaggtcggtagattcatatatattccaatggcatatgttaagatcatggtgcttgatcc

SEQ ID NO: 259 - DNA, 336 bp, Zea mays
gaaggagcagcagaatcctgactcaggagcctgcattcccaatttgttcagctgagctcagtaacaagaggatggatccaggtgtatattgatacggccgatgtgtttgtgtgagcgtgtgcctgtgctttgcgttttgtcctgccaagctgccattgcagcccgccctaaattagtcagggcgtatttactgttggcaggataatgaaaatactggcttactccttttgtgggctgtgactaagctcccatgaatctcacgataagcatttttctcgatccaatggtgtatactgtatcgttttgggctgaaggctgcagcttttttgctgttat

SEQ ID NO: 260 - DNA, 279 bp, Zea mays
  misc_feature (38)..(38): n is a, c, g, or t
  misc_feature (75)..(79): n is a, c, g, or t
  misc_feature (259)..(263): n is a, c, g, or t
  misc_feature (269)..(269): n is a, c, g, or t
tgccaaaggagaacagacaaccgaagaatttaacggcntgcagggtctgtaaatcaagtgaggcatgcatgctcnnnnngccgtgtcggcatctttgtctatgcaaggagtgcgagagcaagctgagcatctgccccctgtgccagtcctccaagatacttggcatggagatatattatgcatagaatataatttatgtatcacattagtatcgtacgagatactgctatgttaatacgtcaatctattgccgaagttnnnnncctatntaccactatt

SEQ ID NO: 261 - DNA, 480 bp, Zea mays
ggccattgttcccgcagctctcgcagcactcaccggcacaggtgctcaggaacttcacgcacgtcaggaaccttcggatcgagctcccctctggggatgtgggtactgaggagggagttctcctgaaatggcgagcagagtatgggagcacacttgagaattgtgtgatcctggggggtacccgggttgaccgcaagcctgttggtggagagcatgagccagctttggaggacaatggaagcatgccagagtctttctataccaatggtgggctgaaacttcgtgtcgtctggacaatcagctctctaatcgcggcatcaacaaggcactatcttctccgctcaatcatcaatggccatcccacactacagagcttggtactgacagatgctgatggccaaggcacattgtgcatgggggcaaagcagctggaggagttcagagagaaccagttgtcggcctcggcatgttccaacagga

SEQ ID NO: 262 - DNA, 342 bp, Zea mays
attagagcagaactcggatgctgcttgctgcatcgaggcggtagattgaccatccaggagtgtctgctgcagtgcgagcaaaaccctttggaccacctgtccttcccaataatcagcacagcgatagagtacgatccattctcatccctcaaggagcaagggcacggagtaacggtcgtccgcaccaggatcgaaggaggcgcgagggccgtcaggacgaacggcacactcgcgctgcgccatgtgcgggccatctattcccgcagctctgttttcttctggttcgaagtaggagagaaagtagaagcgcctgtacactagcaaaaaaacccgtgttcgttc

SEQ ID NO: 263 - DNA, 782 bp, Zea mays
  misc_feature (205)..(205): n is a, c, g, or t
  misc_feature (716)..(716): n is a, c, g, or t
  misc_feature (742)..(756): n is a, c, g, or t
  misc_feature (759)..(769): n is a, c, g, or t
ttgactgttgcagtcaccttggctgatagagcttgctgctttccatcttaactgcgatgattcagatgctgatgaacctagagctggagagttcttcaagaatggattcttcaagaatttttcctgtgacctgagtggagcacagccactactaacaatgaccatttctgaaactctgaagtatgagtacagcctaacttgtccnatttgcttggtgagatattctttaacttctgttttctttggctcataaatatctaaaaggatagcctttgttggtagggaagattgctgtgaaaactttgcatgttgtctctgcagggtattttttttctttcttcagtttgcttgaatatatgggggctgattttaacatccatttgtgatgattttttccacttgcaatgtgtacaggacactttgttcaacccttatgcacttagctgtgggcatctgttctgcaaagcctgtgcatgtggtgctgcttctgtctacatcttccagggtgtcaagtcggcacctccggaggccaagtgccctgtctgccgagcggtatgtgcgcaatcctacttgctgccagagatcattcttgttcagtctccttgacctccttgctgtggtggaacgtatcttctgtttgtggtatcttccgtttgtgacatgttttctttaaccgtatttgctacatcacccataaaccatcggggcgaaaatantttctttttttcttcttaatatgcannnnnnnnnnnnnnntcnnnnnnnnnnnttgtttttttaac

SEQ ID NO: 264 - DNA, 470 bp, Zea mays
ttccccattccgcctctctagctggcctgtcgaggaccctcgccatcctccccaggcgcaccaccaaacggtccaaacccccagcggcggcgctaggatttgagtctcagcgcgccggcaccgccaccgccaccggcggtgatggcagggcaggagcgtaggacaatcgatctggaggagggatgggcgtttatgcagaagggtatcaccaagctgaagaacatcctcgagggcaagcccgagcctcagttcagctccgaggactacatgatgctctacacgtgcgcctccttctcctcttactcctcctcgccgccaccgtctcctgcgcagcggccgcttggtttcacaccgcgatccgcctcgatccggttctgatctaggttttggtcctcttgtcgcaggacgatatacaacatgtgcacgcagaagccgccgcacgactactcgcagcagctctacgacaagta

SEQ ID NO: 265 - DNA, 737 bp, Zea mays
  misc_feature (704)..(708): n is a, c, g, or t
  misc_feature (713)..(720): n is a, c, g, or t
cataatcgtagtcgggagacgctataactaattttctccccttgctgttcagggtcaaatgttgacgattgtggaatattttctacttttgtatcgtgcattattgcctacacctgtgtggtaccgttttttcctgaacaaggagtatggaagcctattttcgtctctaaccactggcttgtatctcactttcaagttgacatctgttgtggaaaaggtgctatacgttcacttatctaatcactgaactgatacctagcgaatgatctgacacataatgtacctttgtcaggttcagtcttttttgacggcattgagagcattatctcataaagacttccattatggttcatatgcaacaagtgagcaggtagctaacgtcacttcttcaagaaacacaaactgatgaaaaattctgagatatgcattctgcattagatccttcaacacacatctttgtgttctgtgctcaggtagttgctgctggagacttgtgtgcgatatgccaagaaaagatgcatgttcccatccttttgcgctgcaaacatatcttctgtgaagattgtgtatccgaatggtaattcacataccccctccctcgccgtctaccgtgcgtgtggcctttcccatgcactattcttacacatctttcactgatttcattacccatttctgctttcttggcgttgtttggactatggaannnnngagannnnnnnnacgtgcccgctgtgcag

SEQ ID NO: 266 - DNA, 681 bp, Zea mays
  misc_feature (635)..(640): n is a, c, g, or t
  misc_feature (656)..(659): n is a, c, g, or t
  misc_feature (667)..(670): n is a, c, g, or t
agtaattcaagtaaaccaaggtattattctgattcttctttcggagagaacatgttatcctggtttagcatcacaggctacaaaaatatgtttttacatagcaactgacaaccttcttatttttgtatataatttcccaacatatcttatatggcagaacaatttaaattcgtaatgttcatataatcacataaactgttgagttgcatgtgttttattttctgcagatcctcttggagttcaaggaagaaaaattttaggacaaggaaaatatggatgccgtgaggtgatttttactgtccgttttcccacttgttctagacaatgttgtagccatagggttgtcctattgtaaattgtaaaatataattaagaccacaacgcgtgagaaaaattcagtattgtagcctatgcatgatcaacttagatttagtaattcttttttatttggtaaatgtatagcctttacccaaccagcaacagcctagcaatgtgcatgcctgtaggttgtctgtttgatgtattaggcaaaagcttcatgtcgtattcaatgggatccaaatctgcaggcaatatttgattaaattttgcattcgtgatcaagtgaagcacaagcattttttagtagagtagtnnnnnnatgcctgtatggagannnnatcagaannnnacttttttgtc

SEQ ID NO: 267 - DNA, 825 bp, Zea mays
  misc_feature (753)..(754): n is a, c, g, or t
  misc_feature (762)..(767): n is a, c, g, or t
  misc_feature (774)..(805): n is a, c, g, or t
  misc_feature (815)..(818): n is a, c, g, or t
tgatcatagctgatggacaggtaacatgttcataatagcatcaaaatacttcactagaattatgaacatatttgacctgataaaaagttgtaggtgactgccgcgaatataaatgatggaagattaagtccacaggaacaagcaactatacaagcaattgtcgatgctaggtaaaattcagttcatcattccttagaactttggtcttgtggtattactgaagcctatttggttgtcagctactatcctctttcaatagtaatggttggggtgggtgatggaccatgggatgcgatgcagcattttgatgactgtatccctgaaagagcttttgacaattttcaggtgattataatactgctctatgatgttgaaattccaaagccttgatgttcctccacttatagcagtaccctgttcttgctatcgtacttgtaccagtcattgttttacataaagttgtaaacatattgattattccagtaagaaaaactatactaacctgaattaaacttattttctaccgatgccttttttagtagaatagacttcatgatgatgtgctttcagtttctggcctattggccttctgagaatctcattgatgaactattgcagtttgtgaacttcactggtattatgtcaacaagtaaggatatgtcaaagaaggaggctgcatttgcccttgcagctcttatggaaataccttctcagtataaagcaacgcaaggcctccgacctccagagtaccanntcttactnnnnnntttgtgnnnnnnnnnnnnnnnnnnnnnnnnnnnnnnnnttcttttttnnnnttgctga

SEQ ID NO: 268 - DNA, 602 bp, Zea mays
  misc_feature (272)..(272): n is a, c, g, or t
tttggttgagttgtcaccggtatctcaagtttgtcgtttgtggcgcttggcctgttcagatccacttatttggggcactcttgactttggattgttaaaatccaattttattcagacaagagcatcaccatatatttgggttgatgataggtctgacaggagacttgcaagaatactacgggtggctatggcaattagctgtgggaacgtcaactgcatgatatttcattacaatttgttcatgaaagatgagcaccttcatttcatctcanaaaggtaacagcaccttgtatgttttatcaatgctgtggttccacattcttatatattgatgtgtcatatgttgtgcaactttaaaagtttatttttaacacgatagttgaagtacatcttatggtttctatagaaatggccaaatgggtgtttgcatctagtggtgatatatgagctctcagttgaatcatgcataaacattaacacattatcacaagtaaatattctatgttttgtaaatagtaactattcttttgtacacttttgtgttagtaaatttgaatagctgctatttcatagccattcaaacagtgtgggtgtgtgcgttt

SEQ ID NO: 269 - DNA, 1426 bp, Zea mays
  misc_feature (546)..(546): n is a, c, g, or t
  misc_feature (567)..(567): n is a, c, g, or t
  misc_feature (584)..(585): n is a, c, g, or t
  misc_feature (1325)..(1325): n is a, c, g, or t
  misc_feature (1372)..(1380): n is a, c, g, or t
  misc_feature (1420)..(1421): n is a, c, g, or t
  misc_feature (1423)..(1423): n is a, c, g, or t
tttgaggattgggaatatctcttttcgcctatgttccttctttggacgagtccgtaaacgtgcatgaagtttgattttttcccctaggttccacatttacactaatttggtcatgttagcttatggatggcaaagtactatttctcacgggttctgaagcagaattccaatccggatcgaggggaaaatagttcattttatcctaaaccccctccaattatggataggatttaagtttccaaactagccctgagtgaatgttgaaactctgattgggaaacatgggaaatttgtttttagtgaaattatatttctttatgaagtgctgttttgttttgtttttctttttttgaaaattggtgtcgtgctttttttttttaaaggaaaaattttcagggggggttgggggttgggaccctttttaggggcaaaaaattggtcttttttttctaaacctttgacagaatttttgggtttttgatgcaagttgttcttccaaacaatttgccttgaaaataccttttttttgggggaaaaaaaaagggngttttttttcaaatcagaagnctgtttccaagttggannctgggaaccacaaggagcagttatggctggagcatcactttcattttggttgcatgatgactctcgtcagaacagcaaacccctgcattttttgtgttatactgcttccatcctttcatatatgacgccaaacagtacggaaatgaactacaaaacgtcaaataaaaaacaaatatggagggagtaccatgggtgcagcggtaatatttatcttgaccttgtcgtttaagattcaagttgtagttgtttttcttcttcacaggataagcttacctctttgttgaaatctgatgaaatctggtttaatgacacttccattcagctcacctctttgttgggtcaggataagcttggctttggctctcccttttccagtctttatcttccactggatattttgtgcttttactagagataatcttccacttccttgagccaatatttgactaccactagatattttgtgctttgcatgcatcatgcatcatcatcatcaagcctgacaaatctgacctttccattacccgtgctcccaacctatcatattcataccattcactcgaacaatctgtatcgaagctattataagcgatgatcctaccatattcaaacaatctgtatcataacagaagttcgttcgctctttgcactacaggaacgcgaaatagaagtcctgccccttctgtcgcgcctgcctggaagaggtgaagccgggcagcctgtggatataccccgacganctcgcggagggggacatggataccttgactagggagaacatcaggcnnnnnnnnntgtacataaataagctgccacttgtagtcctacatgtagnngncct

SEQ ID NO: 270 - DNA, 422 bp, Zea mays
gagctcacaagccatacattgaaaagtctatttgcaaaatcggtaggtgtagataagatcatacttgatgcagataatttggaagttctgcacctgaatgctttaaatctcgatctgtttgagcttaacgggaaaggaacactaaaacattttaagattgatgatgtcagtgttactcatttggatattggggacaatactgatcatttagaggcagtagacgtgagcaacttcacaatagtctggccaaaattctatagcatgatatccagggcatctaatttgcgtatgctacgattttggggtgttgtgtttgatgacgaggatgagatcgtggattcagaaactatagctgtttcatttcctcttcttaggcatctttcattgagttatgaattacgagatgggttacttcactacag

SEQ ID NO: 271 - DNA, 766 bp, Zea mays
  misc_feature (696)..(701): n is a, c, g, or t
  misc_feature (716)..(721): n is a, c, g, or t
  misc_feature (758)..(760): n is a, c, g, or t
atggtggagctgctcgtcggccgcagcggcggctcgtgccgccggatcagcgtctccgggctgccctgcgatccgctcttctcgttcatcgcagacaagtaagtgtgagatctggcaatgctctctgttttttattttatgttattttattttgtcacgattcctgtgggcagtgaacagaacactgaacagttctgtcaaattcttgtgttgttcatctgcagtagattagaattctagctcatttgcgtagagcaatagattagaattctaagcctatctgtctggtttcgtttcaggctgtcggttgtctcagtcagaacaagcctttctattttgaatttctgatgtgcgaattcaggtccattttatttgtctaggctggcttagggatcgttctgattgattgattgattaggaggctagaagtgggcctagtgggatttgatgcattccaaggcacgccttctggtcttgaatcttacttgtaggatataacaagttgagcaatttgatgtatattgttctgaattgtttgcattgtgaactaggattagaccttttttttcttcgaattgtgtccattggatttgcaagtacacacacaagtactggcacacactcatcaggctctcacaattacaccacgtcacgttgcctattggcagatgaggacagtcatcagttggtccgcannnnnntgctgtcattcattnnnnnntttgcactataactgatccctgcttcatctttttttnnncaatct

SEQ ID NO: 272 - DNA, 391 bp, Zea mays
gcacactgatacccatggtttgcagatatcagaaactgttgttgaacctcaagtaggtagatctgagggagacttgttgcctacaagttctacagatgatctacatatatcagtggggagaacaaaacaatctgatgcaggtgaattacgcaaaggaaatagcatagatgatagcactccaacttatctagatatcacgataggacatttacctgaacgcaaaactgcatccaggatcacaacagagggttctggtgagtttattactgggaaaggaatgttagctggcacatcttctgtgaccatcagtgcaatggaagctggtcgcagtgaagatggagctgattcgatatatgatccttcaggtgctataactccttatcatgatcct

SEQ ID NO: 273 - DNA, 505 bp, Zea mays
  misc_feature (492)..(502): n is a, c, g, or t
ggggcgaggctaagcatgaccagaagcagagcctgatggacaaggcgaaggggttcgtcgcggagaagatcgcgcacatccccaagcccgaggcgacgctggacggcgtgacgttcaagggcctgagccgggagtgcatcacgctgcacagcagcgtgaacgtgtccaacccctacgaccaccgcctccccatctgcgaggtgacctacacgctccggtgcgccggcaaggaggtggcgtccggcaccatgccggaccccggctggatcgccgccagcggctccaccgcgctggagatccccgccaaggtgccctacgacttcctcgtctccctcgtcagggacgtcggccgggactgggacatcgactacgagctccaggtcgggctcaccgtcgacctccccatcgtcggcaacttcaccatcccgctctccacctccggcgagttcaagctccccaccctcaaggacttgttctgatctagtagtagcnnnnnnnnnnnttc

SEQ ID NO: 274 - DNA, 888 bp, Zea mays
  misc_feature (770)..(776): n is a, c, g, or t
  misc_feature (827)..(833): n is a, c, g, or t
  misc_feature (848)..(863): n is a, c, g, or t
  misc_feature (879)..(881): n is a, c, g, or t
ggtagccattcgcggcgcaaagtacgcgttagaagaccaaggaattgctccgacagtagaggtagggcgaggctatactgttcaagttcccagccatccaactgcgtagtatttcaagacgcaatttttccgatctgttgtctcggtgatatggctcgtctttcagttagtttcctatcgatttcagtcctaatcaaataacagagagttctgaaacgttctgatgttcttgtatcaccttgcttctggcaaaatcctctcagaacatagcggagtcgctcaacatatccgagaagaaagtgcacaacgctacagaggtaaaaacaactcaatcttgcatgttagaatttcttctggtttgacatctctgccaatctcaaaagcattcgcatacgcaggctgtgcacaaggttatttcactggatcaacaggcgttcccctccttaaacggcctacctggggatacactccatagtgtaagtagagacatacgaagcgttctatctttctttttttaaccaagtgacaggagctctgtctttcaattaagagatggaaaagatttagagtacacagggccggcgatactcaggccaaaggatcagacacctaagaaggaacacaacagacacatgggtatgctggaaactaactttgttccttttctcctcatgtttttcagtacatagaggatcaaaacgttgcaaatgatccgtggcacggatttgaggaaaggtacctcaaggtatgcacaccaatgttcttccgannnnnnnactaatgcatactgatttcttgtgacgacgatacgccattagtatcaaacnnnnnnnatagcttccaatctnnnnnnnnnnnnnnnncatggccctatcacannnatcactg

SEQ ID NO: 275 - DNA, 366 bp, Zea mays
ctattagataactcacaaaaaagaaatatgtaagcattgaggagtttgcagcagatgtgaggctaacattttcaaatgctatgaagtataatcctccaggcaatgatgtgcatatttttgctaaagaattgaatgaaatgtttgattcagaatgggaatcagtagaaaggaaatttagaggccgaaaccttggtcaagaccagcagacaatgaaggccataaaagttcgagctatcatggattcaaagtctacagttgctagagggccggttgcatgctcaaaccctaaaactttggttgctagaggtccagtagcttgctcaaattcgattgcaaagaagacactgacagatgcattatcctcca

SEQ ID NO: 276 - DNA, 789 bp, Zea mays
tatgaggtagagggagttccatacgagcgaggtaacagatccattgagacgaagcgaataagaaggtacgaatagatcaagcctgtggcaaaattatgcaagtttccaacaaatgtctgagcagagaggtcactttttgttgtggggtgcattgctcctgtaaatttcaggatggtgtccaatagggagtctgcgcggcggtctaggaggaggaaacaggcacagttgtctgaccttgagtcacaggtaccataaccacctcactcacctggccaggaatgacttccaaccaatgatgtatactgcaagtttgtaggatgcgcactgacatgttgcctcgttatcaggttgaacgactcaaaggtgaaaacgcaacactgttccagcaactttcagatgccaaccaacagttcagtactgcagtcacagacaacagaatcctcaaatccgatgtagaagcgttaagaattaaggtgaccagttcgcttctcacagctgccacaaccactgaaagatcacaaactttgcagctctctaacagtaaccaacccgtttgaatttgcaggtaaagatggcagaggatatggtagcgagaagtgctgtatcgtgtggcctaggcgaccttggcctggcaccatacgtgaactcaaggaagatgtgccaagctttgaatgtgctcacagggttggatttactagggagtgatgcgttcaggggtccaaccgcaggtacacgagtacagaactcaccagtacagagcactgcaagcctagagagtctggataaccg

SEQ ID NO: 277 - DNA, 821 bp, Zea mays
  misc_feature (771)..(773): n is a, c, g, or t
  misc_feature (802)..(803): n is a, c, g, or t
  misc_feature (811)..(812): n is a, c, g, or t
gagccgtcccggaccgggacgccggtgagggcgacgagcccaaactgctcccagccaacgactccacggaggacgctcggcggccccagcgcagtcggctccttcatcagccacggaggagaatgcagcagctcggagctgagcgagcaggagctgcagaccaaaaccaggagggagatcatgctccttggcacgcagctaggcaagaccagcatcgcggcatgggcgagcaagaaggaggaggagaaggacgcctcgctctcgctgaaaccggtgcccatggaccagtcgacgcagaacataaccgcgatccgcgcggctgcgtgggaggaggcggagaaggccaagtatttggcgaggtgcttatgtctgattgtcttttatagtatctatgttcgaatcctctgcgtgctcggtgacgggtgactttgatattatcttgtgcttttctgctctgcagattcaagcgagaagagatcaagatccaggcttgggaggaccatcagaaagcccagatagaagctgagatgaggaaaatcgaggttcgcagactgtttcctgtcaattttcctgttaataacgatgggcgataacgatccctgatggattctccacgttaccgagacacgcatgcattttcacctcttgagttttaacttgtaaaagcttaaaacacagaggcgaaacgttagcagcctagatcccacacctgctgcggctactattcatctgaactcaataacttacagccatgaagatgcaatgcattcnnnaatttagcatgagatataacttacagccnngacactanntttcgactg

SEQ ID NO: 278 - DNA, 374 bp, Zea mays
ttatatggtttattcatgttcaggaacaactggaaaagaagaaggctgaatatgcagagaagatgaagaacaaggttgcaatgatacacaaggaagccgaagagaagcgagcgatggtggaggcaaaacgcggtgaggaggtcctgaaggccgaggagatggctgccaagtaccgggccaccggccacgctcctaagaagctcatcggttgcttcggagcctaagaagccttccaagtcagaccgcgagcagaaagtgaaaaacgtgtgaaaaacgtcagccagtgattgcttggtcctctcgctctatcaagtgtgtagtgtgtcttcgaaagtttgtaaagcctactgctgctgctgtatatactgatatcg

SEQ ID NO: 279 - DNA, 373 bp, Zea mays
tcctagagagcgcatgcaagatggttactgaacaatttgcttcgagtggcttcagtatctccaaccctgatctcccggagatatcccctggaggggtcatgtgtggctccacggacacgttgggctcgtcggtgttgaaccagctttctgtgagctccatcgactcgcacagtccaggaggcaaaccttctccatcaggcatggaaggtccgacactgctccagaaatcgcctgagctcaagcggaggtcctcttgaactgtgacatcgaattctgaggttggtgatgatggctgtctctgtggagtgtctgaatatggtggtgacaatggaaatggtggcccagtcttgtggtagctgactctctctccagg

SEQ ID NO: 280 - DNA, 779 bp, Zea mays
gaggaaggcaggcactgatggcggcgggcggcggaggcggctcgccggcgccgttcgtgtggaagacgtacacgatggtggaggaccccgggacggcaggggtgatcggctggggcagcggcaacaacagcttcgtcgtcgccgaccccttcgtcttctcgcagacgctgctccccgcgcacttcaagcacaacaacttctccagcttcgtccgccagctcaacacctatgtcagttaaatcacacactccagctagctaaattgattgccgtctctcttctacgagctgaaccctgctcttgggagagcgctggatctgtataaactttggcgtgtgtaccgaatgctcttgctgtgctgtaccaacacaaatttgtaaattggtttttgttggagaaaaaaaaaggaaatatgtaagcttgctacctgcagcgacgaaattcttcaaaacatctttggagatcgaccattcaaaattcgtagacaaacatatggacagagatggagccgcgtatatatatgcaacgaaattctgcagacagttcggtgaatatatgcacggagaaaaattggtttttttgcgcaatttacctatggatttctgcaagaaccgaacacaccgccgtgagaactttataaatcgcgagagccaagagctgcacagctagtactagtacttcccttgccctgacttggtattttcagggcttccgcaaggttgatccggaccggtgggagtcgcccacgcgtcgttcctgcgcggccagacgcacctcct

SEQ ID NO: 281 - DNA, 494 bp, Zea mays
tgataaagagaaggaagccaccatcagctgtggcaccattgcgacagcaacgtgcccctgcttcttgcctggaggttggtgagtttggatttgaggaggagattgataggctgaagcgtgacaagaacattttaatcacagaagtagtaaaactaaggcaggagcagcaaagtactaaagatcatgtgagagccatggaggaaaggctacgagtggctgaacagaagcaggtacagatgatggggttcttggcaagagcaatgcggaacccagagttcttccagcagttggcccagcagcaagacaagaggaaggagctcgaggataccatctcaaagaaaagaaggcggcccattgacaacacaccattctacagtgatggggaaagcgaacagcttgattcacagttgaaaatgttcgagtcaggtgttctcaatgggctcaatgaacctgagctggagaatttagcagtgaacattcaggagcttgggaag

SEQ ID NO: 282 - DNA, 369 bp, Zea mays
  misc_feature (362)..(364): n is a, c, g, or t
ggcagcgattacctgcagccgccaccgccgtacgtgttccccgtcaacagcggcggctactgactgatggcggtctggtagtccagcatctatccgagcgatgtggcgtgcttcgtcgtcgctagttgccccccctcccgagtgacgtgttggactgaagtggcaacggcgccggcggacggtgagcaaccaacccaagataattagctaggaggtggtacaaagtgtaaagcctttggtttaggcaggtctgtggtgatctttaatttgcttgttgcaatgttttccttccctaccctgtcaagtgaatgctacggatcagcggcggcaaaagccgttagctgcagctagtttgccgctgnnnttcat

SEQ ID NO: 283 - DNA, 504 bp, Zea mays
cgtcggcactgcgaggagctcctgggcttcctctcgcgcttcctcgacgtccggcagctcgaccttgggctgctcatgcaggaagacgtgcgagcgggtgccggtgacgacgccgcgccgcgccgcgcaatggtcagccagctggagcgcggcggcgaggaggggaagagcgtgaagctgttcggcgtactcctcaaggacgccgcaaggaagagggccaggtgcgaggaggcggcggccagcgagcggcccattaagatgatcagaatcggcgagccgtggatcggcgtcccgtcgtcgggcccggggcggtgcggcggcgggaattaagtaaggtatggttggaactgatgcgccacggccggccgtgtgacagctttattacagcgagcgcatgttcgagtcgtggatgctttttgtgcgtgtttgtatttgtcatccaaggtgaggttgatggcaaggataattccagtgctgtggtaaaactgtgaaggcagaacacag

SEQ ID NO: 284 - DNA, 655 bp, Zea mays
tcttgccggcgacgtcccctgggagtaagtggaaaccggcaccagcatcccctcctccctcccattcgcagcttcgcacacacaacaacacgtccgcgtcaccccggtcactctcatagaattcccgtctcacgtgcccgggtgccgtcccgcccctgtccgccgcaggatgttcgtggccaccgccaagaggctgcgcgtgctcaagagctccgacgtgccggcctcgtcggtgacggtgagtccccgtgggggccctgaccgtccgtttcgcgagtgaagctttcgctcgggcatcgcaggtcccgttcccgtcggtcgattgacacgcacttgtttttgcagctgggagctgggggcccggagaggtctgcagccgactgctgctgctgaaacgtgctctgcttcgtcagctgcttgtaaaaagtcccgagtggaggagacgaggagtggccctatccctggcctcttttttgtgtgttgctcttgctgcctttctgctagtggtactagtattgggtgccagtaaaaagtaggagaacaaagtcatgacggtattaaggatgtaatgtgcaagattagcagtggtagtagtcgtaaggtgtttaatgaatctacggtctctgttttggggcatattcgaccgtttaaagct

SEQ ID NO: 285 - DNA, 917 bp, Zea mays
  misc_feature (728)..(728): n is a, c, g, or t
  misc_feature (758)..(768): n is a, c, g, or t
  misc_feature (818)..(818): n is a, c, g, or t
  misc_feature (846)..(854): n is a, c, g, or t
  misc_feature (859)..(865): n is a, c, g, or t
  misc_feature (873)..(879): n is a, c, g, or t
  misc_feature (888)..(892): n is a, c, g, or t
  misc_feature (902)..(903): n is a, c, g, or t
tcatgatcgaggaggcacttgataatggactgacgaacctgaatgagaaactggtaacaaatccacccagtcagtcgatatcaatgcggttgacgctgcaggtattgtcatccgtgtaataaattctgatatcggttgctttgctgatgcagatggagcactgggaaaggcgtgtgacaaacgtacgagcgtaatctggctaatgattctgtacttgtgaattttatttgaacatgtgtatggttcttttcagttctttccctcatccactgctttgttgcttgttggtttgttgtagactaagatgatggaagacgagaacaaattgctggccttcaaactcgtaagtgtccttgcagagttgaatcccgcgagctgaatttgtacttgaaagttgaaaaggctgaccactctgtcactctgaaaaaaacattttggaatttaagactacctttactttgatgcttaaatgacgcgtgccgcatacagacatacagttttcagagaccaagttaattcactagttaccgctttgctgctgtttaactgtctgacacttagaatgcttgcctgagccaccgttttccttggttgtctgcagcaccagcaagatatcgcgctgagcggcagcatgagagagcttgagctgggttaccatcctgaccgggacctggcggcccagatgccaatcaccttccgcgtgcagcccagccatcccaacttgcagnagaacaattagactgctggatgccctcgtnnnnnnnnnnnaggatttcacccacccaccagcgctggcttgtatgccctcgtgcgctgcnaactgtatctttatctttccggtatgtnnnnnnnnncgtannnnnnntgtcagtnnnnnnngcatgacgnnnnnatgtcgtgcnnctctctctctctct

SEQ ID NO: 286 - DNA, 564 bp, Zea mays
  misc_feature (553)..(557): n is a, c, g, or t
gctggcctcccaccacaacagccactattcccaattcagaatgtgcctactcctatgacatcagcagctgctaatgtacttcaaacatcgtttcctatggcccctccaggagtaccttcacctgttgcccctcatgtttcccagcctttgtttcctgttaacacttcagctgtcaatggagctgtaaattccccatttttagcatctgttgcacctggaaccattccagcaagctctccagcagcagtcggtgttgcaggaattggatatggaaccaataaccaaggtatgttgatcttaaagctcttcctatgtcaatgcactgcaatttggtatattttcgcgaaagggcctctagcgtaatggttaaggcttccgagtagcacctccaggttcagggttcgttccccctctggggcgaaattctggcttggttaaaaaaaaacccttgctatgccccgcctgctctcgggttacgtcctgtgcgccatgctccggctgggctgttgcagagtgggcggtgacgacccgctagtgatggggggcagggttnnnnnattttct

SEQ ID NO: 287 - DNA, 839 bp, Zea mays
  misc_feature (771)..(777): n is a, c, g, or t
  misc_feature (787)..(795): n is a, c, g, or t
  misc_feature (804)..(833): n is a, c, g, or t
ctcgatcgccatgtctttcaccggcacgcaggacaagtgcaaagcctgcgacaagacggtccacatcatcgacctcctcaccgccgacggcgtctcgtaccacaagacatgcttcaagtgcagccactgcaagggcgtcctctcggtatgcatgcgtggcctgagctcaactccgcatgcgcattcgccctgcttgcgatgtgtgcggcaatgcgctaatgctcatttgcatcgaaagaaacgaagctttgtttgattcggttcagatcatctcgacagatgaacatgtagaaatacggtctcattttttcatttctgcatgcgtctcctccagattagcagctactcttccatggacggcgtcctgtactgcaagacgcactttgaacagctcttcaaggagacagggaccttctcaaagaactttcaaggtaatctacagctgaatactgtgccccctatgtttctgaacccgtccacagcgcgtgatgctgtaacgctcaactctggtgcctgatgcaatgcaatgcaattcggaccctttaatttcgttgtgttaattactcaggtggagcatcttcaaacaagaacgaccaggtgcggttcctcaaatcttctacacaaatatggctcaaatgctcaataagttctaaaactttattggccatgccatcatcggtaatagctgactacttacgcacgatgccaatctgaaaatctctgcaggcaaaggctccaagcaagctatcatctgcattctctggaactcannnnnnntgcgcggccnnnnnnnnnacagtgtannnnnnnnnnnnnnnnnnnnnnnnnnnnnnctctgc

SEQ ID NO: 288 - DNA, 800 bp, Zea mays
  misc_feature (652)..(652): n is a, c, g, or t
  misc_feature (686)..(687): n is a, c, g, or t
  misc_feature (702)..(702): n is a, c, g, or t
  misc_feature (768)..(769): n is a, c, g, or t
  misc_feature (779)..(788): n is a, c, g, or t
ggagcagtcagcgtgagagatggggaggcagccgtgctgcgacaaggttggcgtgaagaagggcccgtggacggcggaggaggaccagaagctcgtcggcttcctcctcacccacggtcactgctgctggcgcgtcgtccccaagctcgcaggtgagaatttcccgtcaccatgtatgcatgcgatgcgatgtgtgtgactgctgggcggtcgtttctgcttcgccgcgctccggttccctgaccttgactggcatcgtgtgtgtgtgtgcatggttcgtgcgctgcagggttgctgaggtgcgggaagagctgcaggctgcggtggaccaactacctgaggccggacctcaagaggggcctgctctccgacgacgaggagaggctcgtcatcgacctgcacgcgcagctcgggaacaggtgcgtgcgtgcgtgacttgttggactgcgaaattctccatggttttcttgggctctcttctccatcaagcggcctcgggtcgggtctcatgcgacgcggacggactggtcctctgttttcacgcgcctcacaccgcacgacgcaggtggtccaagatcgcggcgcagctaccgggcaggacggacaacgagatcaagaaccactggaacacacacatccgcaagaagctcgnccggatggggatcgaccccgtcacccacctgccnntgcaggaaccgccgnctcctgctcctgctcccgccgagcagcaggagcagagccacaggcagcaagaagaactgcaactgnnagagctgcannnnnnnnnngagcttatcatg

SEQ ID NO: 289 - DNA, 800 bp, Zea mays
  misc_feature (167)..(167): n is a, c, g, or t
  misc_feature (177)..(177): n is a, c, g, or t
  misc_feature (226)..(226): n is a, c, g, or t
  misc_feature (238)..(238): n is a, c, g, or t
  misc_feature (489)..(489): n is a, c, g, or t
  misc_feature (500)..(527): n is a, c, g, or t
  misc_feature (529)..(534): n is a, c, g, or t
  misc_feature (536)..(538): n is a, c, g, or t
  misc_feature (552)..(553): n is a, c, g, or t
  misc_feature (652)..(652): n is a, c, g, or t
  misc_feature (686)..(687): n is a, c, g, or t
  misc_feature (702)..(702): n is a, c, g, or t
  misc_feature (768)..(769): n is a, c, g, or t
  misc_feature (779)..(788): n is a, c, g, or t
ggagcagtcagcgtgagagatggggaggcagccgtgctgcgacaaggttggcgtgaagaagggcccgtggacggcggaggaggaccagaagctcgtcggcttcctcctcacccacggtcactgctgctggcgcgtcgtccccaagctcgcaggtgagaatttcccgncaccatgtangcatgcgatgcgatgtgtgtgactgctgggcggtcgtttctgcttcgcngcgctccggttncctgaccttgactggcatcgtgtgtgtgtgtgcatggttcgtgcgctgcagggttgctgaggtgcgggaagagctgcaggctgcggtggaccaactacctgaggccggacctcaagaggggcctgctctccgacgacgaggagaggctcgtcatcgacctgcacgcgcagctcgggaacaggtgcgtgcgtgcgtgacttgttggactgcgaaattctccatggttttcttgggctctcttctccatcaancggcctcgggnnnnnnnnnnnnnnnnnnnnnnnnnnnngnnnnnngnnntcacgcgcctcacnncgcacgacgcaggtggtccaagatcgcggcgcagctaccgggcaggacggacaacgagatcaagaaccactggaacacacacatccgcaagaagctcgnccggatggggatcgaccccgtcacccacctgccnntgcaggaaccgccgnctcctgctcctgctcccgccgagcagcaggagcagagccacaggcagcaagaagaactgcaactgnnagagctgcannnnnnnnnngagcttatcatg

SEQ ID NO: 290 - DNA, 1245 bp, Zea mays
  misc_feature (750)..(1025): n is a, c, g, or t
  misc_feature (1031)..(1242): n is a, c, g, or t
ccacggacgaggagctcatggtgcactacctcatgaggcaggccgcctccatgccgtgccccgtccccatcatcgccgaggtcaacatctaccagtgcaacccctgggatctccctggtacgtgattctttatttctttcttccctctcttattcgttcattgtcacttgagttgagtcgttcagactagttgtgttattcctagctaatccaaatctgcatcgatcagttgaatctcatatgatttaattattctttcttcctcctgtggtatcgtgttcgttcttcagccaaggcattgttcggcgacaaggagtggtttttcttcagcccccgggaccgcaagtaccccaacggcgcccgccccaaccgcgccgccgggtccgggtactggaaggccaccggcaccgacaaggccatcctgtcgtcgtcgtcgtcgtccacgcccacgagccacggcggcgccaacatcgtcgtcggcgtcaagaaggcgctcgtcttctacggcggcaggccgcccaagggcaccaagacggactggatcatgcacgagtaccgcctctcgggcgcggcggacgacgactgcaagggcagcagcaccaggcgcagagtgtcttcctcctcgtcgtcctccatgagggtgagtgagactttctttttctttttcttcttttttttaattgcacttgcttgcacggctccagacctgactgaagcgtttcgcatggtttcagctggacgactgggtgnnnnnnnnnnnnnnnnnnnnnnnnnnnnnnnnnnnnnnnnnnnnnnnnnnnnnnnnnnnnnnnnnnnnnnnnnnnnnnnnnnnnnnnnnnnnnnnnnnnnnnnnnnnnnnnnnnnnnnnnnnnnnnnnnnnnnnnnnnnnnnnnnnnnnnnnnnnnnnnnnnnnnnnnnnnnnnnnnnnnnnnnnnnnnnnnnnnnnnnnnnnnnnnnnnnnnnnnnnnnnnnnnnnnnnnnnnnnnnnnnnnnnnnnnnnnnnnnnnnnnnnnnnnnnnnnnnnnaaaaannnnnnnnnnnnnnnnnnnnnnnnnnnnnnnnnnnnnnnnnnnnnnnnnnnnnnnnnnnnnnnnnnnnnnnnnnnnnnnnnnnnnnnnnnnnnnnnnnnnnnnnnnnnnnnnnnnnnnnnnnnnnnnnnnnnnnnnnnnnnnnnnnnnnnnnnnnnnnnnnnnnnnnnnnnnnnnnnnnnnnnnnnnnnnnnnnnnnnnnnnnnnnnnnnnnaaa

SEQ ID NO: 291 - DNA, 1245 bp, Zea mays
  misc_feature (167)..(167): n is a, c, g, or t
  misc_feature (185)..(186): n is a, c, g, or t
  misc_feature (190)..(190): n is a, c, g, or t
  misc_feature (195)..(196): n is a, c, g, or t
  misc_feature (222)..(226): n is a, c, g, or t
  misc_feature (241)..(243): n is a, c, g, or t
  misc_feature (250)..(250): n is a, c, g, or t
  misc_feature (255)..(255): n is a, c, g, or t
  misc_feature (258)..(258): n is a, c, g, or t
  misc_feature (268)..(268): n is a, c, g, or t
  misc_feature (343)..(343): n is a, c, g, or t
  misc_feature (422)..(422): n is a, c, g, or t
  misc_feature (433)..(441): n is a, c, g, or t
  misc_feature (453)..(453): n is a, c, g, or t
  misc_feature (456)..(466): n is a, c, g, or t
  misc_feature (470)..(470): n is a, c, g, or t
  misc_feature (593)..(593): n is a, c, g, or t
  misc_feature (597)..(599): n is a, c, g, or t
  misc_feature (622)..(622): n is a, c, g, or t
  misc_feature (625)..(625): n is a, c, g, or t
  misc_feature (644)..(644): n is a, c, g, or t
  misc_feature (650)..(650): n is a, c, g, or t
  misc_feature (656)..(656): n is a, c, g, or t
  misc_feature (750)..(1025): n is a, c, g, or t
  misc_feature (1031)..(1242): n is a, c, g, or t
ccacggacgaggagctcatggtgcactacctcatgaggcaggccgcctccatgccgtgccccgtccccatcatcgccgaggtcaacatctaccagtgcaacccctgggatctccctggtacgtgattctttatttctttcttccctctcttattcgttcattgtcanttgagttgagtcgttcannctanttgtnntattcctagctaatccaaatctgcannnnncagttgaatctcatnnnatttaantattnttncttcctcctntggtatcgtgttcgttcttcagccaaggcattgttcggcgacaaggagtggtttttcttcagcccccgggaccgnaagtaccccaacggcgcccgccccaaccgcgccgccgggtccgggtactggaaggccaccggcaccgacaaggccatcntgtcgtcgtcnnnnnnnnncacgcccacganccnnnnnnnnnnnaacntcgtcgtcggcgtcaagaaggcgctcgtcttctacggcggcaggccgcccaagggcaccaagacggactggatcatgcacgagtaccgcctctcgggcgcggcggacgacgactgcaagggcngcannnccaggcgcagagtgtcttcctcntcntcgtcctccatgagggtgngtgagnctttcnttttctttttcttcttttttttaattgcacttgcttgcacggctccagacctgactgaagcgtttcgcatggtttcagctggacgactgggtgnnnnnnnnnnnnnnnnnnnnnnnnnnnnnnnnnnnnnnnnnnnnnnnnnnnnnnnnnnnnnnnnnnnnnnnnnnnnnnnnnnnnnnnnnnnnnnnnnnnnnnnnnnnnnnnnnnnnnnnnnnnnnnnnnnnnnnnnnnnnnnnnnnnnnnnnnnnnnnnnnnnnnnnnnnnnnnnnnnnnnnnnnnnnnnnnnnnnnnnnnnnnnnnnnnnnnnnnnnnnnnnnnnnnnnnnnnnnnnnnnnnnnnnnnnnnnnnnnnnnnnnnnnnnnnnnnnnnaaaaannnnnnnnnnnnnnnnnnnnnnnnnnnnnnnnnnnnnnnnnnnnnnnnnnnnnnnnnnnnnnnnnnnnnnnnnnnnnnnnnnnnnnnnnnnnnnnnnnnnnnnnnnnnnnnnnnnnnnnnnnnnnnnnnnnnnnnnnnnnnnnnnnnnnnnnnnnnnnnnnnnnnnnnnnnnnnnnnnnnnnnnnnnnnnnnnnnnnnnnnnnnnnnnnnnnaaa

SEQ ID NO: 292 - DNA, 703 bp, Zea mays
  misc_feature (555)..(555): n is a, c, g, or t
  misc_feature (561)..(565): n is a, c, g, or t
  misc_feature (567)..(573): n is a, c, g, or t
  misc_feature (607)..(609): n is a, c, g, or t
  misc_feature (638)..(653): n is a, c, g, or t
  misc_feature (677)..(678): n is a, c, g, or t
  misc_feature (683)..(692): n is a, c, g, or t
gaggcctccccgagctgcgtgcgtcgtcggataaggcagccggcacggcaatgccggttccgcttgctccgtacccagctcctccggcgccattcacgccgcccaatggtaaataataatccttttttttatatatatatcaagagaacgttgggctgtgagaaaaccgtataaaatcaaaccacttttgttcctttttcatcaaggcgtgttgattttcaggggcccagagccagctcgtctgcaccgggtgccggaacctcctcatgtacccagctggtgcgacgtcggtctgctgcgccgtctgcagcaccgtcaccgccgtgccggctccaggtacgccgtacgcgcatggcatgaatcaataatatcacctttgtcaagaacttgcgagcaaataaacacggcgccgtggagccacatttgtgtgtgcagagctagcagtgcaacactgtccctttcgtctctctgttctttttaaccagttaagaagtagcatttgctgcatccataaagttttgtttgcctttttttttgagatgaaggctttcattngctacnnnnncnnnnnnntaggttccatgatagttcaaggggacaactttgnnngtttccctctgaacctcttgcagttctgnnnnnnnnnnnnnnnntggttactggcctctgaaacgtgnngctgnnnnnnnnnncttctgcagga

SEQ ID NO: 293 - DNA, 701 bp, Zea mays
  misc_feature (48)..(50): n is a, c, g, or t
  misc_feature (106)..(108): n is a, c, g, or t
  misc_feature (128)..(133): n is a, c, g, or t
  misc_feature (150)..(157): n is a, c, g, or t
  misc_feature (159)..(165): n is a, c, g, or t
  misc_feature (196)..(197): n is a, c, g, or t
  misc_feature (300)..(301): n is a, c, g, or t
  misc_feature (642)..(647): n is a, c, g, or t
  misc_feature (676)..(678): n is a, c, g, or t
  misc_feature (684)..(690): n is a, c, g, or t
aatttctgctatcatggattgactggccattgaatggaaatctttagnnngagattagtaatacttggctggattactgttttttattacattcactaatatgctnnncagtaaatttctgctaccannnnnnttgaatggaaatctttnnnnnnnngnnnnnnnatgtacctggcattggcaactcttgattttnncttgtcttgtgaactgcagacatgtcaaatgggccactgcctcatttctgccagaatagtatgcaggcacctcaaatacaagtgccccatcaacagtccatcnntaacaatgtggtgcatggtttaaatccttctgccacaggtcttcctttattacatccaagaatgctggctctcccattcaatgctgagcacacttttgggcatccaatgcacccacctctgataaaccaagctaacaatggggctttaagaattctgccatatcaggtggcttcatatctgcaaattgttacccgttcgttttttatatgttcgtttttatatgtcgcccgttagtataaagttgaactgtgtggcgtcaaataaataaaaacggaggtggtatttgctaataacaatactggatgctgaaaaatatgtctacttgaatattttttacgcnnnnnntgcagacttggtaatccggtgcttatatnnnagtttnnnnnnnccattttgggt

SEQ ID NO: 294 - DNA, 858 bp, Zea mays
  misc_feature (752)..(756): n is a, c, g, or t
  misc_feature (785)..(793): n is a, c, g, or t
  misc_feature (800)..(820): n is a, c, g, or t
  misc_feature (827)..(832): n is a, c, g, or t
  misc_feature (838)..(853): n is a, c, g, or t
aaaggagcacctgaagacctgcatttcgagggcccgtgagcatcttgatgaaaaggaaaatgaggattctgtgccaagcaacagagaagcaggtacataacatatttttgttatgcacttaatgatgcaatatctcttaaaatttgttattaccaatatctatttgttaataagatgttgctttttcgcagacaccagatttctttttgaagggcaccttactgtgggacaggaacctccacctccagcatggcttgttgcccagaatttaacgagggaattgagcatactaactgaatcctctggtgatcaagatgggagcaacaacagaacagtgcctagagccgaggagattacacctgctataatgaacctcctagaaaccatatcaggcgacagggatctagaaactgctttggaagaatcactgcaggtgtgcatgaatacttaataatcatttcatgagaatctacttctttagtacattgctaggtcttttgtcagtgcacactgataggccttttaaccaactaaagaagggcgcacaattatatgcttatgatctttagtttatccaatctcatgacaaactagccttgtaaacctaatttgcctgcactcaagtgatagtactgatttgctcaaagcagaggtagtctcatcatgtttttgatggatgaggaaattattctctttaagtttattattattatcttaattggaccttgcatgtagtgggaaaggatctaagnnnnncaatttgtagtcaagcagcttctctatgnnnnnnnnntctaacnnnnnnnnnnnnnnnnnnnnnacatagnnnnnnctatannnnnnnnnnnnnnnnctgat

SEQ ID NO: 295 - DNA, 496 bp, Zea mays
atactgtccaggatcatggcttctctctgtgatttctgtgggaaacaaaggtcaatgatctactgcagatcagatgcggcatcattgtgcttatcatgcgaccgtaatgttcattcagctaatgcactgtctcgacgtcatacaaggacccttctttgtgatcgttgtggttcacagcctgcatcagtccgatgtcttgaggacaacgcatcactttgccaaaactgtgactggaatgggcatgatgcagaatcaggggcttctgggcataaaaggcaagccataaactgctactcagggtgcccatcatctgcagagctttcgagaatctggtcatttattactgatatcccgactgtagcagctgagcccgactatgaggatggactaagcatgatgacaattgatggcagtgacgttactaatcgtcacgatacttcagatgataaaagattgttggaaatagctaacacaacactcatgagcgatccacctt

SEQ ID NO: 296 - DNA, 505 bp, Zea mays
aaacaaggacggtcaaggacgcgctgccgcaggaggtgccgtcctcgccgttcctgccaccgtccggttgggccgtcgaggacctcctcgagctgtcggactacgaatccagcgacaaggcaaggacctaaccatccaaaacctttttttttgtcggcggtgatgatgatgagatcaaccacaagcttttcacgttcttattcttatctcagttttccttttccatctgttttgtgtttgctgttgcagaaagactcgtctcttgggctcaaggagctggagtggttcgaggacatcgacctgttccacgcccattcgccagctaaaactgccatggcggagttcttcgcctcgccgcagccagtgagtaacgccgggttctacaaggcgaacggggcgcgcctgttcaagaagtcacggatggaggtgcctgacgacgacgacgaggactacttcatcgttcctgatcttggctgagaatgagagatctctgcatgattctcca

SEQ ID NO: 297 - DNA, 801 bp, Zea mays
  misc_feature (737)..(746): n is a, c, g, or t
  misc_feature (752)..(753): n is a, c, g, or t
  misc_feature (758)..(758): n is a, c, g, or t
  misc_feature (785)..(796): n is a, c, g, or t
gacactttcagcatttgatgaagataatttgattccctgcttcggatttggtgacggtaatcatttagttgcctttgtctgatgatcacctgatgggtttataataacatgtttaaagcacagtgttgatccagtgcttctgttttcttctgagcagcatcaactcatgatcaggaggtattcagcttttacccagagaaccgcccatgcaatggatttgaagaggcgctagacagatacagagaaatcgttccaactcttcgattagcaggtttgtttagtgaagatttaatataaatgcttttttctatctcttttgtttttctgaatcgaaataaaatttgttctttcataaaagagagaaaaggagcagaattgctattttacatcatattataactagctctttattacatagtactgtggtagctaaaattttagtagttcatcagggagagaagtgcatgctaaagtctgcagttatatttttgtaacaggacctacatcctttgcgccgatgattgagacagcaattggaattgttgacagcactggtggtcaatatcatgttcttctgataatcgcagatggacaggttggtgaacacattgtcattttgtctttgccttcgttttagtcacctgttatttcttatcattaagtggttgtcagcaaagctcttttctagtgcaacattttgtttgtctatccttttttcacttggataaaacttctgnnnnnnnnnnacccgnngtgtngatacacaatctggacagttgagtccnnnnnnnnnnnntacta

SEQ ID NO: 298 - DNA, 403 bp, Zea mays
tcttcggtacctgatgctcagccatcaggttgcccatctgagtctgttattagtaggaggaggtttgagttcatgagaaagagggcctttgaccaggaaagctcttccagatcagtgaacttaagcttaggtcattcaactcctacagatattcgcagaatcagaatgaatgaacaatcactttgtcaacaaataccacgaagcagcagcagaagccatcaggaatcggcaggttcagttaggacaagacgaccttctcctcatgccactaggatgagtgttcctgatggaagagcagatggcgtgctttctctgcacgagtcatccacaaaggatgtacagccagctcaggaacatctttcattggaagaagtctccactgagagttcaataaggccattat

SEQ ID NO: 299 - DNA, 377 bp, Zea mays
cgtcgtcagcgaggcagcaatgaagatcccatctgatctatcgagaggacctgcatgcctgcccggcaacgttgaacaacatgtcgatcgattgtcatggccttggccttattaattgtttctttcttttcttttcttccttttgtttaattatttttgctgttctggttggcgccgccgtggatcggagggatcccccaagccgaaggatgagcttggctggcgcatcgaagcgcatgcaacggatgtgtgcggctttggttctgtaataggacaaccaggggtccttttttcgatctgttattagcggcacaaaaggagctagatgcatgctgaggttgtttcagttcactctccatgtgtgtctgtacaaacga

SEQ ID NO: 300 - DNA, 674 bp, Zea mays
  misc_feature (569)..(570): n is a, c, g, or t
  misc_feature (596)..(599): n is a, c, g, or t
  misc_feature (626)..(634): n is a, c, g, or t
  misc_feature (645)..(657): n is a, c, g, or t
  misc_feature (664)..(671): n is a, c, g, or t
agaagtcctagtccaatgtcttctccaaaccctagagctaatctccctggcaatgggttcagtccttggagcggactacaagaggtaacactaaagaatatatttgcaatcaagtgggtgactcttctgtacttcatacacaaatggatgtgccttttcctctgggagtcctgtcccttaacattgataaaccacatatcttcttgtaactggcaatgctatttcagagtcatgatgaattaatatgaaaagtacattcaaggtgcactggcattcatgttcacatgtgttaatgcgtgcgtgtgtgtgtgtgtgtgttttgtcacaaacactgatgaagtatatatgcttttgcctttatgaacaattcaaaagagattaggttttcctcaaggaaccagcatggactggcaaggagcacccccaagtcctagctcccatgttgtaaagaagattcttcgtctggaggttccagttgattcttatccgaatgtatgccctccaacttgtgcagtttctcttgaagttcacacaaaagaaccattgagctgttttaagtttttttttgnngatatattcttctcttctttcccagnnnnattttgtggggcgcattttaggacctnnnnnnnnntctctaaagcnnnnnnnnnnnnncactggnnnnnnnnttt

SEQ ID NO: 301 - DNA, 779 bp, Zea mays
  misc_feature (750)..(761): n is a, c, g, or t
tacctgctctctcttggtcattgatagaggaaaccaagcaattcgagaaattccactgaacgatgatgactgtgcatatcagtatgaagctggttttccactaggtacatgacacttagctctccactcgtattaattgaccatattttacttctgctctgtaaagccagtcatagggtcactgcattcagcgctcaaatgacagcaaaaatgacaagggacctgtaaaaattgactagtaattacttttgattttgaatgctcacagggtttgcattgctttgtgctgctggtttctttggttatatgcttgcattgctccaacaccggcttttaggaatgccgtcaacaatcaatgtaagtttgtggtacttttttagaatttataactagtgtttggaccacagtttgtaggcttgctctaagccagcactctgctacatgcatatttcaccatcaacctttggttacgctacagctaatattcttagattaatcttgtggctggctagctgcagcctgtgcactcgatatgtctgataccagtcctcacagctgctagaactggatgtgtgccataacatttaaaatgcaaaccttgtatggttcaagtaatagatgtttagatgatatttcagcttttgataactgattctgttagttagataattgaacaatgataatgtactgattctgaagtcaacctctagtctagtggttaaaggcttcggagtagcacctttaagtctnnnnnnnnnnnnccccgggggcaaattttt

SEQ ID NO: 302 - DNA, 629 bp, Zea mays
cgctgtctcgacgcatggcggctcccgtcctcgtcctcatgctcctcctcgtcgccacaggtgcccgactcaactcctcgttgctcgtcagtgctgcttgagtgacccttcaaagtaaagttcacagtaatgcgacgcgcttggtgttgtaatgcttaatttgagtgtggccggccggtgcagagctggggacgaccaaggtggcggaggcgaggcactgcctgtcgcagagccaccggttcaagggcctgtgcatgagcagcaacaactgcgccaacgtgtgccagaccgagaacttccccggcggcgagtgtaaggcggagggcgccacgcgcaagtgcttctgcaagaagatatgctagtagtagcctcggctttgcttgctggcacaagcaggtcgtcggcacgcaacgcaattcaagcatcatatcggtcctcctcccgcgttgctgtctactcgaccccgttttctctttcgatcgatttcgttgtttcctgttgctctcttcttttcccgcgaataatatgctccatgggatctcactgttgtactttctgcatccgttggtagtcaggacgatccttcttcccgctgtcacgtgtgattcaaaatggatgtactaatgcaa

SEQ ID NO: 303 - DNA, 264 bp, Zea mays
tgcagaaactggagactgactgcaccctggagtggatcgaaaatcacagtgcctgcgaaattcatactcagcaagaacgacgtcggcctgcagtccttcggaaccgagaagtacgtcaagagtggcgctctgaaggagaacgttccagaccttgaggtttcgatcatcgaggggcaccatttcgtccagcaggaagaggccgggacagtgaattcggaaatactctccttccttgacaagtttcccagcgagggaggatcagcg

SEQ ID NO: 304 - DNA, 407 bp, Zea mays
gccgccaagaagaggcgcgcgaggaagctcagcgacgagttcgaccgcatcgccgcggagcagcagcagcagctggtgttggagagcaagcagaagccgggtgccgcgacgccggcgacgacgtcaacaaagaggaaggctaccgtgccgagggcttcgccaaagaggaaggcttctgtacccgctgctggggcgccggcgaggttgtcgccaaagaggaaggctgctgcaacagccgcggcgcccttgtcggcggctgggtcaaggaggacctcgccgaggaataagcactgagtggtggtcgccgtatgtgctgctctagttcctgatctgtttcttggcgatcgtggagtcctgaaaatgtattgtgtggttgggtgtctactgctggattgaaacgatgatga

SEQ ID NO: 305 - DNA, 512 bp, Zea mays
atgttctatcactagaagaggggaagtctttccctccagatgcattgctgaagaaaatcgagggaatgagaactgaccaggctattgcagaagtcttatgttggtcagaagatccagcagaaatccaaaggttggcaacacacaaggaggttatatatcaaaaactccaaggtggatactaccagctgcgaccacatgtgcttgatttcttgaacacccttgtgggttttgacattccaatagcaattgcagctcctcgctcaaggaagagccttgaagaagggatcaaaactgttggtctgcaaggctacttcgatgctatagtggcattggaggacttctgcctagggaaacctgatggtgagatgtttgaagtcgcagcggagcaacttggtctggagccagatgcctgtgttgtgtttggcaactcaaacttgacgacggaatctgcacataacgctgggatgaggtgtgtggcagttgcaggccgacaccctgcctatgagctccaa

SEQ ID NO: 306 - DNA, 622 bp, Zea mays
ccctgtttggaggtaacacatctgcgttctcgcgttgcttgtattgttttcctggctcggctgggagagagatcgtttggaggttgaaattcactcgagccgaagcccccgattgctttgaatggtgtaatcgccttcttggggggtctgaattgtggttgtggatcgatgtttcctctgcttcccgcagcaaattccgatggcgaccggcgagaccgccgtggatcgtcgcgaggaccaccgcgacatggatttgtcaggggaggagcacgtgcggcccaaggtacagcggcggcgaatcgcgggccgcggccgcagattccgtggcgatccgcgtgttctcactcttccttccttccacgcttgcctgaccaggcgcggaagccgtacacgatcacgaagcggcgggagaggtggacggaggacgagcacggtcagttcctcgaggccctgcagctgcacggtcgcgcctggcgccgcatacaaggtacccagccgcggagccgcccttctcgttccttcttcatcaggacgaggagaggcactcacactcttcttctctgctcgtgcgtgcgtgcgtgcgtgcgtgcagtgcacatcggcaccaagactgccgtgcaaa

SEQ ID NO: 307 - DNA, 1247 bp, Zea mays
  misc_feature (1225)..(1231): n is a, c, g, or t
tggatacttcgaaatgacaaatcttcctccaaaggtatttgttattgcagtgcagcatttatcagaatgtcacttgtcccaagtaccattgaaaagttcataggtaggtaaagtcaactgtagtgtaattgtaatcaatagggtctactggagttatgccaccacgatgtgcatttacaactgatttcatttctagtctaaactgtagagtagtggtaaacgctctaaaaaacctttaaactttgccagttaagatttcccctttaaacaagctaggcacttaaataaggcttatgctagattctattgtgacactttgaatgtcattttctggatacctgaatataattttttaaggtctgatggtagccattctttcaatttgagcttgcagacagtagatgagatctacaaggttgcatcaatagtactgagtccgaatgttcccgggcaaatctttgtaagtgaaacacggcttaatgttttattcttttgctcttccactgaacccggtactctgttttggaacaacatatgtttggaccacctacaccaattgttcttaaagctttgtttctttgctttaccaaactacagagcgtagttgcttaagtctgccttttacagatgggagtgatggttaaccctcctaaacctggagatatctcatacccgaagttcactgccgaaaggttaaacatactgcccctcagaggttttagtccgcgttcagcttcagtagaaaaacgaacatatgcgagatattgaacacttaatttttttttgtacatttgtaagtttgatgtttgatgtggccccaaatgattatgattatgatgttgcagcaagtccatcctcgaatctttgaggaggagagcgcgcatgatgacagacggtttcaacagctgccgaaacgtggtgtgcaatttcacagaaggtaagcatcaagatttctgttggtttgcagcgaatagagtgtggtttatttttgtgactggttgtgttgctgcaggagctatgtactctttcccccaaatacagctgccagcaagagccatcgaggcggcaaagagagccggcaaagcagcagacgttttctactgcctcaagctcctggaggcaacggggatttccactgttccgggatctggttttgggcagaaggaagggtatgagtatatatatatgatgatgatgatgagttatctgtgagtgctggatgaannnnnnnagtgatgggtttattt

SEQ ID NO: 308 - DNA, 1249 bp, Zea mays
  misc_feature (105)..(105): n is a, c, g, or t
  misc_feature (118)..(118): n is a, c, g, or t
  misc_feature (243)..(243): n is a, c, g, or t
  misc_feature (246)..(246): n is a, c, g, or t
  misc_feature (364)..(364): n is a, c, g, or t
  misc_feature (466)..(466): n is a, c, g, or t
  misc_feature (478)..(478): n is a, c, g, or t
  misc_feature (597)..(597): n is a, c, g, or t
  misc_feature (612)..(612): n is a, c, g, or t
  misc_feature (614)..(614): n is a, c, g, or t
  misc_feature (617)..(618): n is a, c, g, or t
  misc_feature (727)..(727): n is a, c, g, or t
  misc_feature (730)..(730): n is a, c, g, or t
  misc_feature (778)..(779): n is a, c, g, or t
  misc_feature (785)..(785): n is a, c, g, or t
  misc_feature (807)..(813): n is a, c, g, or t
  misc_feature (833)..(838): n is a, c, g, or t
  misc_feature (1177)..(1177): n is a, c, g, or t
  misc_feature (1179)..(1179): n is a, c, g, or t
  misc_feature (1186)..(1189): n is a, c, g, or t
  misc_feature (1199)..(1199): n is a, c, g, or t
  misc_feature (1227)..(1233): n is a, c, g, or t
tggatacttcgaaatgacaaatcttcctccaaaggtatttgttattgcagtgcagcatttatcagaatgtcacttgtcccaagtaccattgaaaagttcataggnaggtaaagtcaantgtagtgtaattgtaatcaatagggtctactggagttatgccaccacgatgtgcatttacaactgatttcatttctagtctaaactgtagagtagtggtaaacgctctaaaaaacctttaaactntgncagttaagatttcccctttaaacaagctaggcacttaaataaggcttatgctagattctattgtgacactttgaatgtcattttctggatacctgaatataattttttaaggtctganggtagccattctttcaatttgagcttgcagacagtagatgagatctacaaggttgcatcaatagtactgagtccgaatgttcccgggcaaatctttgtaagngaaacacggctnaatgttttattcttttgctcttccactgaacccggtactctgttttggaacaacatatgtttggaccacctacaccaattgttcttaaagctttgtttctttgctttaccaaactacanagcgtagttgcttangnctnncttttacagatgggagtgatggttaaccctcctaaacctggagatatctcatacccgaagttcactgccgaaaggttaaacatactgcccctcagaggttttagtccgngtncagcttcagtagaaaaacgaacatatgcgagatattgaacacttaatnntttttngtacatttgtaagtttgatgtnnnnnnnggccccaaatgattatgatnnnnnngttgcagcaagtccatcctcgaatctttgaggaggagagcgcgcatgatgacagacggtttcaacagctgccgaaacgtggtgtgcaatttcacagaaggtaagcatcaagatttctgttggtttgcagcgaatagagtgtgtggtttatttttgtgactggttgtgttgctgcaggagctatgtactctttcccccaaatacagctgccagcaagagccatcgaggcggcaaagagagccggcaaagcagcagacgttttctactgcctcaagctcctggaggcaacggggatttccactgttccgggatctggttttgggcagaaggaagggtatgngnatatatnnnngatgatgatnatgagttatctgtgagtgctggatgaannnnnnnagtgatgggtttattt

SEQ ID NO: 309 - DNA, 594 bp, Zea mays
tgtcgctgccggtgggtcacaagtgtatcctgcctctgcctatccgcctgcagcaacagtagctcctgcttctgttgtatctgctggtttacagtcagggcagccattcccagccaatcctggtcatatgagtgctcagcaccagattgtctaccaacaagctcaacaattccaccaacagctccagcagcaacaacaacagcagcttcagcagttctgggttgaacgcatgactgaaattgaggcgacgactgatttcaagaaccacaacttgccacttgcgaggataaagaagatcatgaaggccgatgaagatgttcgcatgatctcagctgaagctcctgtagtctttgcaaaagcttgtgagatattcatactggagctgacacttaggtcgtggatgcacactgaggagaacaagcgccgcaccttgcaaaagaatgacattgcagcagcgatcactaggactgacatttatgacttcttggtcgacattgttcccagggatgagatgaaggaggacggaattgggcttcctagggctggtctgccacccatgggagccccagctgatgcatatccatactactacat

SEQ ID NO: 310 - DNA, 512 bp, Zea mays
acgatgagcggcgccggtccggatctgcagctgccaccggggttccggttccacccgacggacgaggagctggtgatgcactacctctgccgccgctgcgccggcctgcccatcgccgtccccatcatcgccgagatcgacctctacaagttcgacccatggcagctcccaagtacgtcccgtcgtcctcggtcttcttgcagcagcagtagcagccgtgaaccaatttcctgtgcggccgtgacgatggcgagctaatcgatcgattgctaactctctgtgtgcagggatggcgctgtacggcgagaaggagtggtacttcttctccccgcgggaccgcaagtacccgaacgggtccaggcccaaccgcgccgccggggctgggtactggaaggccaccggcgctgacaagcccgtgggcacgcccaagccgctggccatcaagaaggcgctcgtcttctacgccggcaaggcgcccaagggcgagaagaccaactggatcatgcacgagt

SEQ ID NO: 311 - DNA, 1271 bp, Zea mays
atcactcctgtgcgcaaaaatggatacagaaaaagaacaaggacgctgtcattacttgaaggtggcgaggggagatcctgctgtcgtgaagtacgaagcaagatctacatgcaggtcatcatacatgctcaggaacggatggtcctgcatcgaagatggcaggaagggaagggcaagataagtgccttagttttgcagacgattcctgaaatgaaatgaagatgtggagctgtttttcggcttaccaataaggcttgtgctgatgacctgtcattagcatccttctggagactgcaaatcgcaatgaaaacatatgcatcagatagtagtaaccttctctggacagattacatagttggacagactcgcagattgagaataccaagacacatcaattatagatggaaacatatgatccaaactttcttgatgttacccttctacatgcttctccgtgcatatgtaatatacaaagcaggcattttgacttgagcaataaaaccatgaacaaggaatgcaagcacccctatgatggcattttaaaataggagtagatcaaaattgccgatgccaaaacaattgctaacatgtggagtagcttaaccacaggtaagggtgtccataggccggcaagaactcctgccacttgttcaaggaaaaagggtgtctataggcagcgttggtataaagcagtaagattaccatgcagaaatgaacccacagaattctggtgaaaactgatccggcggcgcagaaggtggcggttgatcaacaacagccacgagaagttcgtagaagctttcacaaggaggaaatggaaagatgccggttgcacattccagtatcactagtcccaaactccagatatcactcatagaaccatgtttctttccatcgattctttctggctgtcaagaacataaaaaaatgctttaggccatcagagctaataaaatacaatttatttcactccaagctaaaaaacacatttgtgagctgaaaatcttgcactaaccgccatgtagttgcgtgtgccaataaatgtatctcgttgcgaagaggaactagatataatggcactcacaccaaaatctgatatttttacttcacccctatgatttatcaatatatttgatggtttcagatctcggtgtataacgcgcttctcgttatgcaaatagatcagtccttttagcatctgcacaaggaaggcgcaatttcaattataaggttcatgtaatgatagtgtagcattttagttttagcggaaa

SEQ ID NO: 312 - DNA, 790 bp, Zea mays
gtcttcacaagttctgctgctcttgtatttcagaaagcaagcgtgaatcttgaggggatgcagctattggcttaggatgtttttctctgtaagcgtgcttgagttctgaaagcctcgtaagctcctctatgacaagtttatcagcttcctggatcttgtcagggtcatatggggtgtgggcttcctgcagctgaatgtaggcggattttaaagaggatatgttgttgaatatcctcccgatcacagtgtccattgagtccccgttctgattcatgttatcgtcgattggttgaggatggactctttgattattgttatcataattttgcgagtcctttgagcctgggcggatcattacttcttgccctcaggatcatagaagttagtaatcttcaaattgtcaaccaaaaaatcggcatcaacctgcaaagcaactactcggttcagctcgcaaatttttagaacaagagatacagatttgatggtagtagttcagcctgtgttgtccggccaacgtatggattgtttgaaagatcaaagctatccaattcccttccctctatatatgcaggtagatttcccagattgacaagcttccctgttgcacacatatcacagacacatggtactgactagagagtggtcccaaagcgaagcaaggaccacgtgaaacctaagcatacattgattacatccgaagtatagtctacagcagcctgcagctctagtgctaatcaacagcggcacggatgcacaaaggagggaacccaggatgtgtgcacccgatgat

SEQ ID NO: 313 - DNA, 785 bp, Zea mays
  misc_feature (724)..(726): n is a, c, g, or t
gagaaggtctccagagggcagggtctcctgttaaagctcagccgagttcatctcgagctgcatcatgtaataacaagccaagactgaggtggactctggagctccatgagcttttcgtgaaggctgtcaacaagcttggagggccagaaagtagggtgatccttctttgtactccgatttaaatagatccacacagttttggtgtccaagcaaactgttaatgtatgggtggtacaaaaccaaatcttgcagaggcaactcctaagggcgtgttgaggcttatgaaggtagaaggcttgaccatctatcatgtgaagagccatttgcaggtattttgggtggagtttcttcactttcctcctgtatagtataaaacagccatcgtttctgaattctgatggactgtcgtccattttgtcctggaatgcagaagtatcgttttgccaagtatcttccggagacaaaagaaggtacattttcagaagcttaaagttgcaattcatgcctatctttaattaagtgctggccatcgctttgtgttggaaattcgccctgatgaacttgcttgttggttcttttgcatgctcgatgaagacatgaagtcctcttcagaagacaagatatccaaatcagagatgcctggaagcaacgctggcagaaagaagtaagcatcccacccctacccctagtacaaacatctcttttttgtgtgaatgaacaaacnnngaacaatttaaatccacatctttttttttaggattctcaaaagcttacaagtagcagaa

SEQ ID NO: 314 - DNA, 712 bp, Zea mays
agcacttgccaccaaggtttggttctagtaatctgttcttgtaccatttttattattgtttgttgttatgctgtacatacttcacctttatgtgtataaactatgaactggtcattaaacttcgaattggacagtaggtcatcttagatatatttgtgaaacaatcattaacttagttttgttaatttgacaggctgcccgtaagtctgcacccacaactgggggagtaaagaagcctcatcgttaccgccctggaactgttgctcttcggtgggcgatacatgattcttttgattgtttactgtttattacacttcaaataagtgtgccctactgacaagatcacaattgttctccctgactttgcagtgaaatccgcaagtatcagaagagcactgacctgctcataaggaagcttccgttccaaaggcttgtcagggagattgcccaggatttcaaggtgagatttcattttcataccgtcatgtaatctaggaattctgaagtaaacgtagaagtgcacttctcaacccgttgtatttgtgcagactgatcttcgtttccagagccatgcggtgcttgcgctgcaggaggctgcggaggcgtacctggtgggtctattcgaggacactaatctgtgcgccatccatgccaagcgcgtgaccatcatgcccaaggacattcagctggctaggaggatccgtggtgaaag

SEQ ID NO: 315 - DNA, 485 bp, Zea mays
ctatgccgcatctgtgatgtatggctatttcctgaagagagttgatcagaggtttcagctcgagaagacaatgaagagcctcccttggggatcagaagaggaagacggcgctttgtatcaagttatgacgaccgactcgatgccttcagctcagtcttctagctctcacccagagatgggctcctggaccgccgcgcctgacttcaacgcaggaggtcctagcgaatctatcaagccttgtcgccttaggtcgtatgtcatgtcattcgatccagatacgcttcagaggtatgcaacggtcaggtcaaaggaggcctttggtatcatcgagaaacacacagaagcgctatttgggaaagcagagattgtagtcacacctggaggcacggttggttcatccaaggatgagcacattaggataagctttgccgggctgagaaggctggtcctggaggctgttactttcggatcattcctctgggacg

SEQ ID NO: 316 - DNA, 806 bp, Zea mays
tgacgagaaatatcaaactagcttggatgacgtggatgctgcttttggagattcagaagtgagtcagatggaccaataaatctttagccttctgtggtagaaattaagtgagtaactgtgttttactgattcgtttaccaggaccggcatgtgaaagaggaaactgaagatcagccaacctcaatgaatgcattcgaactgatttctctaaaccaggcactgaatctggagaatttgtttgaagcaaaggaggtcagtcatagctctcctgtcttcttggccaattttaggtttccaaattttattaccttactgttatttgaaatgcactataaaaagtataaatctgcaatgatcttatttctggttaaaaatggcaggagtataaaagagagacaagattcacctcacagtgccccccgaaagagataatcacaaagatcgaagaagctgcaaagccgcttggctttgatgttcagaagaaaaaatacaaggtatttcctactgaagtttgttatgtacaatattcctcttgttgctttcgacctatgttgtaaaattttggcttgaatatctagatagtaagtagaactcttgctgccatcttccacatacctcagatcctaataaggctgtgctgtgtctgctctttccagatgcggatggagaacccgaaagcaggtagaaagggcaatctgaatgttgcaactgaggtagctgaaaacatcaacttgacaaaaatcaagattgctgaagcatcgaaagagaataactcaattcctttctgtttgtgcatgccaactctt

SEQ ID NO: 317 - DNA, 623 bp, Zea mays
agtccgctgccaacgccggcggcaacggctccgccttcgtgaaggtcagcatggacggcgcgccctacctgcgcaaggtggacctgaagatgtacaacagctacacggagctctccgttgctctgaagaagatgttcagcaccttcaccacatccggtaaatcacatttaccccgttggcgtaggaatctgcagagcatacagtttgcgaactcatagaagctgcatccatgatccatcttaccagggaacaacatgaatgagggaaaactggttgatccggtcagcggtgctgatgtggtcactacttacgaagacaaggatggcgactggatgctcgttggcgacgtcccgtgggagtatgttctgcattctagtgtgccatcatctaggatgtgatcaggcaaatgttcaggcttcagcttcttatatgctgccttgttgattgttgtccctgcaggatgtttgtcgagtcatgcaggcgtctgaggatcatgaagagttctgaagccataggtcttggttagtgtctccagataaaattatcttccatagttccattataagatttacatgtcaactctaaccgcctatgttttcttcatttttttaaaaaatacagca

SEQ ID NO: 318 - DNA, 566 bp, Zea mays
aaaatcaccaagtagattctgggagacacggtaggggacatgacataacaccaatccagctacacacggatagattattgcttctggtccatgaacgagttgaacaagacaggtctccctccaactagtagtaattaaaacgcgttatatttctagtaggaaaaaaaacggcagcgcactgcaaggggaccattcttttgatacaatgggcaacatctttaacactgcatcttcttcagctcttgttcttgcacttgtccttcgttcttggtgctgtatttttttgcaatgaagaaaaacttaggcggttagagttgacgcattaaaaatcttacaatggaactctggaaggtaattttatctggagacactaaccaagacctatggcttcagaactcttcatgatcctcagacgcttgcatgactcgacaaacatcctgcagggacaagcaatcagcaaggcggcttacaagacagtactggagtctgaacatttgcctgatcattcacgtcctaatcatgggtcagtaaatacgaaagcagacgatggcacgctagaacggaga

SEQ ID NO: 319 - DNA, 480 bp, Zea mays
  misc_feature (466)..(471): n is a, c, g, or t
actgatgatgagacgtctatcgcatgcttgtgctgtgcgtgcgtgcatgcgccagcaaattcttttgttcttttggggtcttatttcttctccaaggcgtccctgcatgggtgtgggcgtgtggtgttgagtattatgtaccttctcccctagcattgtctgtgccaacaatggagcagcagctagcagcaaaccagagacatggcgaggcgaaatatgaagctgcttgcttggaacgagggggagagagagaggaaagctttgtgcatgcgtggaatgatgtgtggtcgctttgttctttttcttttgtgcccctagtaggggtgtgtgtgtgtgtgtgtgtgtgtgtttagcaagacatgcaaaaggagtggagagtcgagttgaatctccatgatgcgtggttgtacaaagccaaagatcactcttctttcttgtctatcagtctattgtctatctatcgatnnnnnncctggtcgt

SEQ ID NO: 320 - DNA, 480 bp, Zea mays
  misc_feature (13)..(13): n is a, c, g, or t
  misc_feature (25)..(26): n is a, c, g, or t
  misc_feature (211)..(211): n is a, c, g, or t
  misc_feature (216)..(216): n is a, c, g, or t
  misc_feature (236)..(238): n is a, c, g, or t
  misc_feature (241)..(243): n is a, c, g, or t
  misc_feature (251)..(251): n is a, c, g, or t
  misc_feature (254)..(263): n is a, c, g, or t
  misc_feature (265)..(271): n is a, c, g, or t
  misc_feature (317)..(317): n is a, c, g, or t
  misc_feature (329)..(329): n is a, c, g, or t
  misc_feature (333)..(333): n is a, c, g, or t
  misc_feature (340)..(349): n is a, c, g, or t
  misc_feature (408)..(408): n is a, c, g, or t
  misc_feature (466)..(471): n is a, c, g, or t
actgatgatgagncgtctatcgcanncttgtgctgtgcgtgcgtgcatgcgccagcaaattcttttgttcttttggggtcttatttcttctccaaggcgtccctgcatgggtgtgggcgtgtggtgttgagtattatgtaccttctcccctagcattgtctgtgccaacaatggagcagcagctagcagcaaaccagagacatggcgaggngaaanatgaagctgcttgcttggannnagnnngagagagngannnnnnnnnngnnnnnnngtggaatgatgtgtggtcgctttgttctttttcttttgtgcccctngtaggggtgtgngtgngtgtgtnnnnnnnnnnttagcaagacatgcaaaaggagtggagagtcgagttgaatctccatgatgcgtggttgnacaaagccaaagatcactcttctttcttgtctatcagtctattgtctatctatcgatnnnnnncctggtcgt

SEQ ID NO: 321 - DNA, 371 bp, Zea mays
agctgcttgcttggattggaacgagggggcggagatggagagagatagaaaagctttagagggtgtttggtttctacatactaatttttagtccctacattttattccactttagttacaaaattatcaaatatagaaactaaaactctattttagtttctatatttatcaatttatatactaaaatggaacaaaatgaaggaactaaacattagtccctagaaaccaaacacctccttaatttgtgcatccaaccaagtggagtggagtggaatgatgtgtggtcgctttgttcttttgtttttttaattattttgtggtactagtaggaggggtgttagcaacacaaaaggagtggagtggagttgaga

SEQ ID NO: 322 - DNA, 374 bp, Zea mays
  misc_feature (78)..(78): n is a, c, g, or t
  misc_feature (178)..(182): n is a, c, g, or t
  misc_feature (187)..(188): n is a, c, g, or t
  misc_feature (197)..(198): n is a, c, g, or t
  misc_feature (200)..(202): n is a, c, g, or t
  misc_feature (206)..(209): n is a, c, g, or t
  misc_feature (212)..(212): n is a, c, g, or t
  misc_feature (214)..(222): n is a, c, g, or t
  misc_feature (226)..(227): n is a, c, g, or t
  misc_feature (229)..(229): n is a, c, g, or t
  misc_feature (231)..(235): n is a, c, g, or t
  misc_feature (237)..(237): n is a, c, g, or t
  misc_feature (242)..(242): n is a, c, g, or t
  misc_feature (254)..(254): n is a, c, g, or t
  misc_feature (257)..(261): n is a, c, g, or t
  misc_feature (329)..(329): n is a, c, g, or t
agctgcttgcttggattggaacgagggggcggagatggagagagatagaaaagctttagagggtgtttggtttctacntactaatttttagtccctacattttattccactttagttacaaaattatcaaatatagaaactaaaactctattttagtttctatatttatcaatttatnnnnnaaaanngaacaaaannannnaacnnnncantnnnnnnnnnaaannanannnnncnttaanttgtgcatccanccnnnnngagtggagtggaatgatgtgtggtcgctttgttcttttgttttgtttttaattattttgtggtactantaggaggggtgttagcaacacaaaaggagtggagtggagttgaga

SEQ ID NO: 323 - DNA, 397 bp, Zea mays
  misc_feature (389)..(391): n is a, c, g, or t
attgctggattttcttcagcagttgcagaaaagaaagcaagatatagccgacagtttgcagggcactattgctttcctctcttctgacatcaatgaggtaccccaccagcaatctacaattggccactgtgagaacttcttatccgatggggataaagaggtgtgctctggaactgttgaagagcagagtgattgtggatccaggaagcgttttagacctgagctgcaaggtgttgatatggaggaaaataatcgtagtgttgaagaatgttccagaacagtaccatcctctgagttaatccaggaaagtgttctgtctaaaagctccaggttgatgaagaacttcaaaaaacttgaaacagcctattttctaacaaggtccaagttgnnngaagca

SEQ ID NO: 324 - DNA, 957 bp, Zea mays
agctgtcttgaaggcggaaccgagttttgatgaggccccatggcccactctcacggctgaagctaaagattttgtaaaaaggcttcttaacaaggattaccgcaagagaatgacggctgcacaagctctcagtaagtgcaagattagcttcgcactgcactgtcgcacgccgctatcctgctgcgaagatgcctaacacctttctcgaataaatgacaactgcaggtcatccatggatccgtaattctcaacaagtgaaggttcctttggatatgataatctataagctaatgagagcgtacatcagctcgtcttcgctgcggaagtctgctttgagggtatgcacataatcgaactttggaaagagtatatatgcctaggaactagggttcctttttctggtctgtagtagatgaatgttcccttagcataccttgagctgatggtatatgtatggcttggtaaaccgtacattgctaattatttctatgaatttcgcaggtcctagccaagacgctgacgacagaccaactcttttatgtgagggagcagtttgaattgctgggcccgaacaagaatggttacatctcattgcaaaatctgaaatcggttagtaactagtgtaaccttttgcagttcactacatatattatctctctctctctctctctctctctctctttcaccgtgcaattgctgaaaggtaaatggaacgtgcaggctctagcgaagaactccacggatgcaatgaaggactccagggttgtcgattttgttaacaccgtaagccgccactggactaccttctagtatttgctttagtgttggtaatgagataatcccaaaccaacttactggggggcgcctgtcacgatgctctaggtgtgcgctcttcagtacaggaaactggatttcgaagagtttgctgcttccgccatcagcgtctaccagatggaa

SEQ ID NO: 325 - DNA, 358 bp, Zea mays
cgaagatgctacttcatcacaaattagtaacatcctttcccctcatatagttgataaggtttgagtgtactgagcactaacaaatgcagctcgcgaaagtaagaccctttttcgtcatagaacaagacagctattttaattgcagcactcgtgtgaaaatagatctactctgcatggtggggattggggcgattgaagtgtgtggccttcagctgcacctagttgggcatcccaggaacctagtcaggctcactacagcaagaggcgcatcctttgactaaacatgttggttttatttcttgtggtttgattcttcacttctgttcattgtgttctgccttcactgcaccctattgga

SEQ ID NO: 326 - DNA, 862 bp, Zea mays
  misc_feature (800)..(803): n is a, c, g, or t
  misc_feature (810)..(827): n is a, c, g, or t
  misc_feature (842)..(851): n is a, c, g, or t
ttcttgacttcagcagctaatccttggacaacaggtaaacttcaattggaaagggtaaatggttaatataacagcaaatgccagggccagtgatgcaattatgttatacagcatactctgggtgcaacttcgatattttgctcacaaaagcttctagatcaagtgcttcatcatagttcccattccgtatacacctacaagcataagcctaatgattgtcatgcataattcagcaataatacaacagctgaaactatgcattatgaaaaacaaatgacattgtcattaacagccgactcaaacataaagtaaagagacaagggaatggtaagataaaagttccatacgtgtccatcaatggtgggatttcaagcaagtcaagcaatgtagtgtggttggctagtaatgtttggttaagcttcctctcctccagaatttgttgtgcagactcaacaaactcagtgcagccagatgttaagtttggtatctcctctatctacaatggtgcatgaacaacatggtaaaacatttcaaatcattcttcgaaggccgcatgaacaatagaagtctataatgttagcatatcatatagaaagaaaaaaggaagtgtaataatgagcactgagttaatcctttcatgaagtgtgtttaataaacatactgttggccataacaggtgctcaagatcatctagttcacatcagaatgttgcaaggttacttctgtcctgatacgcatatttgaagatacaggcactgtatttttttcacgaaataattaggctaactatatggaagctnnnntccacannnnnnnnnnnnnnnnnngtcatttttttattnnnnnnnnnnatctatatgac

SEQ ID NO: 327 - DNA, 1144 bp, Zea mays
caaacctctttttgcagttggggaatactgggatagctgtgaatatagcccccctgactaccgactgaactataatcaaggtaacagatttatagtagcattcttactgactacttgagctagtgccatatttttttgtcataagcactcttcagtcccttgattggcagcatgaacgatgaagattaaattttaactattttcactatctaaaacttatgcctttattctagttatagcccccctgactaccgactgctatgtaagttgtctgacatgtgaggggtaatttacagttccaaatttaaggcagtttatttgatttctttctcatatgcttatggatgacactgactagtgtcaaaattacatcctcaaatatgcctagccttcttttgataatgcatgcttgttggtaccagacgttttggtttctttttgtctgccagatatccataggcagaggattattaattggatagataacactggaggactttgtgccgcatttgatttcacgacaaagggcattcttcaggtcagtaatgaattactactgtatgagcaaatatttgtcttaagtgatctttttgagcagttatttttttaccaggaagctgtcaaaggagagttgtggcgtttgcgagattcagaaggaaaaccacctggtgtgatgggatggtggccttcaagatcagttacatttattgaaaatcatgacactgggtccactcaggtataatagtcattctcatccttctttggccgagaccagtagtagctgtgttaatgagctggaatattcaccttttagatgtgctaaaagaatcacaatttcagggtcattggccttttccgtcagatcatattatggaggtactatactttattgactttgtagttctaaattaatttccatggccttggttgcatcagaatcctataatatgtactgttcaattgttctacataaatgttgcttttgtgatcttagaaaacttgatttctttgtaacgactgtagcaccttataaaatatcagaaattatttattttttagactaccttgctattgtgtttttgtagaagtccatttgttgatctgacacatttaagatctttagggatatgcttatatactcacc

SEQ ID NO: 328 - DNA, 520 bp, Zea mays
tgttggtccaccaaactactgcagtgctggagggtttttgttgaagtcctcttcatgttcaccatttctaaattgtcataggctcatagcattgtagctgatcagtcttcaagatcttcctatgagtacatagataaatcatcatcgtatctgtgttaagtatgccaccatggtggggaaaatcttcatccaaagaagtgaaaaagtctgccaaagaaaacctcatcgacacatttcagcgtctcataagttcaaatgagcaaaagggaagcagaaaatcacgaagtagtcgtagacatggtaaagacacagctggtgacaaaggttgctggtccactgcccaatcccgctcaacatccccttcaaaagaggtctctcgatgtcagagctttgcagcagatagaccacatgcacagccacttcctcttcccaaatcacgtgctaaggtgacacgtacttcttctgatattaccaactcaaagtccactttggaaaagcatggcaaaggacaactgcttcc

SEQ ID NO: 329 - DNA, 370 bp, Zea mays
ttttttttcattatttcatttgacactagtgtaagtaaattgggatagtggcagcttagagagagagagagattagtagaaaggcgcccagctcgtagcttttcagctggtggtgcctctggctagtatagagtacatatttttttttcttcttctttgctttatccctttttttttctccctttggatgacatggatgtgcatccagctccagttgttgtcacccagtccagtggactggggtgtctgggatcttggttgctgctacttgctcgccattgccacccagttgctgccgctgctgctgaggtgttgctggcttagtggcttggcttgtatactctgtgttccctgtggctatcggtgcgtg

SEQ ID NO: 330 - DNA, 819 bp, Zea mays
cgcccaagtgcgcacaccacaacaaccactacgacggatccatgaacttcatgcaccgcaccgaggaggtcgactacttcccctccaggtacgacgccgtcaggaacgcgccgaggtacccgatcccgaccgcccacatcgccggccgccgagagaaggtactggtactgcatatcatcaatcaatcaccctgtcgatcatcgtcatcgatcgatagtaataagtagccgctcatcatcgatcacctgtcctgtccgtcgttgctgcagactgtgattagcaaggagaacaacttcaagcagcccggggagaggtaccgcgcgatggacccagcaaggtgcgtgcagtggcgccgtcatcccaattccttcctttctttgccttttcaactggactgtacaacccgtggtcgatataatccgtgctcaccgtcgtatctacactgcaggcaagagcggttcataaccagatgggtcgacgcgctctccgacccccgcctcacccacgagatcaggaccatctggctctccaactggtctcaggtaggtgtaggtgacaacccgcagcttaattattcaggcgatgatgtcatttgctcgctgaactgaacgagctgcactctgaatcgcgctggttgcctcgtccatggatgcaggccgacaggtctctgggccagaagctcgcgagccgcctcagcgccaagccgagcatgtaagatctaccagacaagggcgccgcgcgggggaggacggagctctctgtctgctttcgctcatgcatcatatgcatggaaccaagacaaattactctagcagacta

SEQ ID NO: 331 - DNA, 819 bp, Zea mays
  misc_feature (100)..(100): n is a, c, g, or t
  misc_feature (113)..(113): n is a, c, g, or t
  misc_feature (122)..(122): n is a, c, g, or t
  misc_feature (140)..(140): n is a, c, g, or t
  misc_feature (165)..(168): n is a, c, g, or t
  misc_feature (189)..(190): n is a, c, g, or t
  misc_feature (192)..(193): n is a, c, g, or t
  misc_feature (196)..(196): n is a, c, g, or t
  misc_feature (201)..(203): n is a, c, g, or t
  misc_feature (207)..(237): n is a, c, g, or t
  misc_feature (251)..(251): n is a, c, g, or t
  misc_feature (364)..(364): n is a, c, g, or t
  misc_feature (373)..(373): n is a, c, g, or t
  misc_feature (381)..(381): n is a, c, g, or t
  misc_feature (387)..(387): n is a, c, g, or t
  misc_feature (398)..(406): n is a, c, g, or t
  misc_feature (410)..(416): n is a, c, g, or t
  misc_feature (418)..(424): n is a, c, g, or t
  misc_feature (427)..(433): n is a, c, g, or t
  misc_feature (437)..(442): n is a, c, g, or t
  misc_feature (464)..(464): n is a, c, g, or t
  misc_feature (546)..(555): n is a, c, g, or t
  misc_feature (568)..(568): n is a, c, g, or t
  misc_feature (570)..(571): n is a, c, g, or t
  misc_feature (586)..(588): n is a, c, g, or t
  misc_feature (642)..(642): n is a, c, g, or t
  misc_feature (720)..(720): n is a, c, g, or t
cgcccaagtgcgcacaccacaacaaccactacgacggatccatgaacttcatgcaccgcaccgaggaggtcgactacttcccctccaggtacgacgccgncaggaacgcgccnaggtacccnatcccgaccgcccacatngccggccgccgagagaaggtactgnnnntgcatatcatcaatcaatcanncnntcnatcannntcannnnnnnnnnnnnnnnnnnnnnnnnnnnnnntcgatcacctgtcntgtccgtcgttgctgcagactgtgattagcaaggagaacaacttcaagcagcccggggagaggtaccgcgcgatggacccagcaaggtgcgtgcagtggcgccgtcatcccanttccttccnttctttgncttttnaactggactgnnnnnnnnntggnnnnnnnannnnnnnctnnnnnnngtannnnnnctgcaggcaagagcggttcatnaccagatgggtcgacgcgctctccgacccccgcctcacccacgagatcaggaccatctggctctccaactggtctcaggtannnnnnnnnnacaacccgcagcntnnttattcaggcgatgnnntcatttgctcgctgaactgaacgagctgcactctgaatcgcgctggttgcctcntccatggatgcaggccgacaggtctctgggccagaagctcgcgagccgcctcagcgccaagccgagcatgtaagatcnaccagacaagggcgccgcgcgggggaggacggagctctctgtctgctttcgctcatgcatcatatgcatggaaccaagacaaattactctagcagacta

SEQ ID NO: 332 - DNA, 872 bp, Zea mays
gcttccggaggcattctcttgtggaaaatctggaggataaaacggaaagtggaacaatcagtcagtaactgatgcattctgagctcaaattttcgataagatctgcaaacaagttctttaagtgcccttcaaaaacattttggacagtgggctacaagtatacaactacagtagctgctggtgaaatggaatcatagatgtggacagaaacatgattttaacataagaataccttgtgccacggatgagcctttatctgaggaaacctgaactcagtatagttgggattcatgcatcgtatctcctcacgggttggagtaccaagaacctacaggcacatcacataacaataagaaacaccctggcagaagaatagaatgtctacttcggaacattttgcagtaccttgataatctctaccaactgatcaacagcactctctcccggaaacagtggctgataaataagatccaagaccccaagaggttagaatcacaccatacatgatttggtcaaatcgagatacaaaaatattaggttaatcattatatgaatgcaaccaacctgaccaagaagcaactcagctagaacacaaccagctgaccatatgtctattgaagttgtatactctgtcgctccaaatatgagctctggagcacgataataacgagagcatatgtaagatatgttcggttcaccaggaatctgacaaaacaacatatggaactgattagtatgtggataaaaaaatacagcatacaagtaaagaatctaattgttataacacatgaattacagtcaattccaagattggaacttcggatagaagcaaaagaatcaatgctattacatacaaaagacagccccagaaa

SEQ ID NO: 333 - DNA, 1225 bp, Zea mays
atctgagttgcagcaacttagggatttgagcagggtcaatcaggaactacttgtccagactgaagagcttctacagaaggaggcgaatgaagacgctcaatttcgtacacaatttgggagtcgttggactagacctcaatcaagcaccctaacaaagaatattcaggatagattgaatctgtttgcttctaatttgaagagagctgctgatagtgattctctgattgaacgaggcgtgaaggagaactattcattgatgtctatccttgacaaaaggccggtgagagttcaacattagtatataacatgaaactagaagtataattaggatttaacatatgagtggattacttatctttatttgcttcccaatgaaccgtacctctcttctgtgatcatcattttattcttcatatctagatagttacatgtacctgttgtctgttgcagatagagtctgcacttccaagtatttccaggcctatcatgtccttggatggaaatgaagatgccattgttggagccctgaaacaaagcttggtaatgtacagtagtttctatagctagtagaacatgcagtaaaacttcttttttaacttggcaaaacttgcttttatttgtcaacagagacaactggagtctcttggcgcacaaagggcaggtcttgaagacatgctcaaagaaatgaaaagaaaggtgcaactattgttcctgtatctttcactataggtctttttgcacaagatttttcttggtcttacatgtagaatacattcgtctggtgctagcactgaacagtagctatgggtctgttttaccttcttagcgatcatgcttaaagttccaagttttaatgttcttgacttcttggagtgctgtattagtactaattcatcatgggctcctatgactgtgagtgtctgtgttctgttttgcgttgccccttccaaattacacttgacgattgttcaagaaaaaacccacttgacaatattttatggtggtcctgatggattgcttttcaagtttgttagccattaaactagctgaaattcatttgtcgtctttcattacttagaaattagtgataaataactgatgatgtggtcatatactatagtatcttagtgcattgagaagatccattttggccaggatgatatattgcctaagttgatggttggcgtgggatcacatgatgatctttcaagaaggagatgctaag

SEQ ID NO: 334 - DNA, 1225 bp, Zea mays
  misc_feature (277)..(277): n is a, c, g, or t
  misc_feature (584)..(584): n is a, c, g, or t
atctgagttgcagcaacttagggatttgagcagggtcaatcaggaactacttgtccagactgaagagcttctacagaaggaggcgaatgaagacgctcaatttcgtacacaatttgggagtcgttggactagacctcaatcaagcaccctaacaaagaatattcaggatagattgaatctgtttgcttctaatttgaagagagctgctgatagtgattctctgattgaacgaggcgtgaaggagaactattcattgatgtctatccttgacaaaagnccggtgagagttcaacattagtatataacatgaaactagaagtataattaggatttaacatatgagtggattacttatctttatttgcttcccaatgaaccgtacctctcttctgtgatcatcattttattcttcatatctagatagttacatgtacctgttgtctgttgcagatagagtctgcacttccaagtatttccaggcctatcatgtccttggatggaaatgaagatgccattgttggagccctgaaacaaagcttggtaatgtacagtagtttctatagctagtagaacatgcagtaaancttcttttttaacttggcaaaacttgcttttatttgtcaacagagacaactggagtctcttggcgcacaaagggcaggtcttgaagacatgctcaaagaaatgaaaagaaaggtgcaactattgttcctgtatctttcactataggtctttttgcacaagatttttcttggtcttacatgtagaatacattcgtctggtgctagcactgaacagtagctatgggtctgttttaccttcttagcgatcatgcttaaagttccaagttttaatgttcttgacttcttggagtgctgtattagtactaattcatcatgggctcctatgactgtgagtgtctgtgttctgttttgcgttgccccttccaaattacacttgacgattgttcaagaaaaaacccacttgacaatattttatggtggtcctgatggattgcttttcaagtttgttagccattaaactagctgaaattcatttgtcgtctttcattacttagaaattagtgataaataactgatgatgtggtcatatactatagtatcttagtgcattgagaagatccattttggccaggatgatatattgcctaagttgatggttggcgtgggatcacatgatgatctttcaagaaggagatgctaag

SEQ ID NO: 335 - DNA, 643 bp, Zea mays
  misc_feature (592)..(594): n is a, c, g, or t
  misc_feature (602)..(607): n is a, c, g, or t
  misc_feature (614)..(628): n is a, c, g, or t
gcttgatgctaactctcaagtacttcttcgagagaaacgttacagtgagtggtgaatttggtttatgacattatatgtactgtagttgcatgcttccgttgactgttttaatctcaccacattgcagattaactatccgtttgagaagggtcctctgagtccccgcttccgtggtgagcacgctctcagacgttacgaatctggggaagagcgttgcattgcttgtaaactatgcgaagctgtaagttgtacttatgtttaaagttttcttacttcagattatgaacatcaaatacagccaggaaccagttgtttttctatctttcctgagtagtggttgtcaaatcaaatatctattgtcaaaataccagttacctactggtatttgtgctgccaggatctgagatttttagctgagttggaacgcaaaaccctgattgtgggtccttttgagtttataagagttactatgattttaatattttaatgtatcttgtcttaaaaatatatttgaaacataagtcacttgaaagcaatttttttatcatattgctgcccagtgttttaggtgctccttatcatctttctgttnnntatggagnnnnnncatatannnnnnnnnnnnnnnttttgaagggggcat

SEQ ID NO: 336 - DNA, 777 bp, Zea mays
  misc_feature (768)..(769): n is a, c, g, or t
  misc_feature (771)..(774): n is a, c, g, or t
gcgatggggaatgtaaggatgattcgtcctctcgattgattctgacttcagtctagcctgtttactgataagcactgctgtttgtcatgttgtcagattctcttcgtttctggcgtcttactgaccattgggttgaagccaactgtgcagttcttcaccaagcctaagaatcacaaggtactgatcttctccctgcaaaacccgagctgtttcagttccatttatatttctagctgacaaatgagcctcaaactatgcagggttcaatatttttcgggtttggctttttcctggttctcattggatggcctgtctcaggaatgctggtggagtcgtatggcttcatcacgctcttcaggttggtagtttctttcctgttgttcttgcatgatctacttctacctggcagctgtttctctgttagtatcgtgaaatagaaacatgtgggcattgcatctgactgctgcttaatttcatcacagcggcttctggccaacagctgctgtttacctgcaaaagagcccctccttcggttggatattccaccaccctcttgtgacttcggtatgatcatcatataaactcctaaattcgtcagcttttctttgttccccgtgcttttcttttcaacgctgtttcctgcctgttggaatcttgcagctgatcactcggttcagaggaagacgggtcccggtgtgagtggataggatcaccccgagtccccgagggcatgcgaaatcgcctctactgtacagaagtaggccaatnnannnnatg

SEQ ID NO: 337 - DNA, 514 bp, Zea mays
aaggtcgtgcactactgcgcggcggggtccaagccgtggaggttcacgggcaaggaggcgaacatggacagggaggacatcaacgccctggtgaagaagtggtgggacatctacaacgacgagacgctggacttgaagggcctgccctcgctctcgcccgacgacgacgacgaggtggaggcggtggccaagaagccgcttcgcgcggccctggcggaggccggcacggtcaagtacgtcaccgcgccctcggccgcgtgatcccgtgctctggccttcccccaccgcgcaccgtaccggtggccgcgcgctatagcttgtgtgtgtgtggccatcgcggaacataagaagaatctctcactataaaggccttcgttctgtgtttgcattttggttttggattagggtgtctaatttttcaccagttcctttcccccttgtgtaagtgtggagcttactgtatagcgcccatttcaaggtgctgcaagcgttggtcaggaattgggctagagtg

SEQ ID NO: 338 - DNA, 424 bp, Zea mays
gtctcccgagatcttctccggctataaatttccgccccaattccccaatccagatgcgcaaacatcgaatcgtctcgctcgtggctgccctgctcatactgcttgccctcgccgtatcgtccacccgcaacgcacaggaggattccatggccaacaacaccgggacgttggcgggcggcatcaaggacgtgccggggagcgagaacgaccttcacctccaggaactcgcccgcttcgccgtcgatgagcacaacaagaaggccgtaagccctcaaccccctttgcctgtttgctaccccttctctgtgacgtgcccgtgttctgctggtattgagatcctctgcagttacctcccctgcagttgggtcactgatgtgtgggcccggccatggcattgagcatttgcgatacagacacaaacaaa

SEQ ID NO: 339 - DNA, 605 bp, Zea mays
agagattggaagcaggacttgggggatcatgagaggagttatggcgctggcctcacaaaaggtagaggaatatgccaaggaaggaggagtgggtggctggggagaggattggcaacacagcgagcagaaaagtgagccttaccaaaggtttgagcatgagaccaacggcaacagttggaattcctcccaaaattcttcatcgaagaacaattccagttcttgggacgactgggacgacccaggcaagaaagatgagcctgcgaaaccgcaccagagcagtgactcctgggctggctgggatgatgggaaggatgatggttttgatagccctagttacaacaatcacagcacctccaacaaggggagcaaccaaaacgggacatccggtggcacattttggacagaaggcggcttccgctgaaaccagtctcttttccatagagctatactttcagagttgttacatgccaggaaacgtgagggtccagtggttggtattatttgggatacttaaacagtcgggtgaaagggtttgtgtgttttgtaccatgtctacaactgttattatatctagtgagatatatttctgtggtcagatgccattc

SEQ ID NO: 340 - DNA, 895 bp, Zea mays
  misc_feature (883)..(890): n is a, c, g, or t
caccagaagtggatccagaaagcacatcgcctgtgacattgaacatttgtatgtcagtaggaactaatatccttcaattggggaaacattgaagtagtatcattttattgaaattgaattatataaagtgcagactgaaaatgtaaaaggcgttctggtcggccacaagtgaaacaaactcacatttcctttcaaatcccatggggtctcagaccttatacagaaatagaaaatacatatactgccaattaacaaacatgttttccagtaatgagcagaaatttattgaaagcacaaacagtcaattgcccaatatttcgttttcattcggtgtatgctgcacaggaagcaacatctgctcctaaatccacggtcaagactcaagaataatccgaaaagtgattgagctactacttgcagtataatatataagtccaatttctcaaatcaatggccaagagatcacaatcctaaggtgatgttacctataatgatcatgtacacaatcatgacgccgacgttgttgatgacgacgcagacctggagcagcctcctaccccaccatccgaaggcgtcggccatggccgcgctgtaggagcgcgcgcccgcggcccggctgaaccgcacgagcagctcgatggaggcgtcggtgaggagcgcggcgagcactatcatgacgagcccagggacgagaccgagcaccttcatggtggccggtagcgccatgatgcccgcgccgacgatggtggtggagaggttgaacaccgcgccggcgaaggaggcgccgtcgaactcgtggaacgcggaggcacctgcgtcgtcctcgtccccgtccccatcccgcttcgtggggagcagcgggtcgctggcccccgggaagtgnnnnnnnngaaca

SEQ ID NO: 341 - DNA, 612 bp, Zea mays
actggctctcttcctgatggccgggagcttgaccgcatcgacaacccccaggtgcgtgcgtgcagcctttttttttagcttctgaatacacgacgccgcctagtaatgaataatgatagatagataatactgaacactgatgcactgtcatggcaatcaatgtcagtttgaaggctacaagttcgacccgcatggggagtacgtccggcgatggattcctgagctcgcaaggctgccgacggagtggatacaccatccatgggacgcgcctgtctccgtgctgcaagctgcaggaatcgagctgggctctaactaccctctccccatagtggagctggacgcggccaagggcaggctgcaagcggccctgtcagagatgtggcagctggaggcggcgtcgagggccaccatgaacaacgggacggaggaaggcctcggcgactcctcggaggtcctgttccctcaagagctgcagatggaggtcgaccggcagccagccccagccgaggcagcagccaacgtgcacgtgcacgtgccgatgcctgcccggaggcgcggggaccagatggtgcccaccatgacgacctcttcgctgaacagagctggaacaga

SEQ ID NO: 342 - DNA, 1303 bp, Zea mays
  misc_feature (1282)..(1298): n is a, c, g, or t
agggactctgggctactggttggacacataatcggataagagtgattgtctcaagtttcgctgtaaaatttctacagataccctggatttggggaatgaagtacttttgggatgtgcttctggatgcagacctagaaagtgatattcttggttggcagtacatatctgggagtttgcctgatggacatgagctcagtcgtcttgataatccagaggtatggaattgtaagaacaatgcattttagctcaaaatctccctcgaactattagttgatgtaaacctctgtgaactcagattcactgctgttatttgattacacaagcacacataaggactcgagtgttttagcgctgcaaagatgcagcttttgtgtttagctgcctgttatttataactgaaatgtttacaagaaagagtcatgctcaagtaaataacagctgcatgtagtggctcctagaaactatagctcacaaatgaggcaactgacccactaactaactacccttatgcctggaagccaggccaacactaactctgaatataagactcgacactaagctacaggttgacactaagttgtcacaaactgtaggattacacaagtttatcaggaacttcagttatgacataattcatagatttaccttgtgtgatgattgctggcactactctttttctgagaaaacatgctgacactatagattcttactcaatattgttcatttgttaacgaaaggatgctcaatagaaacagcataactattttctgcagagcttgatgaattctaaaagaagtgtaattggtagttaatgctaaatcaaggcagttgcaggttagcctcgtctgttgtatttattagtagacaggggttttcatcctagctgcctaattcttaaaagggaaaacaattggcgctgtccactttgtattttttagtgaaaagcgtaattaccatgttcgccttaaattaaatatattgcttcttgtaggttattaatctgacaggatgggttgcccctcggacatgtgtgatattgatatggctacattttttccattttgtcgtccacatattttttttacagtcaccaactccctccagtctaaaatacttcctacttttggctttgcgtagtctttaatgcttatttttgaccactagtttatagaatactagtgtgttctgacttgcattttgttgtatgtgaaagtaggttcagggtcaaaagtacgatccggacggtgaatatgtaagaacttggattcctgaacttgctagnnnnnnnnnnnnnnnnnccata

SEQ ID NO: 343 - DNA, 706 bp, Zea mays
  misc_feature (697)..(698): n is a, c, g, or t
ccgccgccgcgcggtggacacggaagaggccgccgccttcgcggaggagcaggggctcttcttctcggaggcgtccgccctcagcggcgacaacgtcgagcgcgccttcctcacgctgctccgggagatccacgccatcgtgtccaggaagacgctggatgcgtgttagcgacctggaggatgggagtatttcaaccatgggcgccaaaacagagaagaagcagtgaggagccaaaggacactacgacccaacaagcgcttcatagggccggaatggcgtaattgagagaggcccatgagaattagggacgctagctgctagtaaatacagagtctggtgagaggaggagggcatcgaggcacagaaccctgatcccggctgcgtccggtggctggcgctgcgtcgccgtgtacggattccagacattgataaaccacaaagctcttcgagagaggaccttgagcaccgggagcggtgctcaaccaccaaaactctgcttgtgcctacaatgcggcggcagaaaccggcggcaccaccgacgtcctggctctcaagggcaccaagctgtcgcttgctgatgagatatccatcatggagacgagcgccttgagaacagcaagcggcggcagctgctcgtgcacgtgatggtggtgcatgcatatacgattatacatgcatatacagctcatggaattnnaatccgga

SEQ ID NO: 344 - DNA, 649 bp, Zea mays
ccacaaactcatattactcgatacttggcactaaactcagccatatggtaaaatctcgatgaatttgctaatcttcgcagaagccggtgcatcaatcgaaaccaccactaagccagtagatctgtaggtacacgaagagggaagggcaagcaataagctactgctacaagactagatccacacaatttccagcttaatacgaacctgtcgagcccaagaaccctaccagatcttgccctccgccgcctcaaaccccagatccgggtccgccaaggaatgacagcagcccttgggccgcgctggtgccggggggcgcgttgggctcgtcgaggaagaggtcctccggcacccggaacgcgccgtgcgccgcgacgagggccccgccgacgagcagcccggagatgatgagcgacgcgacggaggtgaagaaaagcaggatgaaggacgcgccgacgagccccagcagcgtctcgcggtcggaaaaggttcggccgaagaggacaacaggctggtcggaggggcggaagaggtagaggaagcaccaggcggcgaggaggcccaggaggatgaggagcgagaaggggtgcgccaggagcgaggcccccagcgcgaaggcgaccacggcggcgtagttgacgcggaagtaagc

SEQ ID NO: 345 - DNA, 464 bp, Zea mays
cgaccgcgagacgctgcttggccttaccgtcgcttctgtgctcgccttcttcctcacctccgtggcttcgctcatcatctccgggctgcttgtcaggggcgccattgtcgcagcgcacggcgcctgccgcattccagaggacctcttccttgatgatccgagcgctgcgtccagtggaaacaccaccagcaggctgatctccttccttgcgtcgcccggatctggggtttgatgcatcaaggaccggtaggaaattcttgtgctcggcgaattcagttgaagtcaaatagagatctgatccagaagctgtataaaccagctccttgctcatgtggtacctcacctgcgagtagcattgtataagtggatccgatttttctgttctactttgtgtggaattacgcaaggatctgcaattgctgtacttctcttgcacttcaccagatctggtgacaatgaccatt

SEQ ID NO: 346 - DNA, 641 bp, Zea mays
gtggcccgagatggcgtcccgcaagcgcacctgggtgagtgagttagctgagttctcgtcctccgaccttcggacgcgacaccaccccccccccaatccccatgcatatctatctagtatatatatacgacatgtcatctgaccgtgcgctcgcgactggatgtggatggaacgcaggcaacggtgcagcaggcgatggacgggtgcccgcactggtggatgcgcgaggcgctggagcggctcgtcgcgcggcaagccgtgctgcagtctgccctctgatcgtcgtcatcgactggggtgacaaaagaggcgggaggcgcgagccaccatgtgcgcacgccgccacggctctctctctctctctctcggtgcagcggcaggccggccggcccggcgttccgggtctggaatttggtcgccctcaccggagagtcgaacggcgcgccgcgcggctcgtgtgctctggcgatgctttcttgtgacccatccccccctgaccccgaggcgcggagtcgtcgttggcaaataaaatcatcagatcgtttttagagggcggatggtttagacgaaatggaaaacaaaatctgaactggacgcctagtggaaggaaaagtaatagaacagcagcgcgaaacaattcg

SEQ ID NO: 347 - DNA, 495 bp, Zea mays
acaggatcacgatcgagaagctggtcgagcacccctggttcaagaaggggtacaggccggccgtcatgctggcacagccgcacggctccagcagcctcaaggatgtccaggtcgccttcagcaacgccgaccacaaggacagcagcagcaaggtggaacagccggcggacagctccttgaagccggcgagcctgaacgcgttcgacatcatctcccactccagagggttcgacctgtcaagcctgttcgaggtggaccaagagcagaaggccagcaactcgcggttcatgacccagaagccggcgtcggcgatagtgtcaaagctggagcagatcgctgagacagagcgcttcatggtgaagaaacaggacgggctggtgaagctgcaggggtccaagcaagggaggaaggggcagctcgcgatcgacgccgagatcttcgaggtgacaccggcctttcacgtcgtcgaggtgaagaagtcggcaggcgacacgc

SEQ ID NO: 348 - DNA, 531 bp, Zea mays
atatcttcctttccaagattcaaatttgatggagatgtacagaaagattggaaaagcagatttcaaatgcccaccatggtttccatctgatgtacgcaagttagtgtcaagaattcttgatccaaatccaaggactagaatgccaattacaaaaatagtggaatgcttttggttcaaaaagggcattgacaacaagctaatccgaaagaatatcgagatgaaagggaaagtttcagctctcactgatgttaatgtagttttctcatccacgggtattggtagcaacaataacaaattggttgatgtggaacaagatgtagcgaagattaccaacctgaatgcttttgacattatttccctttcagaaggctttaatctttcaggcttatttgaagagtccgagaaaagaaaagaggcacggttcacatctagtcaatcagcttcaactattatctcaaaactagaagatgctgccacctgttcaaagatgacaataaagaaaaaagaaggtggtgtgctaaaaatggaagg

SEQ ID NO: 349 - DNA, 539 bp, Zea mays
aaatcatggagaatccatggtttaggaagggtttaggtgcaaagctacttaggtacgatttacagaataagaatgcccctcatgtggacaagaatgcagattttgattcactgagcaccaacgtaacaactgagagcaagcaacatgaagaaaagaagcctaccaacatgaatgcatttgatataatctctctatcaactggcttggacctctctggtttatttgaagaatctaacaagaagagagaatccaaattcacatctaccaacacaagctcgacaatcatatcgaagatcgaagatattgcaaagaatttgcggttgaatttgacaaaaaaggatggtggcttgttaaagatggaagcttcaaagcccggaaggaaaggggtaatgggtatcgatgccgaagtatttgaggttagccccaacttccatcttgtggagataaagaagacgaatggcgacactctagagtatcaaaaggtcctgaaccaagaaatgaggcccgcactcaaggaaatagtgtgggcttggcaaggt

SEQ ID NO: 350 - DNA, 620 bp, Zea mays
ttagcaaatctacagaagctctgagattgctctgtgggtgttacagattttcaagggagactgtcagatccccaagtggctttcgcctgccgcgcaggaccttctcaagaggatcctccaaccgaatccgatgaagaggatcaacgtcgcggggatcagggagcacgagtggttcaagaaggactacgtgcctgctgttccgcacgatgatgacgaagacgtccttcccagtccagctccctcgataaaggaggtgtgtaaagctgtgagaggagagagaatgggaggaactactcgattcttttggtttcttgtcttaattaaagctgactgttttggtttcttcttcctgaagccaatcgatgagccggcgcaggagaagtgtactcctatcaacgcttttcagttgatcgggatggcctcttcccttgatctttctggtttcttcgaggaagaggtttgtgttttgttttgtacagttcattgaacgatgataaaaagtgagacatgcatgaaaagtcacctcacttctattctatggttcctggatccattgcaggatgcagcgcaaagaaagattcggttcacttcgacgcacccacccaaggatctatttgaca

SEQ ID NO: 351 - DNA, 334 bp, Zea mays
tcgtctgggcctccagccaggacacaccgggcgccgcttgatgtcgtcgctgtcgctcctgccaccattattgtccttgcccatcaattgctgttggtgtccgtgtagggggggtcgtgctcgtgcattattgtttggtgacgaagtgatgtttgtttgtcgtttgccactctcgtagttgatggtttctgctgtggtgcagcggctgctggcagttgcagttgggctgttgcccgcggggcgcgagcaaagcagaatcagcgggaactagcattcgtatcctgcatgcacgcccataccgtgtcagctctgaagtgggaagaactgtaacaag

SEQ ID NO: 352 - DNA, 339 bp, Zea mays
aggccgagggcacgaacggacggctcgcggccaccgccgaggtgctcgaggtggccgtggacgtggccgtggtcgagttcgtgcacgacgccggggacgcgctggactttaacaagttctgcgccgtcgacgtccgcccggggctcacggagatcgtctgggcgtggcagggcgacagccccgccgccgccgtcggcaccgcgtgaacaagcgtcctctggcgtccccgtctgtgacgtggaagttgtagcaactttgcgtaggagttaaacacggctgcactggcaccagctttttatagcatgtaaagtttcaagttctcgtcgttgcttcgagact

SEQ ID NO: 353 - DNA, 512 bp, Zea mays
cacgacgagacttgaaactttacatgctataaaaagctggtgccagtgcagccgtgtttaactcctacgcaaagttgctacaacttccacgtcacagacggggacgccagaggacgcttgttcacgcggtgccgacggcggcggcggggctgtcgccctgccacgcccagacgatctccgtgagccccgggcggacgtcgacggcgcagaacttgttaaagtccagcgcgtccccggcgtcgtgcacgaactcgaccacggccacgtccacggccacctcgagcacctcggcggtggccgcgagccgtccgttcgtgccctcggccttggcctccatcctcaccttccagcctttccccctggtgacctcgaatcctagggcgcgcgccacggactccagcttctccaccacggtggccgccggcgcgcgggccgtgaacacggtcgcggtcttctgctcgctctcgaacagccccgacaggtcgaacccggaggacatggacgagatgagc

SEQ ID NO: 354 - DNA, 1180 bp, Zea mays
  misc_feature (716)..(717): n is a, c, g, or t
  misc_feature (1124)..(1128): n is a, c, g, or t
  misc_feature (1171)..(1174): n is a, c, g, or t
gttgtagtgcccattcttcttccatctgacgtttaattcttgaagtgcttttaagacctcaaccattatttcacgagggtgggcccgagactgttggttaagtgatacatcaatacaagtgctaggccatacaaagtaaagtaaaatgaacagtatccaatacctgaagtccaagcgcccattttctttcaacaggataatatggccgcaaaccactgctatgaggatcactgcttcctggaacataattcctcgtaccagaactagatgattcagatgacgccagctgatttaaattcctgtcctggagaggcaaccattcaaacatctaatagtgttagaatcatcaatagatcaaataaaccctcaagatcttttttgtttaaacacccaggtgttgttaatgtgtactaaccattgattcttgataatctgccccaagatagccactagttgctctaaaccgattgtccaatagtaaataatatgcaacagttgcctacaaagttttcaaaaatttagtaaacaagtcaccaaaaggaacatataaggctcacaatgcatgtccatacctcattttgaagtctgctgcacagtgattcacacacatggttcttgttaaatcccatattaacaacatctcgaagtgtatcttcatcaatcttcaaaaatgataatgttagaaaatgttagaacattgttaggagaacggtagnnggctagtaagtaaaaatcaatccaatggaaacgcctaaatatccctcaaaaaaggaacgctgcctgaaaaatttagtgctccactcatgtactccgtgagacatacatgctagtggatcggtgttactatacagactacctgcagtaaggaattactccaagatacaacttttgactatagatttctacaacattatgttcaatagatattagatactacagaaacatgcttatagaagtatttttcatggaaaatagatagatgatattctgatatgaacaatatacacatctactttttcctacatattagtggacaaaattagaaactttgaacacaagcatgcaatagcagtatagccacttataactgagaggacataccattttggcttgttgtgtcgtannnnntggaggcactgccaagtaacgtggaaggcgaatctggaaccannnntgctcc

SEQ ID NO: 355 - DNA, 561 bp, Zea mays
ccgttgaagtatgcctctttaagcttcttgaaggacagtgctgtcagaagcgaatcagaccctgcctggtggcagattccaacccttgcaacatcaagcagctcagcaagcttgttcagccctccatggaggctattggagaacctcatcaagtgttttatatcgtagataacaggaaagtaaatcttgatgagatcgaagaatcctggcagcgtatcagggagatttgtgccagtgagtagcttgagcaggtagccaaagtcgtagccgctatgaaaagtcacccaatgcacatctgaattcaatactacgccggaggacatgagcagttcagcaaagcagcgagagtcgactccatcagcagcatggcgagagaagtcaataccactacggcgtagaagatcgatggagtccgctgcagccacatcagtccgagggtcaaatcctcgaaagttgaactgccagacgcagggacgaccgtctgggcctagcgccggcagcccaccatgctcgtcggacaaggtgagcccgagctgaataagcttcagcatgtccacgtta

SEQ ID NO: 356 - DNA, 467 bp, Zea mays
agattccagtctcatccttccctgaggttccagctggtcgaggtacacacttttgcgaaacaaaactactcaaattgttttttatgtgttccatcacctttattctacagtttgtaatccttgatgttttatatgcagtaattgaaattcctggtgatacttctgttattgatgctgtaaggactctctctgaacagaacataagggcagcaccagtactgaattcagaacctggggctcctactgattggcaggggaggtaccttggtgtcatcgattactcggcaatcatcctttgggtactagaaaatgctgagcttgctgctgttgcactctcggctgcatcggcaactgctgctggagttggcatgggtgctgttggtgctgttggggtggcagctttgggagcaactggcccagctgctgtagctggcttaactgcagctgcaattggggcttctgttgct

SEQ ID NO: 357 - DNA, 872 bp, Zea mays
  misc_feature (775)..(780): n is a, c, g, or t
  misc_feature (829)..(834): n is a, c, g, or t
  misc_feature (839)..(850): n is a, c, g, or t
  misc_feature (857)..(866): n is a, c, g, or t
acaaaaggagaccagcggtacgactcaacaatcgatcgaacctgcagtagtaaaagaacaacagatgatcgtcatacaatatttaactagaatagaagagtctgaactaaattgaatcttatcaacaaaacacagtgcaggtaacaataaaaaagcaagatatgtctaaactttaaaccatgggccaacagttgcaatatatgtagggtaaccaaaattccgttcagccacacagcaaaacattaggtcaaatgtgtccctttgagtggacggattcttaaatttgatcaatactaacaaaagaaaacatatttattatttgttcattcagtggttacatgcgtaattgttaaggccaagaccaatggcttactgttgttgatctgaaaggttcctgctgaagtaaaactttgtagaaatcctcccctaaatgatctgcagcagttagcccatccttcgccacacccttttcagcagttaatccaccagcaacagaagccccaattgcagctgcagttaagccagctacagcagctgggccagttgttcccaaagctgccaccccaacagcaccaacagcacccatgccaactccagcagcagttgccgatgcagccgagagtgcaacagcagcaagctcagcattttctagtacccaaaggatgattgccgagtaatcgatgacaccaaggtacctcccctgccaatcagtaggagccccaggttctggattcagtactggtgctgcccttatgttctgttcagagagagtccnnnnnncatcaataacagaagtatcaccaggaatttcaattactgcatataaaannnnnnggatnnnnnnnnnnnnaataaannnnnnnnnnacataa

SEQ ID NO: 358 - DNA, 1000 bp, Zea mays
  misc_feature (986)..(993): n is a, c, g, or t
tgtaattgaacatacatgtggtcttatcaagaataagtacaataatatattgattggaaatattggaaccatgtgtgcatttgttttgaaaggttgaataaatatagtctagttttttttgggttatatataactaggttgaagattatttgtagtcaagcttaagctaaattgtggagaccatgtggatgtgcagaatggcgtgtattcataagttgtcaatatttgaaaccttctgtgcaggggataatggaagcctgtggttttgggactggaagagtggtcataactttcaacaagatcagactatagtccagcctggtaagttttcatttgaatcatgcaggcaccgataataggagataagcaactctgtttcgagtctccacaatgtttttcctcatatgagaggttcttgagaacaccagtatcagaaatgctactggtggcttaaatcagcctaagggcttgttcgttttgctctcaatccatgtgtgctctcaatccatgtggattgggtcgaacaagtcaacatcttttataattttttccaatccatccaatatatatgggaatccaatatatatgggataggaataaccgaacaaagcctaaatgttatcacactgagtccttggttaatccatagcaactagccaaactattccagagttccataatctagatgttacctagattatgttatgtccgttgaaaagtatgcgatttgaaatgatcatgctcattactggtatctcccattttcaggatcactggagagtgaggcatgcatatatgccctctcatatgacgtgagcggatcaaggcttgtgagctgtgaggcggataagactataaagatgtggaaagaggacttgacagcgacgccagagactcatcccatcaatttcaagcccccaaaggacatccgaagatattgatgctcaaatcccacaagtagcaagctagtggatggttggagcctnnnnnnnntgtgtga

SEQ ID NO: 359 - DNA, 395 bp, Zea mays
ccctgcatggcgccacgaccaccatcagagtcagagccatggcggtgaacaaggagacggagcaggacaggtggaggggcctggccttggacacctcggacgaccagcaggacatcaccagggggaagggccgcgtggacccgctgttccaggcgcccatgggggacggcacccacgtcgccgtgctcagctcctacgactacatcagccaggggctcaggcactacagcttggacaacatgatggatggctactacatcgctcccgcgttcatggacaagctcgttgtccacatcgccaagaacttcatgcccctgccaaacatcaaggtgcccctcatcctgggtatctggggaggcaagggccaagggaagtccttccaatgtgagcttgtc

SEQ ID NO: 360 - DNA, 529 bp, Zea mays
acgacgcagtacacggtgaacaaccagatggtgaacgcgacgctgatgaacatcgccgacaaccccaccaacgtgcagctcccggggatgtacaacaaggaggagaacccccgcgtgcccatcatcgtcacgggcaacgacttctcgacgctgtatgcgccgctgatccgcgacgggcgcatggacaagttctactgggctcccacccgcgaggaccgcgtgggcgtgtgcaagggcatcttccgcagcgacggcgtccccgacgaggacgtggtgaggctggtggacgccttcccgggccagtccatcgacttcttcggcgccctccgcgccagggtgtacgacgacgaggtgcggcggtgggtggccgagaccggcgtggagaacatcgccaggaggctcgtcaactccaaggagggcccgcccacgttcgagcagccgaggatgacgctggacaagctcatggagtacgggcgcatgctggtggaggagcaggagaacgtgaagcgcgtgcagctggcagacaagt

SEQ ID NO: 361 - DNA, 350 bp, Zea mays
ccggatgttctcggagagctcaggagcctgcaggagctcatcgtgtctggcaacggcctctgcggcgagttcccgaaatccatcctgcggtgcaggaacctgagcaagctggacttgagctacaatgcgttccgcggtggcctgccggagagcatctgcaacggctcacggatgcagttccttttgctcgaccacaatgagttctctggaggcattccagcaggaatcgggggctgtacccggctgctcgagctgcatctcggtagcaacaacctcagtggtgaaattccagctgagataggcaaggtgaaaagcctgcagattgtgctgaaccttagcttcaatcactt

SEQ ID NO: 362 - DNA, 506 bp, Zea mays
aatgggatgtacaactttggaaggggcaggtttgaggttctgtcagggtatgtcaatgcagtgttcttggttcttgttggtgtgctgattgtgttggagtcgtttgagaggattcttgagcctagggaaatatcaactagtagtcttttgtcagtttcgataggtggacttgttgtaaacataatcggattggtgttctttcatgaggagcaccaccatgctcatggtggtacctgttctcactcacattctcattcacatcatggtcatgaacatcatcaacaccatggccatgaagagcacaaacatcataatcatgatcatcacggtgcgaataatgtgaaggcatgttgtgatcatcatggagatgacaaccatcgccatgatcaccatgggaatagtaaaagtgagggcattcataacaatatcgtggataacacctgcaaggagaagcatggccatgagcatcatcaccatgaacattcggaacattgccatcagagcag

SEQ ID NO: 363 - DNA, 551 bp, Zea mays
ttccgcacagatccgtctataaactccacgttcccatgcgtatgccgtcgacgacggtgttcttgcttgcttcttgtgctcaccatgcagggcaccgtgaagcttgtattccagccggcagaggagggccagggcggcgcgtactacgtgctgcaagaaggcgtccttgacgacgcgtcagccatattcggcttgcacgttgacccggccctccccgtcggcgtcgtttcgtccaggccagggcccttcgcggcgacgtccggtcggttcctggcgacggtcaccggtaaaggcgggcacgccgcgatgccccacgaatccatcgaccctgttgtagctgcagccactactgtcgtcagcctccagaagatcatctcccgagaaatcgatcccctgcagggcgcggtatgcatgtgtttctgcgtcgtcttagctgtgctgtgctgttgttctgggctgtctgactctgcctcatcttcttcgctgatttaaattaaatgtatcaggttgtgtccgtcacttttctcaagggaggagaagcgtacaatgtc

SEQ ID NO: 364 - DNA, 801 bp, Zea mays
ggtaactgatgcttaattaatccggtcaattccgcacagatccgtctataaactccacgttcccatgcgtatgccgtcgacgacggtgttcttgcttgcttcttgtgctcaccatgcagggcaccgtgaagcttgtattccagccggcagaggagggccagggcggcgcgtactacgtgctgcaagaaggcgtccttgacgacgcgtcagccatattcggcttgcacgttgacccggccctccccgtcggcgtcgtttcgtccaggccagggcccttcgcggcgacgtccggtcggttcctggcgacggtcaccggtaaaggcgggcacgccgcgatgccccacgaatccatcgaccctgttgtagctgcagccactactgtcgtcagcctccagaagatcatctcccgggaaatcgatcccctgcagggcgcggtatgcatgtgtttctgcgtcgtcttagctgtgctgtgctgttgttctgagctgtctgactctgcctcatcttcttcgctgatttaaattaaatgtatcaggttgtgtccgtcacttttctgaagggaggagaagcgtacaatgtcatcccagagaatgtggcctttggcggcaccatgaggagcatgacgaatgaaggtctatcgtatctcaagaagaggatcaaagaggtaaaactccgatcctctctcgttacctaacctaacctaaaccgcgcgcacacagttctcttataaaaaacaaaatgctcccttcttcgcaagatcgtcgaaggacaggcagcggtgcaccactgcagtgccagcgt

SEQ ID NO: 365 - DNA, 297 bp, Zea mays
cattgccgccaggggcggcgcacggaacgggactcgtggggagagacgttgttcgggacaagatcgaggagctgctccgtgacagtgagacgaaggcgagggcgctcgcgctgcgggacctcgccagtcgggcagtcggcgatggaggttcgtcgcgccggaatctcaggcagttcttgggccttgtgcgaggatcggagagctaaagctgcaattttggggctactgttgtgtttgcgaatcgcgatgccaggacaaaggtctgcaccgtgaaaaatcctgtttcgatgttctgaa

SEQ ID NO: 366 - DNA, 1104 bp, Zea mays
aacacaaaataaaccctcagctactaaagaggcgtgggtttccaatcgctgtcgaacttccggtgctgcaaaacataggacagtagtaaactgttatagacaaagacgaaaagaacctctggtcctggttgaaattggaacaaagtgactgggatactagtacctctgaaattggcattcgagttctcacagcctcaacttttgacaaatcaagatctgcaactgcaaatccagtggagagccgatctgcaaccacatttttctaatcaagcaattgcatcaatatatgtgtagaaaacagttgtttcacaggttttaggataagagggctctagcacaaacatgcagcatgtaatacacgccaattgtattccacatcaagcatttcaatgtaaaaaaattgatgattgatgcagcattatgaaataacaaacgaggcatttaagtaatcagataaatcttgaacaaagaagtcccagtgaagatacacaaaagaatcctaactcaaaaaagtaaagaggtgaaaagggtatacctggaagtcgagctatcactgtcccccatgggtcaataattatagaatcaccgtaactttctcttttttcattgtgctttccagcttgagcagcagcaataacctgcaaatggtttcgaacactgtgcatcatgttttaaaatcacaacagaaaagcagatgttgcataattggtacagcattaactttttattttatatatatcatgttgccaacaacatcaggcagcatgagataatttgattttcaaatgtgaatgaaatgtgttatgtgtgtcacatgtcactaagaagatagaagggtttgattaacatacataacattgtgtctcaattgcacgagctcggaggagaatttcccagtgtgcctctcccgttatctttgtgaatgcagatggcactagtaatacctatgagacaaaattaagacaggatcacaaaatatacatctgctctacactttctatgataggagggcatccaatataatgaatcatattgactgtgtgaagtatattagaatgtgtaaccacctgtgcttgatgcttaaaacgcaaaatttgataaagc

SEQ ID NO: 367 - DNA, 523 bp, Zea mays
agtagtaataatagcaacacagaagaaacctccaatttccaccgtacccactccaaaccttcccaccctacacttcggcccttttgactgagtagtgtagtgaacgaggccgtcacatggatgatggattatgggcctttctttgaggctgaggcgccaaaaaccactgtcgtatggtataatccatccgtccatcaggttcaggtccacgtgaacgctatcgggctggccacgctgtgcttcccgtccgaccacacgagccgcccgaaaccggcggtgcccgacggctgcgacttggacgtgaacctcaccgtgtagctcttcttctcccccaccgacgtgaactccagctccgccggctccacgtccacggccacgcccttggcagcggcgagcgacgtggacgccttgtacgtgcccgccccgcccacgttggtcagcgtccgcgtgtgtgtcacggtggccgagtccccgccgccgtcgccgttggccgtcgagtaggccaccgagaaggacgggtagt

SEQ ID NO: 368 - DNA, 569 bp, Zea mays
cttcttcctccaatcctcccccccggccctttcccctcttcggcctctctcgctcagctcgctcttcattaagcgagctcacgtcgttcctcccttcttcctcttcttcttcttatccgttgttcaattcgttcagctagccggccagagatcgagcatcatctccatcatcgatcgatccatctcatctctttctcttcttctattctatgtcgtcgtcgtcccagattagatcgaagctgctagcagtctatccagtctctagctagctagatcaagcccgcagactatataatataatacaagctagctacgtgcttattattgctttattagtctagaagaataatctagatatatacgatcgaacatatatctcgatctccaccgatacacacccggccctatccatgcttgaggtgtcgacgctgcgcggccctactagcagcggcagcaaggcggagcagcactgcggcggcggcggcggcttcgtcggcgaccaccatgtggtgttcccgacgtccggcgactgcttcgccatggtggacgacaacctcctggactacatc

SEQ ID NO: 369 - DNA, 607 bp, Zea mays
atcattagaatctttgttatgattgcaaatgggagattaaagtttgattggctaattttgtgaagcttatattccttccgtttctttttagttgtcgctggatagttcaattttgcactattcagctacaactaaaacgaaacagaacgagtataaatgcatgacagataactgttgagttttttttcttcttcttctgaactgtgcatttttttacacagataataagcaatgggatcttcaagagcccagtacatcgggttgtaacaaacgcggagaaagagaggctatcagtggttctgttctattctatagatcctgagagagaaatccggcccgctgacaaactgatagatgagaaccatccagcactatacaagaaggtgaaagtcaaagaatatactgctggactctacgaacatttctctcgagggaaattggttaaagagactgcaaagatatagcttgttcgctttggattaaatccagctatttggactaatccctagagacaaaaacactgtataagtagtaaaagtcggtacgaattaaagcccaagctagtcgtatctatgtaatgaataagggtgaaacctttgcgatccta

SEQ ID NO: 370 - DNA, 334 bp, Zea mays
gcgccccggccctcgccatcaacgccaccatcgagaagaccaagcggcggttcgagaactacggcaagttcggcctgctctgcggcgccgacggcctgccgcacctcatcgtcagcggcgaccagcggcactggggcgagttcgtcaccccgggcctgctcttcctctacatcgccgggtggatcgggtgggtcggcaggagctacctcatcgccatcagcggcgagaagaagcccgccatgagggagatcatcatcgacgtcgagctcgccacccgcctcctccccagggggttcatctggcccgtcgcggcctaccgcgagctcatcaacgg

SEQ ID NO: 371 - DNA, 1195 bp, Zea mays
  misc_feature (928)..(928): n is a, c, g, or t
  misc_feature (931)..(931): n is a, c, g, or t
tgtcttcagttccatgctttgtgtcatctctgtgaatacatgggtgcctatgtttgtttaacttttcatatttttggtaacttgagtattggaaacttattttagtgcaaggtagctaacaggctaagttttcctttttttgtcagtcttagtggagctgtactctccagatcgtcctctggttgatactgcagaggtgtttctgtggcttatggcagttggtaccattctttgtgcatcatactggtcagcatggagtgcccgagaagcagatattgaacaagagaagcttctgaaggttctaaaccccaaatcttgtttgatttctattgctagttttgcgtacttgaaaaaaagggactgacaggttcaatacttgttaggatggtcgtgaagtagcaccaaactttgagcctggaggttctagtggtatggtagatatcaacatggtatccgcaatactgtttgtggtgattgcatcatgcttcttgataacactctacaagctgatgtcccattggtttgtggagcttctggtggttatcttttgcataggtggtgtggaggtgtgtaccatttcattttctttctggtattgcatctgtctgaactgtgcttttgtgcttccaaaaaatcaaatcgcccaaatggtcaaatcccgatgtgctttgataatatactttcacttttgagagaacactgagacacttccatctttatctgtaattcattgttttttgacatgtaagagcagtcataaattgaccaaagaacttcttgttagttttggaatgaccaagtgtgctggtgtgtgggtgtatcaatgtctcgatgagatagcaatatgaattattattgcttctgctgattgttactcataataatgtattgccttccatttcatgagctcccgtgatgttttttcctnttntgtgaagggtctgcaaacatgcttggtggcctcactgtcaatgtcaaggtatgctctgtatttttttttgtttttttctgactcaagatgaatttttagacattttgtagctcccttttatatcagattttacagctatgtgtatttttcttactgttactaagtagaagtcatgggatctttcaggcggtttaaacctgctgcagaatcgtatgtgaaagtgccattttttggagctgtttcataccttacattggcagttgt

SEQ ID NO: 372 - DNA, 861 bp, Zea mays
tgtaaatcctaaaggtatgatactccggactccagtactcaacaagattagtacttcacttatttctaaaaatattttgtgggttcccctccagtgcaagcgtcaattggtgctaatacatgggtggtcagtggaactccacagacaaagagtatgttctcatgacttgcattatctgcttaactagcttctgttaagatgctcttaatggcataatattattgatggcataatattattcattccgttgtgctggctttctacttaactaggtagtaatgatgtcctataatcctgtcacactggcagctggtgctttggttatgcatggcttttgtcaatttgaattttcagggagaaaatttctcttgagctagatttgcacaacagcacaacagtattcttatgaagcatttttcttatttgaacagagctgcaagatctgcttccgtcgattatcaaccagcttggtatgtttctctttactcatgtatacctattgaattcaaaacctatattattagatatatctccttttgtgttcttgatcccatcctttttgctacacagtacttgagaatcactgaaatcttatatataattatgacttgtgagctccataactatgctgtactataaatgattttgttttaccttcgactgttcctccggttcaggtcctgacaacctggacaatctgcggaggctcgcagagcaattccagaagcaggcctctggtgcttctggtgcagaggctggtgccagcgctggggctgttcaggacgatgatgatgacgttcctgagcttgtccctggagagacatttgaggaggccgcggaagagaaaaaggagtcctcatg

SEQ ID NO: 373 - DNA, 406 bp, Zea mays
ctgatattcaccaagcccctgacggagcagcacgcgacggggctcctcctcataaccatgggcatcgtcatcaagctcctgccggagaacaaggagggacgcccgcgccggctgcccaagaatgacgacgacgacaagccccgggagagtagagaagcgggggaggaaacagcatgactgctgctatagacccgacacccgacccgagcaaagcagaactgacgccagctcgatcagcaacagcaaccctagaagaaattctcagtcctccaaaacagcaatccccaggaggaggatgggatatacatgcaggatagagcactacatacagtaataataaccttttttcttcgctcctcccctcgcttttctcatgtgctgtggttaatgttaattgtgcacttcg

SEQ ID NO: 374 - DNA, 769 bp, Zea mays
cgacgatcagatcgtaaccgccgtgtgtaacaatgtgtacgtctgaaagacgcctttggtggtcgtttctgatgtcctaggtctgctgggagaagtttgcaaggtattttgaggtggagctgaaggaggttaagctatcagaagggtactacgtcatggaccccgtcaaggctgttgagatggtggacgagaacactatctgtgtcgcggcgatcttggggtcgactctcaccggagagttcgaggatgtcaagcagttgaacgaccttcttacagagaagaacaaggaaactgggtgagcgttttgttctctgcctgggcttctagctagctagggcattatcttttgaatgcagcatactctgctcttgtttgattctttctgtgaagatgcttacttcccttgttgatgcacgcaaatgaaggtgggacgtgcctatccacgtcgacgccgcgagcggagggttcatagcgccattcctctaccctgagctcgagtgggacttcaggctgcctctggtgaagagcatcaatgtcagcgggcacaagtacggcctcgtctaccctggtgttggctgggtcatctggcggagcaaggatgatctgcctgaggagctcatcttccatatcaactacctggggacggaccagcctacgttcacgctcaacttctccaaaggtatcttcggctccttcctttcaggctcctctgttgtttccttgggtctttctcatggtgcatggaattgagagggactggcgatttctg

SEQ ID NO: 375 - DNA, 512 bp, Zea mays
cctgagtgctcgaacggttgaaggccatccctacctgcagtttgcatcggaagacattggcgacccaagtgtgaggttcatcacctacaaccacaaggtgaacggcaaacgggtggtgcgcttcaagtcgaaccatctcggcaagttctggaggcggagccccaactggatctgggccgacaccgacgacaccagcactaacaactccgacaccctgtttgaggtcatcaagatcgacgaggacgacgtgtacgcgctccggaacctcggcaacaaccacttctgccacaggctgacctacgacggcaaggagagctgcctgaacgccacaattccgaccatcaggaaggaggcgcacatcaagatcgaagaagccgtcctctcccgaaagatctccaacatcgagtaccacctcaagggcgccaagatcttcgacaagaaggccaagaccctcatcactcgagaggcggtgaacggcaccagcacggacagcaagaccaccatcaccctca

SEQ ID NO: 376 - DNA, 1252 bp, Zea mays
caaacttacacagcctgactaatttgggggatcccatggttttggaaccattctggcatatgaaatctttcacgcaatacgggtctgacgtctttctggagggaaagatgcttcaggagtggaaatataaccgtcatgagctggaatgtttagtcaagaaaaaaatcagcgcaatttgttaggctagaagttcaggcccacagaatgacttgtgccatagtcagttacctgatcatcagaatgttgtccagctgaaaatggaacacaaggtattccattcaaaggctgaagaatgaaactgaacggattgttgtcgacaatgacaatcctgccaaaatcttttgacacgcgagtaagatctttcacatgttctctatattccctgcaatcatgcaacccattgatgtcagaccattggcaaacaagtatggtgtaaaacggtcaggcaggaagagaaaaacatcaagaaacgagtgtattatgattgaataactcagtgaatcagcacaaacatgcatagtaaaggaagcatccatagttgtacagaggcaatgacgacagatcaagacacccaataaaaatgcacattgaatatattgtagaagttctggagtgcagatactcggagaacttggttaagataaaatgaatactaaaatttaaacactactagcattccatgtgtacaatgttaacatcattattggttgctgtgtacaagcattgactatgatctgtttttttcccaattgatagagatgctggaatgctaagtttgcagacatcccaataaggtaacaggtctcaacacaagaatatgaagcaacagcacagtggtggtacaacttgatttgtatagtggtaatgtaacttacgtggtaacagttgatgggcgatagagacgaattctgaatctattgtgaacatctattcggtcaactaaaggtctagcataacctgaggagaagcatggataggttaagtgaggaaatgcacaaaagtcaaataggctcatggttacaaaaaatgacagaaggaaacataccttctaaacctgctgtaaaaaggataagatctgcaaattcactagttttccgcaagaactcatgcaaaccagggcgctcaaaaacagtcacatgattcaccttttgtttgccttcaacatccttttaaagtttacaaaagaaaaggcttattggtcagtagtgatcaaattattatcaacgaagtgacatataacaaaggcacgagt

SEQ ID NO: 377 - DNA, 485 bp, Zea mays
tctggcttcaatccttccataccttgtgtgcgtgcgcttccatgggttggttactgcaatctgctatacgatcaggaaggcagtaagcaactttgttgtttacactaaatggtcctcttctgtctgttgcagcttgcggctgtggcggcactgtgtgtgcaatatgaatctgaatttagacccagcatgagcatcgtagttaaggcactctctccccttcttcaacataaaccgcaaccaccggcagccactactgacgctacagcaccgtcagatgcctgactttctcaaggagctatgaatcatgaatgttaagagaaccattttctcttcggtgcgtgcgctgttctagatcactatcgtgtgcctatgaagtgatcagtgtcacacaagcaacagcattgtgggctaaagcatatctccacctttacttagcttggtacaggcaggagacttcccattgtcattaccgtgttctatgctga

SEQ ID NO: 378 - DNA, 489 bp, Zea mays
ctttatatattgacaaacagaatttgcaccttaaatttggttgtgataacaatgatgatttcttacattatctcagaattggtgaaatatttgagcttgttgaggaggagatgaagattaaactgtcttgaagattccgattcattttgttgggctatccatcaaggaagaagaaatggaaaagaaagatcaatcagttcactattcaccaggattctatatccacttatccagtgtctttatctgccttagtagaagccttcagagcttacctatgatcttagaatatagtactggtctccttgtgacccatatttttttaaaaaaaatttaatgttgggttacactggaatcatattgggaggagagcgttggaccaacatatgttattgaaatgagatttctaagttatgaggatcattcgcctagcttcaggtttgttctgtgctgttgtagatgtgtattatttacttcattggcctgctgtac

SEQ ID NO: 379 - DNA, 1010 bp, Zea mays
  misc_feature (952)..(955): n is a, c, g, or t
  misc_feature (993)..(995): n is a, c, g, or t
tctcgtcggatcctcagctggtaggctccactttttcgcctctccccgatgaggcgaaaccctgtcgcgatccgtacctttttttttcagttcatgaagcgtgaaaccgtcgcacagtcagactgctgcggtaatcaagtcaaaatgatcgaacagtttcgcttttctgaagctctctttggtcaaatttaattgtacaaattacaattctctccgcagtcattcgggcctgtaagcaaatagtagctgttgatgtatgtgttgaatacaaataggaagctcagacgtttgtcctcatggaatttctgcgtttcagtctgtacactccaaatttgtatctgtaatcagcagatgggcattgatatttcatctagttttatttagggacctaaatttctgtcagatatccttaagaaaatatagtggcaaaaggtttattgttaagtaatctacacagctttcagcaaaccctcccagaaatgtaaagtagttttggatgcctgcttcctgtatggctgcaattgtcagtgagctagttgaggaagatgaagtttgtttagtttgcatcgaagaattaagatgtggtattctgcatacaagtcttctcctgtctttatgaagctgatgtgttgtgtttaggcatgtatctaacaataattccttgatgcaggggcaccaattgccggatctgcagttgataaagtggatgaagtgattggttacgttagcatcgggtacccctttggtctgatggcctcagtcctattcggaaggcataatgatgctatactcaagtctgaaaaaccaaagcttttcatcatggggaccaaagatggcttcaccagtgtgaaacaactgcaaaacaagctcaaatctgcagctggacgggctgatacacacttgattgaaggagctgggcacttccaaatggagggccctgcttttgatgccnnnnatggtagaaattattattaaattcattaattccttgcnnnaaatagcatttatgg

SEQ ID NO: 380 - DNA, 769 bp, Zea mays
tgcagaagggctggtagagggcggaaagtaagtctttttttttccagctaggaaagacggtcatgtttggaacctctagagctaatagtcagctgctaaaatcagttgtagaggttccaaacaaccacagctaataccttagctaaatgctaacaattagtatattagttagctcaacctagctaacaatttattagctgactaaactattagcttccaaacagggcctaacatttcattacctctggtagtatcctcctctacgtttccgtcgaatctttccttgcgtttgcttactgctgtataaacaactacaggaaggagatcttcacgccaatgtacttctttcttgttcggaagcctcttctggaatgagctcttggatcacctttttcaggtcagcaaggtggttttgtaagcttcccagatccatgtcttcctcgttccgtgaccagtttctaagttgttgtgttgccggttttcagagagagaaggcaaggggccatttcgaagaagccgaggagggggaacctggaatcaagaaaaccgtcagctctcctgtgtaggaagaaagttaacgaacagtgtagtaactgttcagctttgtgtttattcagttgttttgctgcttgaggttattcgtttctaggtgggggttggaatccttttcgccataaacctctcagtggcataaataagatggtttgcataagagtacttcatggataccgtaagggctactactgaaagagaaatgtttaagcagcat

SEQ ID NO: 381 - DNA, 591 bp, Zea mays
ctgctgctggtggtgtcggctcactcctttgtcaatgggcaaacgcccttggtgccactgtcatcgggactgtttccaatcaagaaaaagccgctcaggcagctcaggatggatgccaccatcccataatttacactagcgaggatgtcgtcgcaagagtcaaggatattacatcaggaaaaggtgtcaatgtcgtctatgattctgttggaaaggatacatacaaggtacttactatatgtaccaactgccctgttgtcgtccactgctcgttgcatggctggatgctttgcttgctacgcagcgctgagttaatgtttagcatccaactctgggcataacctttccactggtcttgcaactaaattgatactggttgccatcaccaatacaaatacaaacaccaaacgatctgtatggtatctgtgatgtgtgcaggcttccctggagtgcttggcgtcccgcggcttcctggtgtcgtttgggcagtcgtcaggcaaacctgacccaatcccaacgagcgacctggcttccaagtccttgttcctcactcgtcctagcctcatgcattacactgctacccatgatgag

SEQ ID NO: 382 - DNA, 270 bp, Zea mays
agcatgagctgccacctctacctgaacccgagttgccattgccaccaaaggccgagagccactacccggagccagggatggccaagccgtgatcggcctaacactacccggaggccggccggagttagagatgatcacgatgtgatcggcctgcattagtgaacacttcatgtatatgtatttacgtacgtacagtatgctttatactttgatgtctgcatgcgatgttgtggacgtgccccatgcatgcacacaactcgctaggagcgt

SEQ ID NO: 383 - DNA, 395 bp, Zea mays
gttgggcacggtgatcacgcctgcacgggcgaccggatctgctccgccgcctatggtgggcgtcgacaggtccatgctgctggagcttgcgatcagcgccatggatgaactagttaagctggcacaggttgacgagcccttgtggcttcccagcctcagtggctctcccgacaagaagctgctcaactttgaggagtatgcccactcgttccctccgtccgtcggcgccgtgaagcctgtgggctatgtatccgaggcctctagggagtctggcctcgtcatcattgacaacagccttgctcttgtagagacccttatggacgtggtttgtatcctgttcatgcatgtttttgcaatttcgcttggtaccattgttgctccatgacttttttttt

SEQ ID NO: 384 - DNA, 958 bp, Zea mays
  misc_feature (951)..(954): n is a, c, g, or t
tgctaccgctgcggctaacagcctcaaccgagagttcaggtatgtataactaaggtcttgaactcagtgattacattgttgttcctctttaaacaatatgtactttctgcagattaaaacttaaagagcacatgcagtattgtgtggatcaccctgaagaggttagcaagctggccaaagtggaggcacaggtttctgaagtcaagggtgttatgatggaaaacattgaaaaggcatgctttatggattgatcaagctatacaatctaactgttggtattgagggccactgtaagaatgttctgattgttttgtttcccaaatgcaggtcctagatcgtggagagaagattgagctgcttgttgacaagactgagaatctgcgctcacaggttttcatgcattcctttatcctgctctgtagtgctccattgaatattgtattattttttctttttggagctgtagacgtacatttcgcttagaagggcaaatccatagatgtcggaatatctgtaggttagaaaggaaatccatgtaatatctgtaggttcgaaaggcaatccatttccataaatgctgagatatatctaagcatgtaagcagcatactatgtcaaatcccaagaataccatcatcgacttgttagtgttcatatgcaaatataaatacaaagtattgaaatgaaagcataacctttctcaagggttggacgttcttctatctataatttttttgggttttagaacagtgaatgatcttaaatctatttaaattttgtgatgtaactcctatttgcgtggccgatttggggtatgcgaaacatagccagtttcttataatttgtctgggtttgcaggcacaagatttcagacagcaaggaacaaatgtgaggagaaagatgtggttgcagaacatgaaaatcaagctcatcgtcctgggaataatcatcnnnnttat

SEQ ID NO: 385 - DNA, 571 bp, Zea mays
cgcatgaggggagagatggaccaggtgctccttcctacgccattgccaacttgttcttgttcttcttcttcttccattatattggcggcttgactgaaacgttaatctgcttgcaggtccggagcgtgatgatggacaacatcgacagggtgctggagaggggtgaccgtctggaggtgctggtggacaagacggcaaccatgcaggggaacacggtgcgcttcaagcgccaagctcgccgcttcaggaacaccatgtggtggaggaacgtcaagctcacgtacgccatgttcttgttgttgtcttgcacattttagggtaacaatcgcctgtccctgtaactcttccactggtctttttgcagagctgcagtgatattcatcctcaccgtaattgtgtacgtcctgctcgcctacatgtgtcgcggcttcaccataccgtcatgctttccgtaatctccatccgtcccggtgccagtgcggaccaccagccctagctctagctgcgtcacaacttggttttccgggttctgtaacagcagcagcggtgctgcagttctctctcttgtacg

SEQ ID NO: 386 - DNA, 940 bp, Zea mays
aacaagggacgacgagcggtggcggtgggcgatgatgatgatgatggcgggggagcacgtgctggccgctctggccaccctgcttctggcctcgctcctgaccctggtgctgaaccacttcctgcccttgcttctgaaccccaaggcccccaggggaagcttcgggtggccgctcctcggcgagacgctcaggttcctcacgccgcacgcctccaacacgctgggcggcttcctcgaggatcactgctccaggtacactgtgatactagtgccgtttgccgcgcgcgccggccggcccggcggccctttttttccccctttcttttttacctttttccaccgtccgtgcccgtgttccatgcacacggacggctcctagctgactagccaaccggccggccatatgagatggatggatggatggatggatggatcgatcgatcggtcttgttaccgtgcaattaagtatcgcgccattatttcatgtgacagcaaaaggtgacgcgctgcccgccggccgctgtcatgtctaagctagcagcagcagccttttttctcacggttttgttcttgggtcgttccgagaccgggacgacagtagtctgatctgatctgagagagtagtaaaaaaagaggagaaagtaaacaacggcgctcgacgatagattttacttacatgcatgcatgcatgcatggtcctactagcagctagctagctaatggcagcatgcattgttgatatgcaggtatgggcgggtgttcaagtcccacctgttctgcaccccgacggtggtgtcctgcgaccaggacctcaaccacttcatcctgcagaacgaggagcggctgttccagtgcagctacccgaggccgatccatggcatcctgggcaagtcctccatgctcgtcgtcctgggcgaggaccacaagcgcctcaggaacc

SEQ ID NO: 387 - DNA, 536 bp, Zea mays
cttcctatttcaactctgatctacttcaacatcttcctgggcgacatgtggtccgccatgaagtcggagaagaagcgccagaagcagcacgacgagaacgtgcagaaggtcgtgaagcggctcaagcagaggaacccgaagaaggacggtcttgtttgcacggccaggaagccctggatcgctgttggcatgcgcaacgtggactacaagcgtgcgaggcatttcgaggtcgacctttcttccttcaggaacatccttgagatcgacaaagagaggatggttgccaaggtcgagccccttgtcaacatgggtcagataaccagagctacctgcccaatgaaccttgcccttgcggtcgtcgccgagctcgacgacctcactgttggtgggctgatcaacggttacggcatcgaggggagctctcacctctatggccttttctccgacacggttgtcgcgatggaggttgttctcgcagatggccgggtcgtcagagccaccaaggacaacgagtactctgaccttttctatggcat

SEQ ID NO: 388 - DNA, 714 bp, Zea mays
  misc_feature (689)..(690): n is a, c, g, or t
agctacgacgaactcaggccttcttgaggatatcatctggctcacggagcgtaccaaacatccagtccatccagacggtgtagtggccatagttgtggcggtaagtcgtatggtggatggtgtgataccccgctcccatgactggccataacttgccgtgaatgcagtcgtggatgtttgtcgtccacacgccctccaagaacacgagagcgatgtgcgtcctgaagtgcgttgggaggaggaagagcgcaagcacatgcggtatcgcttgcagaataccatccagtgggtgaaacgcgagtcctggaaagcaaatgtgttttagtagtcatggccgaatggctgctcatagcaaaatggagtaatggacttcaaaagcgacacaccagagcttaacatcaaggaactatgtagtgcacgcaagtagtggatcgtaaatggaacttttctaccgataacgaggggagaatgcgagatagaaactgagagctggatacgatagtgcagatgcagacttaccagcaaacggagacaaggtgttctccttgttgtaaatatggtgggttgcatgcagatgtttgtatagtggctttatgtcatgcaactctctgtgcatccagtaaattccaaactccacaaaaatgagatacatagccatataacaaaggtacgcagaaaaccccatttcnntgatattaaagtaacaccgggtcc

SEQ ID NO: 389 - DNA, 679 bp, Zea mays
  misc_feature (26)..(26): n is a, c, g, or t
gctacgcgggtgagtcactgtcactngctgccattgctgctgatacacagggacacaccagctagctgtccaagagttttctttttttgctgcttcaatctgttcactttgctcttgcttccacaggccactacgtcccccagttggcaaggaagattgtcgagtacaacgaggcctcgcctcaccccttcatcaacctcaagggaatccttgtgagtatcgtatcgtatctatgcatgctgctgccaaacacgagcaggccgccggccggccggctccagtctaatcttaacccccctccaaaaaaaaaacatcgatcaggtgggcaacgcggtgaccgacaactactacgacaacatcggcacggtcacctactggtggacgcacgccatgatctccgaccgcacctacaaggccatcctcaggtggtgcaacttcagcagcagcagcatctcgcgcccctgcaaccgcgccatgagctacgccatgaaccacgagttcggggacatcgaccagtacagcatctacacgccgtcgtgcgccgccgccgcggccagggccaacgccaccgtgctcaggttcaagaacaccctcgtccgccgccggcgctcctccggctacgacccctgcacggagacctacgccgagaggtactacaacaggatggacgtgcagaggg

SEQ ID NO: 390 - DNA, 367 bp, Zea mays
cgtgtctccgcatgatgcaacgagcacgcgcatgaactcgatggatgaaatcaacctgctgcggcaggcgcagcggcagcatcagcatcatctcatggtgcgcggcatcggcgaggagatcgacctcgagatcggccctgtcgacgatccctctttttccggagcttccttagtggccgttacgtccacgcacgacactgtcgttcacgccgacgaccacaagagcctcctcatcccgtgttcgcagcccggcgcggcggacgggctggcgccgcagcagcacctgtcgcagggggaagagcatgacgggatgctcaggtcgccgtcggggcacaccaagaagaagaagaaggtggtcaagaaatgg

SEQ ID NO: 391 - DNA, 836 bp, Zea mays
  misc_feature (784)..(795): n is a, c, g, or t
  misc_feature (797)..(798): n is a, c, g, or t
  misc_feature (803)..(819): n is a, c, g, or t
actcatgcaccacagtgtactggctgaatgttgatgtccccatgaaatggtaaatgggctttccatttacagagaacctgctcttcatatcattcatcatgacacctacgcctgtggcactccggaccttaccacagaggttggtctttccgctcttgcaaaacttgcattctttgcattctgcttggtagcaaggaatgacatgatccccaggctgcacatcagttactccttcaccgacactttccacaattctattaagacaagtaaaagaaaaattgtccatcacagcccaacgatgaattacttcgtgtatagaactgaagcaaatacacacacacacttattacccggcagcttcgtggccaagaatgcaagggaaaagaccctcaggatcctgcatagaaaatggaggtattaatatcgttttagtgttctaacatgaccacatggtcaactaaataatacctactataattgcacagcatgtgtctaactaacaataccaagtttcagcaatattcttacgttacagctgatggcaccatcccctgttagtgagggaaagtaggaaaaagtcttacagtgcgccatcaaatccttgtatttgtttagaatcattattttatcaaccagtctataaaactctaggaacatagccacaagatgaagtgacaaaaatacgaccaaaacgccaaattatatcagaacagcgactgtccatcagcgtcaggattgccatttgccaatggctactacacccaccagagtgagtgaccatttnnnnnnnnnnnnannacccnnnnnnnnnnnnnnnnnaaccaaacgagcatgag

SEQ ID NO: 392 - DNA, 1539 bp, Zea mays
  misc_feature (824)..(825): n is a, c, g, or t
gtctgcatcctcagctgtggtatctcgaccggtaagcaagatgccatttccatgcattccatggccatgccgtgctttagcaggatggcttacagcttactgaactgtcgccgtcgttttggtgcaggccttggcgcgacactgaatgtggcgaaaccagccaagggctcgacggtggcgattttcgggcttggggctgtaggccttgctgtaagtggtggtggaagttttatgaggtttattttttttcataatatgattggaatatgtatggactgaacactcactgtatactatatatgtttcaacgtacatgatcgatcaggctatggaaggtgctagactggctggtgcatcaaggatcatcggcgtggacatcaacccagcaaaatacgagcaaggtataactaaactaattaatgccatcttaggccttatttttttacaccaatccagctctgattaatgtggattggaattaaatctatatcataatccatactccaaaataatccaaacctaattaattttttatccagttaaacccatcctaaactataacaaaggctttgtgaattttttaaactatagaaggcatagattctatccatagctcactagatatgaaacaaaatccataaaaatattatacaaatttatattagaatccatgtattaaaaataagtaggtttgaaagatacatagattaaatgatggatttaatctcaccataagattgagtgtgaggtatggattcacccagttcagaaccggattaaatccatgatgtgatgtcatttcatccattgcaaccgaacaagannttatatattatgtgtgaaatggcagttttgtacttgtatgattcttgatgcctgcggcacagagaacttacttccatttgcttttcgtttttcagctaagaaatttggctgcactgaattcgttaaccccaaggaccacgacaagccagtgcaagaggtgtgcttagctttgtcgcagtatatatattactgacggcgatcctttgttcaggacaaagaaactaaaatcctacatgtatctgatatccactgctcgttggtgctcctgtgttgcattgcaggtgctgattgagctgaccaacggcggcgtcgaccgcagcgtggagtgcaccggtaacatcaacgccatgatatccgccttcgaatgtgtccacgacgtatgtgctcgcctcagctcaatcttgtgcgattctatcaccaccatcatctgctttcaggctgaaatggaactctgaaatgcaaatgcagggctggggtgtcgccgtgctggtgggtgtcccgcacaaggacgaccagttcaagacccaccccatgaacttcctcagcgagaagacactcaagggcaccttcttcggaaactacaagccccgcaccgacctgcccaacgtcgtcgagatgtacatgaagaaggtaagccgccgcctcaagaaccttggagtacgtacctgacctgcttacggttcaaccgtatccctgactgacgatcaacatgcg

SEQ ID NO: 393 - DNA, 621 bp, Zea mays
gtcgctgttgtccttggtcgcaagcagcggctccgtctccttgtcaggcatctgcagcaaccacgaacatcagattcagaccggccccatgaatggctgaactcggctctaacaaacccgtgcagtccacctccatctcaaagaatgtgatggcctgatagttgggtgtgtgatgactgatcgatcgatggcagacgacgtgcgtacctgtgacaccgggagggcgtcgcctgcggacttcttcttgccctcacgcaccgagaagatggagtagagcgccatcccgaagatggcgacgaggatgcccaggatgttccgcacggtgaaaggatcgtgcagcagcgtgtacccgaacgacagcaccaggcacgtcttgaggtggcccagcacctggtacgtcaccggcgacgtcgtcccgatcaccaggaacgtgctgaagttcaccgacaccgcgatcaagcacgacaggacgatgaagccctgcaacatagctcaggcatccttgtcatggttgggcacgttgtcatgtcacccacgacccacccaaagctgagctacacacttgggagttgggagtgatcttttttctttctttctgaaactgtcaacaccgttgcagag

SEQ ID NO: 394 - DNA, 815 bp, Zea mays
  misc_feature (731)..(733): n is a, c, g, or t
  misc_feature (754)..(755): n is a, c, g, or t
  misc_feature (762)..(766): n is a, c, g, or t
  misc_feature (777)..(811): n is a, c, g, or t
atacgctttcagttgttgctttagactcggttgcgatgcccatcacaggtacgctcattaacccgacagttccagcaacatagtagcagtacatgtagagctcgtcgaagttgttataccttgtcttcctaagatcactcctcatcccttcaatcatgtccctgaatggctgccacaacatttattgatttcaaaacgttggtaacttggtatcacaacatagtttatcaaaccactaagtggcacagatagttttctctcggtcacttcccagtggcaaatctaggatttaaagttaaggtggtccaaccttatgagaatcaataaacaaatgagttcacattttaagttctacaacgtatgagaatcaaaagtagcaaataaatcaaaactatctatataatttagcaggatcaaaatcagcccaccttgtccaccctctagatcgatctgccaatgttcccaggtctaatttttaattgattggattttttccccctgaaacgtttctctctcaatcatcatctagatcctattttcttctgcgctggtcatacagttaccttttgtttcttaaaaggtcggaccaactaaggatagaccaactaattaattcacattaccaaggccatgtaatattcaaattattgcctctcgctccaagttttgctgtgagggctgagctctagaaacagttcattttttatttaaaaaaaagttacattgaaacnnntttgacccaaacacctctccnnggtcctnnnnnatataactagnnnnnnnnnnnnnnnnnnnnnnnnnnnnnnnnnnnaacc

SEQ ID NO: 395 - DNA, 502 bp, Zea mays
acgcccatgttcctgatggctcgcaagatcaagtcgctgggcgtgaagatggtgctgtccggggagggctccgacgagctcctgggcggctacctctacttccacttcgcccccaacaaggaggagttccacagggagacctgccgcaaggtgaaagccctgcaccagtacgactgcctgcgcgccaacaaggccacgtcggcgtggggcctggaggtccgcgtgccgttcctcgacaaggagttcatcaacgtcgccatgggcatggaccccgaatggaaaatggtataaatcaggggtctcagcggctgcgcttatagctctgtgctctgttgttttatgatgattgatgacgatgccttctcttcttctatcttgctttgatctgctggcgcacacacgcacagtacgacaagaacctgggccgcatcgagaagtgggtcatgaggaaggcgttcgacgacgacgagcacccttacctgcccaagcatattctctacca

SEQ ID NO: 396 - DNA, 1215 bp, Zea mays
  misc_feature (1153)..(1153): n is a, c, g, or t
gttagttttttgtccccatttgtcgattttatttgcctttattactttgatttctaatttctttagactgaatccatgtgatgttttgagtaataaaagtttaaagctgattgtgaaaggcatattttccttatacataagtaatattaatatttgttgtgcctgcatttgtaaattgagatactgaactagtggaaccaaagacttatttgagttgtttaagtagtctaaagtcctgttttgaagaaacctagtttttaagaatccagtttttatgtctagtttttaaaaactggtttatggtgtttggaaccatatcagttttcataaattggttttagttagggaacgctagcttcttggtttttaagaaaccgagaatccagtttctataaactgtatgtttggaaccaccctagttttcataaaccagtttctttaaaaactaggtgcttccaaacaggccctaagcgacaaggaaacccgatacccgacatttcagtcagatccatcagactatcaagtagttttaactattatttgagtgagcgtttattagttttttgttgcaatgaagttgctaaaacgaattcaaactggacttgctaaaacaagttcaaactggacttgctaaaacgagtttaaactggaaattgtgtgtagtcttgcctttctgggacccgaaacatatccataagtaactatgaataggatcaaaacattacctccagggtattttttttcaggagcatgccagaattgtattatgctaaacaatgtaaatttgataccaaatggtatttatttatgcagtggcataattcccccctcaccagaggagtacccaattttgggactcaatcttctgaggctgttggttcagaatagaattgctgagttccatactgagctggagcttttacctgtcaaggcacttgagcacccttgcatcaagcatgctgtagagcttgagcaatccttcatggagggtgcctacaaccgagtgttaagcgctcggcaagctgtgccacatgagacctatgtttacttcatggaccttctcgccaagacagttaggtgagtgggattctgttactcctgtttatttgattgtttgattttatctcattgtgttttcctgctctcacagaantgagatcgctgggtgcagcgaaaaggggtatgattccctatctgtaagtgatgcaaaacaaa

SEQ ID NO: 397 - DNA, 507 bp, Zea mays
  misc_feature (498)..(503): n is a, c, g, or t
cgctccgccccgacctgctcgccacctccgccgaccacctgcgcatctggcgcatcccgtcctccgacgacgccgaggacggcgccgcttccgccaacaacaacaacggctccgtccgctgcaacggcacccagcagccgggcatcgagctacgctccgagctcaacggcaaccgcaacagcgactactgcgggccgctcacctccttcgactggaacgacgccgacccgcgccgcatcggtacctcctccatcgacaccacctgcaccatatgggacgtcgagcgcgaggccgttgacacccagctcatcgcccacgacaaggaggtctacgacatcgcctggggcggcgcgggggtctttgcctccgtctccgccgacggctctgtccgcgtctttgatttacgggacaaggagcactccacaatcatttatgagtctggttcaggtggcagcagcggcggcggttccaactctggcgccggagatggtgggactnnnnnnccga

SEQ ID NO: 398 - DNA, 661 bp, Zea mays
catctacgcgagcagaagaacggtcagttgtctgatgggcacaaggtagttcttttggtcacctctgaagccgacaaggacaaatatggatccatatttgatattgtgatgtgtaagcctataagggcaagcacaattgcttcatctattcaacaactgctcaaagtagagatagccgaaagaaaagataatcaaaaccggccgtcgtttcttcgaagcttgctggttgggaagaatatattggtcgtagacgataataaagtcaacctcagagttgctgcggctgcactcaagaagtatggtgctaatgttagctgtgttgaaagcggcaaggatgctatcagtctacttcaacccccgcatcgcttcgatgcatgttttatggatgttcagatgccagagatggacgggtatgtggatgaaataaacaaagtcgttttccatttccatcctgctgtttgaagtttgtttgctagttgaataaaaaaaatgtttccactgaccagcagttctcgattgttacttttgtaggtttgaggcaaccggacaaataaggcaaatggagttgaaagcgaacgaggaaaggaagaacaagttggctccgatcgaaggctcgacaactgccgagtaccatctgcctgttctggcaatgacagccgat

SEQ ID NO: 399 - DNA, 605 bp, Zea mays
ctctagtttagtacaccaatccgcatgcattcttttttgtttgtttgtttgtttgtttgttttgattgacaaatatatgcggcagagttaagaacgaatcgactccgtcgtctcggctagtcgaccgtacatatccacgacctccaaaggccgccaaaacacccgatccggccagccagatagacagccttgtcgtgtcatcgtctacttagatgtcaactcccatctgaatctcctcctccatggcggctttcctataaatacgtcgcctttccatgttggatgccattccattccattccaagcagcaggcaacagcagctatagtttccaagggaaagggatacatcacctgctgctctagctctgctatagcgctagcagcaatataatataatggcggccgtcggcgctccggggagctctctgcacggagtcacggggcgcgagccggcgttcgccttctccacggagcacgaggaggcggcgagcaatggcggcaagttcgacctgccggtggactcggagcacaaggcgaagagcgtccggctcttctccgtggcgaacccgcacatgcgcaccttccacctctcctggatctcctt

SEQ ID NO: 400 - DNA, 366 bp, Zea mays
acctcgacctcaagaagggcggcaacaggttcatcaagaccgccgcatacggccactttggccgtgacgacgccgacttcacctgggaggtggtcaagcccctaaagaaggcatccgcttaagaatgtattgggaagttcactggacatgaggttcatcttcgtctggctctgctgatacctgcaaggattgctgctgctgctgccgcccctggatgtgtgtttgatcagtgactggctgctctgctccatagaagatgaatgaagagagagatggtgaagaaggctttggcaaatggcaattgccgcagcaagccatgtcggcgccactgaccggcttagtgattggtataatttggtgtggcag

SEQ ID NO: 401 - DNA, 487 bp, Zea mays
tgtgcagtcgagggtgacgggggcaaagtactcgtaccagtggatggcattggcgcagcagaaccactggcacgtcctgcttgatgctggggctctggggcctaaggacatggactcgctggggctgtctctgttccggccagacttcatcatcacttcattttacagggtgtttggggctgacccaacgggctttggatgcttgctgatcaagaagtcggtaatggcgtgcttgcagagcccaagcggcgggacgggggcggggctggtgcggattgtgccggtcttcccacagtatctcagtgattcagttgatgggtttgatggtgtcctggacgggctggaggatgataatatcattccaatcgaggaggggtcagcctcgaacagtcaccatgcatcccaattgcctgcattctcaggcgcatattcatcggcgcaggtgagggaggttatcgagagcgagatggaccaggacagttcagac

SEQ ID NO: 402 - DNA, 661 bp, Zea mays
  misc_feature (576)..(577): n is a, c, g, or t
aggaagcagaggagctggagcctgacgctgctctgcagcttgggccccatgaagtcggcggccaggagctccacgagcgccatgtagtggagcagccccgccgaggccgcgttgagcaggcccaccacgatgagcgccgtggggctgttctccctgtacaccttggtgagcgccagccccagcgcgatcccgaacggcgtcgtcgtggagaagaagaacaccagccccgccttcatcttcgcgccgtactccgcctgcaggatgcagccgccgagtcccatgccctcgaagagctggtggaagcacatcgccgtcaccagcggccggatggtgcacacgttctgcgacgctcccatgcccagcccgatcaccaccgagtgcacgatgatgcccatctccaggacctgcgcgtggactgttagctagtttcaatgcccatgagtcatgcatgaccgtacgaactgcgatatgacacgcatattaccacatggttttgctaatatttattctgatttaggccccgtttcaatctcacgggataaactttagcttcctgctaaactttatctatatganntgaagtgctaaagtttagtttcaattaccaccattagctctcttgtttagattacaaatgggctaaaagtagctaaaaaaaagc

SEQ ID NO: 403 - DNA, 752 bp, Zea mays
gatcgaactggacctgcccagcacgttcttgaggaggaaggaggaagagtcgagcgagaggtcgctgcacttgccggcgtcctcgggcgacaggttgccggagaagcagacggtgccggagacggagatgacggcgatgttgatgagcagcgccacgaacagcgcgaagccgctctcgtagaggaagaaccggcacgcgtccttgatccccctcaccgacgacggcgtcttcctcgacagcaccagcgcggagtgcaggaacaggttgtgcctgcgggcggtgccatgccatgcatgcacacggagacggagatatataatatgaggcttattattggcttgttattaattaattaatccgtcattgacctggttagtatatatagtggtagcgctaatatccctgaatgctattgctagctagctatagcttacggcatgacgagagctccgaggagcgcaatggcgtccgcggtggcgccgtcgcccttgagcctggggatgaagagccccttgaccacgtcaaccgccggcggcttcacgaagctcagctccccgaagaagcacgccgccatgacgaacaccagcatcgagatcaggaactccagcttccgcacctacatacatacatatagttccggcattaattgaagactaatcaacaagaaattaaacaactaacgcatatgcgtacagcgtaccccgtatctctgtaggcccaggagcagaagagtgctggagccggtgatgag

SEQ ID NO: 404 - DNA, 1019 bp, Zea mays
  misc_feature (654)..(658): n is a, c, g, or t
  misc_feature (665)..(685): n is a, c, g, or t
  misc_feature (687)..(692): n is a, c, g, or t
  misc_feature (698)..(733): n is a, c, g, or t
  misc_feature (740)..(741): n is a, c, g, or t
  misc_feature (744)..(1016): n is a, c, g, or t
tgcttccttgttagatacagatgttccatgtcttcattatcatctagaagatgttctatttcatccctgacctgataagatacaataaataaatacataaaagatcccagtacagcagcacatgagatatcaccaagattctcacaagcacgacagaaatactcagcagctcaccacaatatgatataaacaataatcttaaaggagaacaaaagtgaaccatacagtttgattccaaaaacgaaaattcaatggctcattcctctgtcttcctgcagctaaaaataatcatggctcttttaccaatccatagtggatacacaactgtaagtacatcaagcaattctttttgcatgagcatcagaccagataagaagatcataacaatttgtttgagaaaaaaggatcagagcaaaccatcaagctggattggtttgtgaatctatgcacaaagcaactaaaactataacaatttacagcatgaggcaatctaagctgcacagtcataaacagacatggtatacaggctgtttgaagaactcaatcatatctccattgttacaaatagaacagactgttggaaaccaattaattaggattatctttgtaatataattcaatggccttttcatctataaaatcgagatgcgacannnnnaaacaannnnnnnnnnnnnnnnnnnnnannnnnntagacnnnnnnnnnnnnnnnnnnnnnnnnnnnnnnnnnnnnacctttnncannnnnnnnnnnnnnnnnnnnnnnnnnnnnnnnnnnnnnnnnnnnnnnnnnnnnnnnnnnnnnnnnnnnnnnnnnnnnnnnnnnnnnnnnnnnnnnnnnnnnnnnnnnnnnnnnnnnnnnnnnnnnnnnnnnnnnnnnnnnnnnnnnnnnnnnnnnnnnnnnnnnnnnnnnnnnnnnnnnnnnnnnnnnnnnnnnnnnnnnnnnnnnnnnnnnnnnnnnnnnnnnnnnnnnnnnnnnnnnnnnnnnnnnnnnnnnnnnnnnnnnnnnnnnnnnnccc

SEQ ID NO: 405 - DNA, 1028 bp, Zea mays
gctactgtgcatggaaatgagaatgatgttgaagagctagagatgttgctggaggtttgtattttgtttatttacctgacggacataacctatcataacctatcagttgtcattgtcttggttgagtatttaaagctattataatctgcaggcatatttcatgcaagttgatggcacattaaacaaattgacaacggtaagttggcacagctgattttaagttttacagcatcacaataaactagcaaagcctgcccttatgttgctgttcacatgggtattttttaaattctaatgttgtaagagaaattttagggtttagctctgtgttgacgttgtatttgtttgtgacaccttttcagttgagagagtacatcgatgacacggaagattacatcaatatccaggtaatgttgcgccatatagatgcatactgccttttatttttcgaccattcagtttctaaatacattttggtttttcttctttcgcaatgcagcttgataaccaccgtaatcagttgattcaggtataatttacaataatctggatctcatcttgtctctgctagagatgtagaaatttcagaactacagattgattttagtcactttcagtagttgatgtgtaatcacttggtgctgaatgtgcattccatatgatatcacccaagcagagtcctgagtaatacttgttgcaattttgcactctttaaggataacatatttttcgtttggtccctgcagctagagttattcttgagttctggtaccgtctgtctgtcgctgtactcattagttgctggagtctttggtatgaatattccgtatacctggaatgacggccacggatacatcttcaaatgggtaggtttctgctcgcaacacgacaaatataatgatgcgttgctttgtgtaacttgatcctcccttcacaggtggttcttgtatcagggcttttttgtgcctttatatttgtctccattgttgcttacgcacgacacaaggggctcgtcggatcctgaatag

SEQ ID NO: 406 - DNA, 689 bp, Zea mays
tgcttgctaccacgcctcctcatctgctgccaccggcgtctctccttcccagctggggccctgagctgagagcagagcagggagcgaaactttgcgctgagattgagctgctcctctacttactactactagaaggcggcggcgtcggcgtcggcgtcggcaatggggtcggagacgttcgtggagatcctgctggccatcctgctgccgccggtcggcgtcttcctccgctacggcatcggggtaattaacactcagcttagcatctgattaattgatgcatcgtcgttctcatcagatgtgtgtaagtaaagtaactgcttgctcgcgatctactgtgtgcctgccctgcaggttgagttctggatctgcctgctgctcaccatcctgggctacatcccgggcatcatctacgccgtctacgtcctcgtcgcgtgacagcacaacatggtgtggtaggtatgacgacgatggtgaccgtccgcccgcccgccgggagctggaatatatgagacccagacccagtgcttctgatccatccattccatgcatgcagtgatgcaggcatacgtacgtttagcccatgctgtatgtttgtgtcttgctttagttagctttagctagctgcttgcagcttagcttctctcagctcgtctaccgatccgttttgctgtgcccatggacatgga

SEQ ID NO: 407 - DNA, 771 bp, Zea mays
gttgcttctttctgtcggacagactctgttgctcgtgctcttaaatcgattctttagctgtctacatgaacattattattgttatgattgtttttttggtagcagctttccttcttttctttttttttaccatgatgccgtaagctttttgcctttttgggtgccgttggcgtgcataaaaaaatatgatattgcgtactactcgacatcgacagtggacagtggacactcgacatgcatgcttcctgacacgcattcggccgtgcagggacatccatgtcgtgcccgcacatcagcggcctggcggcgttcgtgaaggcggcgcacccggactggagccccagcgccatcaagtccgcgctcatgacaactgcctacaccacggacaacaccgggtcgcccctcctcgacgccgcgaccaacaccacggccacgccgtgggccttcggcgcgggccacgtggaccccgtcagcgcgctctccccgggactcgtctacgacgcctccgtcgacgactacgtcgccttcctctgcaccgtcggcgtcgcgccgcggcagatccaggccatcacggcggaggggcccaacgtgacctgcacgcggaagctgtccagcccaggggacctcaactacccgtccttttcggtcgtgttcgaccggaggtcgtcgcgcagcaccgtgaagtaccggcgcgatctgaccaacgtcggcagcgccggggacacgtacactgtcaaggtcaccggacctagcgacatcagcgttagagtc

SEQ ID NO: 408 - DNA, 465 bp, Zea mays
gggcgccgcgtcgcctgcggcggcaagcggctgaagcccatcaccgaggcggagctcaactacccgtcgctggtggtgaagctgctgtcccgcccggtcaccgtccgccgcaccgtgaccaatgtcgggaaggccagctccgtgtacagggccgtggtggacatgcccagcagggccgtgtccgtggtggtgcggcccccgacgctgcggttcgacagggtgaacgagaagcggagcttcaccgtgacggtgcggtggagcgggccgccggccgtcggcggcgtcgagggcaacctgaagtgggtgtcgagggatcacgttgtccgcagcccgatcgtgataccgccggcgaaggccgccgcgtaggcgtagctcccagcccaattgatgagtgccccggcattggtcggcaaacggcatgtatccctccaacaaggtcagtagcggtaggtggtaatcttgagt

SEQ ID NO: 409 - DNA, 733 bp, Zea mays
cagcagatatttacataatagtttcaggagtagcggttagatattttttttaatctctgactatgttctgaaaacatatttgtacaggtttgttcagcaagctaattacacttttcttgtttccttatctgtagaatttgataacaacagcaaatggtaatgaacaggtaaaggtttcaggtttcctcatcttacattgcaatgatatcagataccactagggtttcggcagattaataacaatgattcgttatctgaaagcaggtgtacgaaaaagttgaagagggagacatgttcggagaggttggtgctctgtgtgacataccccagccatttacttgccgcaccactaccctatcacagctcttgagaataaggaagataagactgacagagatcatgcaagaacacaaggaagacagcaagattctaatgaacaatctatttcaggtacagcttcattgttttaaggaagttaaatacacatcagccaaaatttcagctaaattgaagttcataactttttatgtcaatggacagaagctaaagctgcatgagagtttaccagaattaaaacaactagatcgaagattcatgcacaagtacgagctattccatgctcctcaagaagcatggttgttacctcagccttacctgcagtacacagagcacaaattggaagacattggtaagaagatcccaaccttttgtggagatcatggctcaacaaaac

SEQ ID NO: 410 - DNA, 905 bp, Zea mays
cattttcttgctttgctttgttttgctttacctttgctcgctgcctcttctgaagtctgaacttgtagctttttagttagtaccattgtgttcaagataatagctcatatgactttgttatttcaagagatctcacaccaacatattctaatcctccgtgctttattttctctccgtcccaaaaagaatacaattctagcacagtgttatgtcatagtatcgtaaatttgattaattatagataaaaaagtaccaatatctatgataacaaataaatacgattagattattataagatgtgttttcataataaatttatttggagccataaatctaaatactattcactaaaaacgtgatcaaacatgaaccaatttaaccggcatgtaacccatagttgcattctttttgggacagagtgaatacatgaaaactaaaacagatggtaaacagtgaccatttaggatacactataactgacaaaaactgtggggacaaacaggacgccatgtgatttaccatctgaccagcctaatgaagtgcagaggatttagccccttcgaaatagggggaaattattcctaggaaaattgcaaattctcttggcgaacataggattggcaaaccataatatatttctatatggtttgttaatgttttttttttcttactctcgtgatcaactatatcctttcacaattattgcagaagctaatagcaccgcacagcatcttgttgacttcacggaagcagaggaagatcttgtttccagaatgcacaggcttgtggggaacaggtacacagtacactatatatatatgtgttactaaatcagacaaaataatgtcttccgttcccctgattgtgctgttgataccatggcattatgtaggtgggagattata

SEQ ID NO: 411 - DNA, 874 bp, Zea mays
tccaggcaaaccaaatgcaagaactgttttagatggctttggcgtgtcttgtgtggtgatctcagcaaaggttaacggctttcctggtttcatctggatctgtacatgtgatacaagcagcgaacaattaaaatcattctcacaagtgggcaaggattatgatgttgagttcagaatgattatttttccaaaggtaacaggttcaatatgttatctaacagaatacatgaaaagaaccagatggtaaatttaatattcaatatgtatcccttgctgttggttatgtttttcctaataactagccagtagagtataaatctttggaagcaccaggtggtttcaaaggtaccttctcaaagtgaattttacccatctttgccaggcaaggtttgacaagatctctgtcgcccatggaaacaccaccagaagtaatgattatatcagcattagaacgcaaagctgcatccatatgctccttgagactttcttcagtgtcctctgcaatacctaggtcaaccactttgcatttctgctgaatagcacaagctagaagcatggctcgattggaatcacgaatctgcgattttagtttcaagaagggaggatcgtttgttgctgagaatactgaacgcaaagaagattgaaggatgcaaaaaatttggaagagcagaaataacctgaccacggctgagggtggcagtggctggctgcactagctcatcccctgtggagaatacagcgattgttggtcgagggtacacctggacatgcaaaatcagaatgctgcattgcaattgttgttctttagtataatcaaccacgctaacttgaaatgttattcaccttgacagtggttacacccactgtgcaagta

SEQ ID NO: 412 - DNA, 392 bp, Zea mays
cctccgaccaggacctcttcagcaaccccggcaccaggcccctcgtcgagaagttcgcgcgcagccagagagacttcttcgaccagttcgccttctccgtggtgaagatggggcagatcaaggtgctcacgggcgcgcaggggcagatccgcaggaactgctccgcccgcaacgcaggcatgacgtggtccgtcgtcgacgaggctgcacagcagagcttcgtgttctagactttgtacgtactagctggctactgtgtgggcggcggtgtcctgtcaagtgtcaacagaacagatagctagcactagcagtagcactggacggcatgcagcgcccccatgcatctagcttggacaaataaaaggggccatgcataaataaatctaccgcaa

SEQ ID NO: 413 - DNA, 740 bp, Zea mays
  misc_feature (712)..(715): n is a, c, g, or t
  misc_feature (726)..(727): n is a, c, g, or t
aggtgctgtacctattacagggcatacttcaggcactaggagaaatgacaactatgttcgtcggcacagaagcccattgaattctggactgtggatttcaattgaagttattgttaactttagccagattgttgctgccattgttgttctttgtgtgtcaagaaaggaacacccacaagctccattacttgagtgggtcataggttacactgttggttgttttgcaacgttaccccatctctattggcgctatatacaccgtaatattgtaaatggtgagcatgagtcatcacatacacctcaagggtccgctcataacaactcaaatgaagcgactcatgctgcaagtgcatcagaacgccgcagaaatgctgcccgaaatgctgtgcttgctaatcctaggtactcatgccttctttttttccttaaaaaaatggatcggtatttacaatgaatatgtttgactgtcacttgttttgtttatttatggtgctgcaaaatggctatgcattaaagatgaatgccctgtgctatctgcaggatcaatgcgctgtttgaccacttcaagatggccctggattgtttctttgccgtctggtttgttgttggaaacgtgtggatatttggtggccgttcttctgctgctgatgcaccgaacttgtacaggtaaatgtgaactgctcttcaattgatgagatgtcactatgtcagnnnntttatcctgcnnctgactttctact

SEQ ID NO: 414 - DNA, 708 bp, Zea mays
  misc_feature (390)..(394): n is a, c, g, or t
  misc_feature (427)..(427): n is a, c, g, or t
  misc_feature (431)..(431): n is a, c, g, or t
  misc_feature (517)..(523): n is a, c, g, or t
  misc_feature (528)..(531): n is a, c, g, or t
  misc_feature (533)..(535): n is a, c, g, or t
  misc_feature (537)..(541): n is a, c, g, or t
  misc_feature (544)..(549): n is a, c, g, or t
  misc_feature (556)..(561): n is a, c, g, or t
  misc_feature (566)..(577): n is a, c, g, or t
  misc_feature (631)..(635): n is a, c, g, or t
  misc_feature (637)..(641): n is a, c, g, or t
  misc_feature (645)..(648): n is a, c, g, or t
  misc_feature (650)..(653): n is a, c, g, or t
  misc_feature (656)..(658): n is a, c, g, or t
  misc_feature (668)..(669): n is a, c, g, or t
  misc_feature (671)..(684): n is a, c, g, or t
  misc_feature (693)..(699): n is a, c, g, or t
  misc_feature (703)..(705): n is a, c, g, or t
ctttcgtggggcagctggagttcttctacgaccaggcgcccgacgccatgaggagcatgtgctccgcgctgtcgctcaccaccgtcgcgctcggcaactacctcagcactgtcctggtgaccatcgtcacccacatcaccaccaggcacggccgcatcgggtggatcccggagaacctcaaccgcggccacctcgactacttcttctggctgctcgccgtgctcagccttctcaacttccttgcctacctcgtcatcgccagctggtacaagtacaagaagacggccgatgattaccctggcgccaaaggggagcacggtacagagcactgatgggcgagagatggcggaaattgagtgatttctatgtgtggttagctgtctgccacannnnncccatcagtgctctgtaccgtgctccctttggngcanggtaatcatcgcccgtcttcttgtacttgtaccagctggggatgacgaggtaggcaaggaagttgagaaggctgagcacggcgagnnnnnnnaaaannnntnnngnnnnncgnnnnnnggttctnnnnnncccannnnnnnnnnnnggtggtgatgtgggtgacgatggtcaccaggaccgtgctgaggtagttgccgannnnncnnnnntgannnncnnnngannnatgctctctnngnnnnnnnnnnnnnntaaaaaaannnnnnnccannnggg

SEQ ID NO: 415 - DNA, 1051 bp, Zea mays
ctatctccagcgcaaccagctggccactgtgcaagggtcaaatcagaactacgttccagacaacagctttgagagtagttcttttactgggatttcgccccctcctgtgtctgaagctggtgttgtaactgtatcaaatggagtcttgagaaacaacgtggttaccacaaatctgaggtaacatattgtagctttcagatacattgttgcttctgttaataaaattgatcttttttcaccatccagtgtctatatctgtgaaatatgataataagttgcataggcttcaatacttaacatgtgagctactagcgtaatgatgcactgagccctgagttgtattgcaaagagaattaatctggcaagatgtgttttcttgcattcagatcgttgccctcaagaagtaatagtccatacaatacctgaactcggcgcatgagtatgactaatcttctcagatcagatctgttagataaaaaaataaatgggaattggttggcacttggcacaattaaaagaattcattgcagtaaccaatctaacgttttatgtcctactgttctcatttgatagcagcatacctatacaggtcatcagaatcataaatactttgttggcaagttttctctgagctgcattctcctcgttgtagggcccaagcttttgctgatcacttcaagatggctctggactgtttcttcgctgtatggtttgttgtgggaaatgtgtgggtgttcggtggacattcttccgcccatgacgcacccaacctgtacaggtgcgctcctaacctgccatgatggcgtaccttcgcatacttatttcgatgtttcaaggtgtgtgtactcgtgtttttcaggttgtgcatagccttcctcactttcagctgcattggctatgcgatgcccttcatcctctgcgcgctgatatgctgctgcttaccctgcataatctccctgatgggcttccgggaagatctggacgaaaacagaggtgctacttcggatgcgatcaacgccctgggcacatacaggttcaggtcaaagaagcc

SEQ ID NO: 416 - DNA, 920 bp, Zea mays
atgcctggacaggtaggtagtacactgtacagccctgctgtgctgcaagttgcgcgcatgcagccgtcgctctgaccaatagtcaggacggggacggcattgctatgctgatgattctgaaccgggttccgtgtcaaacagtgggagttccaagtggggccgtccgttgggatctctgccggcgacgagatatgggtcgcccgctacattctcgaggtccgtttcgcggtgccgtgtgccgtcctccagtagtggcagtgtcgtcaaactagctgactagtgctgcggctaacgctgcgtttgtctttcgctgactgattggtgtggttcttccagaggatcaccgagatggccggaatcgtcctctccctcgacccgaagccgatcaaggttagatgaaatgaagtttcttgtgattttctttctcgcatccgtccgtaggcatcgcgcggctacgtactgaatccgttgcggtgcagggcgactggaacggcgccggcgcccacaccaactacagcaccaagtcgatgagggaggccgggggatacgaggtgatcaaggcggcgatcgacaagctggggaagaggcacaaggagcacatcgccgcgtacggcgagggcaacgagcgccgcctcacgggccgccacgagaccgccgacatcaacaccttcaaatgggtgggttgtttctttctgatgcgatgcgatgcgatgcgaaatggtttctgttccgctcgcagactcgctcacgttcgtgggtgtgcgctatggtgtcgttctgcagggcgtggcgaaccgcggcgcgtccatccgcgtcggccgcgacaccgagagggagggcaagggctacttcgaggaccgcaggccggcgtccaacatggacccctacgtcgtcaccggcatgatcgccgagaccaccat

SEQ ID NO: 417 - DNA, 827 bp, Zea mays
  misc_feature (43)..(44): n is a, c, g, or t
  misc_feature (55)..(58): n is a, c, g, or t
tggttttggcacgatacacttctgtatgttgcttctggagaanntatggtggagnnnntctctccaacctcttaggggactcttcccaaatttctatactaaggagaagcttgctggggatgatttaaatcccttccttcctttttcttcacggttggctgcaattgacttcattgtttgtgatgagagtgatgtctttgttacgaataataatgggaacatggccaaagttttagctggacggaggtatgtacccctctttttctgcatatgctttgggtattctaaactaatccctccatcccaaataaatcaactcccctagaatgacccagagtaaaattatcttaagtttgacaaattttataggaaagagtaacaacatcgttgacagcaaacaagtacactatgaaaatatacctatctagtgatactaatttgatattataaatgttggtgttttttctctataaatttaatcaaacttaaaacattttgacttaggacaaatctgaaagttggtttgttttgggacggatagagtatacatctgttgaatgtattggattgccatgcaaggacacgaggccttataggcaccgtcaatttgtttagtttttactatttattatgttaatttgttgctccgaacagtttatctattctcccttattattttctaatatgctatgttttgctcatccactctccatcaaatgtgtaggcgatacatgggccacaagagaactattcgcccaaatgcaaagaaactcaatgtactatttcaaacacggaatcaattgagctgggataccttttcacggaag

SEQ ID NO: 418 - DNA, 317 bp, Zea mays
gcgggctcagccgaccaatcgatgtcaaccgcggcagcagtagcatagctaaggcatccgccgccgcacgccgactcggccacgtgatcgctgtcggactggaacacgatccagcctcgctcgctccatcgtctaataagagggtggcggcggcgaatattggaattggaccttcggggagaaaatatatcttggatgcccgtcaagacatctttcaatggtttccacagaaataatttaaagtaggctgactaatgtcagccacgtgtctcccgggtctgaacctagctaggtttgaaccccttgacgcaaggaat

SEQ ID NO: 419 - DNA, 657 bp, Zea mays
ctatctcctcggcgaccaccccttccggtagcttccagtcgaagtgaaacagcaacgccgcgagagcgagctcaatgtgcgccagcccgaacgccatgccggggcacatcctccttcccgcaccgaacgggatgaactcaaaatccatgcccttgaagtctcgtccactctcctcgaacctttccggcacgaaatcctccggcgcgtcccacagcgctgggtccctgcctattgcccacgcgttcaccagcaccatggtgccacgaggcacgtcgtagccgagcacctggcacgggctgcggcactcccgcggcagcagcaatggcgccggcgggtgcagccgcaggccgcagcgtctcctttatgactagctgcaggtaccgcagattgaccaggctgtcctccgccacctcgtcgtggccggcgagtgctcccctgacctcatcttgcgccttccgcatcaccgccgggttccgcatcagctcggccattgtccacttcagcgtcgtcgccgacgtctcgctgcttgctccaaacatgtcctgcgcagtgtgtggaagaaacagagtgaacgtggagagctgtttcgtttgtggatctaaggtgagagattgtgaggagcgcttacgatgaggacggatttgatgttgtcggtgg

SEQ ID NO: 420 - DNA, 640 bp, Zea mays
  misc_feature (443)..(446): n is a, c, g, or t
  misc_feature (471)..(471): n is a, c, g, or t
  misc_feature (609)..(611): n is a, c, g, or t
ctgaacatcaaccttcacgccatccacacccacactagaaaggtagctgtgctgatcattgtagaactcatatatcttgtcaggatcaacgatacccactccaaatttctccaagctatccatggcaatatccctcagattcgcaacattaccccgcgattggactggataaacaagctttggattatacttcttcatcactttggatgctgctaaggtgcctccccaatatccaagtaaagcatgccacatgtagacgcacctatagttttgcacattgcatcttaaccatcaaaaaaatataaagattcagtcatcattgaacaagtattctgaaaaaaaaaattacttgactccatgttttccttttatcgttttaacaaggtcctcaagattcttgcaggtttcccccctgaacttatgattctccttcagatcagccnnnntctgcgcaaatctggcataattacngtatgaatcaggaactggcgctatgcacacttttatggattaccaaaggatggaacactaacacagtctgctcacggagggcttcatccacttccttgatttcgtcaactgtttcttgccaaccatcatctataatcnnnaaccttggcggcacaccaccttcacgcag

SEQ ID NO: 421 - DNA, 437 bp, Zea mays
  misc_feature (368)..(368): n is a, c, g, or t
  misc_feature (413)..(413): n is a, c, g, or t
  misc_feature (419)..(419): n is a, c, g, or t
  misc_feature (421)..(421): n is a, c, g, or t
gcgcctcatcttcgccggcaagcagctcgaggatggccgcaccctcgccgactacaacatccagaaggagtcgacgctgcacctggtgctccgcctcaggggaggcgccaagaagcgcaagaagaagacgtacaccaagcccaagaagatcaagcacaagcacaagaaggtgaagctcgccgtgctccagttctacaaggttgacgacgccaccggcaaggtcacccgcctccgcaaggagtgccccaacgccgagtgcggcgcgggggtcttcatggccaaccacttcgaccgccactactgcggtaagtgtggcctcacctacgtctacaaccagcaggcgtaggatgccccttctttctttcggnaaggaaaatgggaagtcttgctaggtgataatcctttttgctttnttttgntntgttgcaatggtagta

SEQ ID NO: 422 - DNA, 505 bp, Zea mays
agccggcgctcaaccagatcaaccgcatgaagtccgactgagctgctagctggcaacaacaccggggacggcggagtgtgcgtatcagcggctggacggttgtaatttatagcgtgaagcatggttggtctacgtgccttgttttttccatcttcgaatcttgagcaaatgcagtacatgtacagctccctccctctcgtctcaatctgttacatacatatacacacataccgtatcctctgtggtggttggtcaatgcaaacgctcctcgacgctggacatctcgccggcgagcgctccctgaacgccgccgccggcgtgaaccgtgatagacaagatgcgggtcgtcaacgccgcgcgcccctcaccgtcgtcatcggactcgcccctctccggcgttgcgcgcgcccagctcacagcagaggcactcacacgagttgcgtgtagcctctgtgcttctcctccccgtcgcgtcatgcgcatgcgcttcatgttcgtctaaaca

SEQ ID NO: 423 - DNA, 876 bp, Zea mays
  misc_feature (861)..(869): n is a, c, g, or t
gtaaatatagctccagaaccagcgaaataatagcacacatgacctaataaaaatacatgaaaagtcaacgaaaagccttcatgtgcagtgcaggagttaactttgaaggcaagaacgaatataagatgagtcataagaaattttccatcaaacacctgttgtatgcccaggagtttccagtacaagaacttgatggccagcgaacatccatgtgtcaccctccttaagcgtgatgtcaatgccaggtattctgtccttatccttctcagaaccaattacctaaaatgcatatgatcaccagaagactaaatgagacacaccaatcttattctatatgcaattaagtatttcaggtggcaggagcaatccagtgtagaaacaatgaaaactaaagaaaaaatatttgcgtcaaacagtttccttcaaatcacctagaaaatcatcaaaactttgatttgatactgtaggcaaatgacatactcaaacttgaggcatagccattagtatctgctctgttttaaacttcagttatataattcaatcttgaaaactataagtattgttgaatttaacagatactttattgataagaatatactttaaaaaacactcataataactccatccttgggtatagcactattgtcttcactttagctcataacaaaaacccattttgattgtgtcattgtcacatactgtatcagagtcactgaacgatacagaaaaagaaagaacaaataaaatagcccaaagctatacctttgcaccatattttgccttcaattccaagtttccaccagtatgatcatagtgatgatgggtgttcagtatataagtcaagttctggtttctcttttnnnnnnnnntttataa

SEQ ID NO: 424 - DNA, 855 bp, Zea mays
tggaaaagagaaaccagaacttgacttatatactgaacacccatcatcactacgatcatactggtggaaacttggaattgaaggcaaaatatggtgcaaaggtatagctttgggctattttatttgttctttctttttctgtatcgttcagtgactctgatacagtatgtgacaatgacacaatcaaaatgggtttttgttatgagctaaagtgaagacaatagtgctatacccaatgatggagttattatgagtgttttttaaagtatattcttatcaataaagtatctgttaaattcgacaatacttatagttttcaagattgaattatataactgaagtttaaaacagagcagatactaatggctatgcctcaagtttgagtatgtcatttgcctacagtatcaaatcaaagttttgatgattttctaggtgatttgaaggaaactgtttgacgcaaatattttttctttagttttcattgtttctacactggattgctcctgccacctgaaatacttaattgcatatagaataagattggtgtgtctcatttagtcttctggtgatcatatgcattttaggtaattggttctgagaaggataaggacagaatacctggcattgacatcacgcttaaggagggtgacacatggatgttcgctggccatcaagttcttgtactggaaactcctgggcatacaacaggtgtttgattgaaaatttcttatgactcatcttatattcgttcttgccttcaaagttaactcctgcactgcacatgaaggcttttcgttgacttttcatgtatttttattaggtcatgtgtgctattatttcgctggttctggagct

SEQ ID NO: 425 - DNA, 495 bp, Zea mays
gaataactgggatcgatagtttgatttcaagtggtttacctattggatatcaggctggaaaatttaccagaaattacctgattgaagagctcaatattcctgagtctcgattggtaccactaaatacaatccaggagtatgctgatgcccttaagcgtggaccaaaagatggtggtgttgttgcaattgttgatgagatgccctatgttgagatcttcctgtcataccactgcaatttcagaatagtgggacaggagttcaccaaggagggatggggttttgtatgttctctgttctttctctagttttttttttcttctgtatttgttcgccttggtttgctcactcctccaatggcatctcacggaagccggaagcgtacatccctgtctggtagtgtaattgaaacaatttattcttgttctttacaggcattcaagagagacttcccccttgctgcggacttgtcaacagccatccttcaactctcaaaaa

SEQ ID NO: 426 - DNA, 744 bp, Zea mays
tactatggacatatctctgcattattataattgtcttctcattgttgaactggctctcaaggcacttagttgttaacgtttctcctctctcttttttgcctgaatgttggaatatctttatgtgtttttatgcttgatgcatggcaatttgtattaggttgccaggttggtcaggaagttcttgtatggacttccagaaatgctaactatttgataattcttttcactcttcctgattcagttgatgaagtagatgaactataatgcttgtggtaaatatttggaaaatcatctaagttagcccttttgttgatacttggtagtgctgcttcatcaacatgttgagaccatattattccatttccagcattgagttatattaccaagtaacttgagatcctttttaggtttagcggctaaatattatagttatttggttttctgtttatcacagtcgatgctttcccatcttttaaattactatggacatacatagtttacgtcattaggtgtatgtatatgtatactgaactgacagaagaatctacaggtccagaagttacacgcttggctgctatggctgcaaaatataaggttttcttggtcatgggggtgattgaaagggaaggttacaccctttattgttccgtgcttttctttgaccctcttggccgttacctgggtaagcaccggaagctcatgcctacagcattagagagaattatatggggatttggggatgga

SEQ ID NO: 427 - DNA, 777 bp, Zea mays
tggtgacactcaggtagtacatgattatactttaacttatttctgcaaagtgatagatctgaaaattttgaagtgtatattgaggtgctatacttttcaggtttcttctttggaagatatcattaaatctatgaaggtatgcataagctctctagaacagaatttatgaaattttgtgatccttgcatattaaaatctggataccctagccttatagctagtataatcctccaagcttatcgtcattggctgacccattctggttttaacttttgcataaattaattgggtattctacacctgtccttggcacagtgcatcctgttgacacttttgcatacctttgtgattcacatatagcatagaccttgtgactcaagattgaccccccccaccccaccacacacacacacacaaatcattagttgccatattctgtttacttgtcttcaatcctactaaaatttaaagcatattgcaggatagctcctcctcaaaatgggatgatgttgtatttattcctcctggatttgaccttgctactggctcgacaccatcacagctccgcaagtagttcatagaaggttgttaccagtgttattcctagcaacattatatttgactgtctggacactttgatagtagtacattatatatacacattatttcttagacagtgtatgtgattttgtgccatgaactcgaattactgttagttcctgtgttagatgtatgtagtgtgacattagttagctggaaactgatgaaaaaatctcg

SEQ ID NO: 428 - DNA, 700 bp, Zea mays
ggaggaggacgagctcatcgtcaagctgcacagcgtcctcggcaacaagtaggggccgccgcgcgcctctccatctccctctgcctcctacccccgtcaccagcatcattcgtttcgtttcctaaactggccgggtacgttacgtgcaggtggtccctgatcgccggaaggctgcccggcaggacggacaacgagatcaagaactactggaacacgcacatccggaggaagctgctgagcagggggatcgacccggtgacgcaccgcccggtcacggagcaccacgcgtccaacatcaccatatcgttcgagacggaggtggccgccgccgccgccgcccgtgacgataagaagggcgccgtcttccggctggaggacgacgaggaggaggagcgcaacaaggcgacgatggtcgtcggccgcgaccggcagagccagagccacagccacagccaccccgccggcgagtggggccaggggaagaggccgctcaagtgccccgacctcaacctggacctctgcatcagcccgccgtgccaggaggaggaggaggagatggaggaggctgcgatgagagtgagaccggcggtgaagcgggaggccgggctctgcttcggctgcagcctggggctccccaggaccgcggactgcaagtgcagcagcagcagcttcctcgggctcaggaccgccatgctcgact

SEQ ID NO: 429 - DNA, 889 bp, Zea mays
  misc_feature (877)..(877): n is a, c, g, or t
  misc_feature (881)..(884): n is a, c, g, or t
tgagaagcctgagctgacttctccggaggatcttggtgttcaagctgcatcaatgctactagaagaggtggctcaaggaggtgttgttgactctacacatcaggtctgggcttttatgcaagcattctatgtatttctgaattttgcctggtgttaagctcgatgatagctgtatatattgttatgggctcagtgaagcttagacaggagtacaggacagtgaagcattttgttcttttggactgtttgtgtctactacagacaagctgcaagttctacatggcatgtggataactagatatgatttttttcaacgatctactttctcttaaaaaatgttgtcctctcttggactgacagtgctgtacatttatgtttgcccatcttaaattgcttgttgtctatcctgatgatattccatgcataagttacagatgcttttgtttagtgattttatcttaaatgcttgcagggcctcctatttattctgtgtgctttatgcccaccggatgtatcaaaggttcgtgtgggacagttgactccatatggtatagagacacttcgaaacatcagagattttcttgacgtcaagttcatcatcaagcctgatcccaattcaaacaccgttactttaaaatgtgttggcgcgggagtgaagaatcttgctcggaagatttcataagcaacatgaccattaatctgatcaaggattcatgccacatcaagagactactatgagaccctatttgtaactgcaaacaacagtgtaggagtttcccttagctgttactgctgaaattctattcgaggtccatgatgtcttagacatcaccgatgtacatcagtattagaatggattgttctgatcatgatgccntgtnnnncgaca

SEQ ID NO: 430 - DNA, 557 bp, Zea mays
agcaggttcctatcgcttctacagtttgatctctcgtagctgttgcctgaaccggtcatttcaagtgtatgatggggagcttctagtgttttgatgcaagtatatatatacacatcgcatgagatttctcttggcaatacactgatgatcctgctgcaaatctgcaggtcaagaagctgcagagggaagggcatctcgacgccatcgtcgaccgcaacttgaacagctgttacaacgggcaggaggtggagatgatgatccagatcgcgctgctctgcacgcaggcgtcgcccgaggaccgcccgtccatgtccgaggtggtccggatgctggagggcgagggcctcgccgagaggtgggaagagtggcagcaggtggaggtgacgaggaggcaggactacgagcggatgcagcagcgcttcgactggggcgaggactccatctacaaccaggacgcgatcgaactgtccgccggcaggtgacgacgtcgggtcgtcacacggagcttgtcgtcgtcgacgtcgcagtgccgacatgtaactgtatatgtaaggcat

SEQ ID NO: 431 - DNA, 544 bp, Zea mays
ggcaacggcaccatcgattttccagagtttctgaaccttatggctcgcaagatgaaggacaccgactctgaggaagagctcaaggaggcctttcgtgtgtttgacaaggaccagaacggcttcatctctgccgccgagctccgccatgtcatgacaaatcttggggagaagctaactgatgaggaggtagacgagatgatccgtgaggctgatgtcgatggtgatggccagattaactacgaggagtttgttaaggtcatgatggccaagtgagccacagaagcataagctcaaggcagagaggattgtgcattgcatattagtcaagatgcaatgcaactcttatttcatcgacttccagtgaaacattctgctagttgtagtttttgaaaggcaatgcagttgctgctttgttcttccctccagtgtgttttcagaactgttgattcatgtgaaactgtaatgattgccctccctgctgtgtcttggttgcagttgaaaccatatgtagctacattccccctcccaccacctccacacatca

SEQ ID NO: 432 - DNA, 763 bp, Zea mays
acgcatcacctttgaggtatgacttgccttcttgatatcaaaaaaattattctactcagtttatcttattattctcatggatgtttatttgcaacttcaggagtttaaggcatttgctgatttgcgacgaagattggagccactgtcgatggctatctttgcttacggtaaattgaatgggttattgacgaaggaggatctaaaacgtgcagcgcaacatgtaagattttcttaccaggtttggcatgcttatttatgttattttgcttctaactgatgtctagctatgtaatttttcattttggtttgtgttgtaggtttgcggggtcgacttaacagatagagtagtagacatcattttccatgtgttcgacacaaatcaggatgggaacttgagcccagaagagttcttaagagcgttacaaagaagagaaactgatattcgtgaaccaacaataccaggtccattggggttcttgtcttgctggttcagtggtaggaagtgttcttcactaaaacatgtggttatctgattgagcccctatttgatcctcacggtatctgtcattcgcctttgattgtcatctcccgttacgtacccctgttatgatatcctgtattgacacttctcatcgatattcaggcgcagaaggtaatcaccaagcagtgcattgctgatcgttacaacggacttcactgtatgtcgtcttggtggccgaagcttgactagcagtaacagctctaattgtaaatcgtgtcctct

SEQ ID NO: 433 - DNA, 532 bp, Zea mays
ctcaggaggagcttccacgcaaactcagggggaggcgcgcgcaagcaagcacacgagggagcagcgggcaggcaggcaggcagccatggggaggtctccgtgctgcgagaaggcgcacacgaacaagggcgcctggaccaaggaggaggaccagcgcctgatcgcctacatcagggcgcacggcgaggggagctggcgctcgctgcccaaggccgcgggactcctccgctgcggcaagagctgcaggctccgctggatgaactacctccgcccggacctcaagcgcggcaacttcaccggcgacgacgacgagctcatcatcaagctccacgccctgctcggcaacaagtaaggcgccgcgccgttccgttccgccacctgtactgtaccattcaccgcccagctgggatccttttccttagcacgcatggaattggatggggggtgtggctattggctaatatccatggctccgtcgcgcaggtggtcgctcatcgcggggcagctgcccggccggacggacaacgagatc

SEQ ID NO: 434 - DNA, 516 bp, Zea mays
cggatctactatgcgttatctcgatttcgtcttgttccctagtagattattttattgaatcttaatccaattggacgcgagcacagatcacgcgcgttatctgccctcccgacatcttatctaacatcctcggcttaaaataaaataaatgcagggcacccgtggatccagagcggaggcggaggccgagagctggtgcggccaacctgagcagccatatatcgaacgagacctgaaccgatcgagtatcatcgtagcagtccggtgggtgtgtactcccccgatgagtgttgtgcagacgtctctgtatatccagtaagcaggcggcggcggcggcggcgagtgtgagactggagatcgtcgtttcgccgcacctcgcccgtgtgtgtgtgtgtgtgatggtgacctgggccgttttcctcttttgccttgtgggccttttttcgggccgccctctttgcttgggagttaaacgtcgtgcgacgatgatctgttaagtctaaccgtccatgtaca

SEQ ID NO: 435 - DNA, 404 bp, Zea mays
cgtgtatgcgtgtttttccggccggccggtgaaggacgatggcaggatggacgcgctgaagtgtaacaacagcgtcctgccggaggagaccgccgcggacgccgccggggcgttcgtggagaaagacgggttctcggtcgaggacctgcttgacctggaggagttcgccgagcctgacaaggacgtcgccgaacgcgaggatgacgacgcgccgccggcagccgccgcggccgaggagaggccgaaagcggactcgcagccgtcgtcggtcgtgaagtacgacctccctccgctgccgccgccgccgccggagatggttgacctgccggtgagttgtttaggcgcgccgtcccttgaccgcttctattcgtgtggaaaggcgtcgtcgtatccacagggttata

SEQ ID NO: 436 - DNA, 780 bp, Zea mays
  misc_feature (688)..(693): n is a, c, g, or t
tcggagcatcaccgaggcgctggacttctcgcaggtccggtcggagaaggacgccgagctgctgtacgaggccagggagtccaccagaggtggagggaggatgacgagggagcaggtgtgtatcatgcaaagcaactgcggctcgataatgttatgttatcatccgtaatctgatttatttgttgtttgatttgcaatgaagtacggagcacttaggcggaagattggtggcacctaccaggatttcttcaagtcatatgttgaaggtatcttatctacacctttcccgtgagaatatttaaacgccaagtgaacaggcccgtatattgcctactggtattcagattagcactgcatcactgaataatccgtgtagttttttttggaaacaagtgtagtatgatgaaagattgaaagtagtgtccactgaaaatatattatcgcacacatccttttttattcctaacaagagagaatatcaagttatcgacgattgacgaccaaccaaattggtttcgaatttcagtcgacgggcaatacgtggaggagggttgggtcgacaagacctgcaagatctgcaagaaggacacaaggggggagccgaggcaggttgacaagctaggaagatacgctcacgttgcgtgcctggagaaccccaaaccgacgaactttttcgccaaaatcttcnnnnnnatgaactatgctgcgtccgtcgaaagcgttgtctcgctcgctcgtggttagagagtacaatatataggtagtgttgttgtggcttca

SEQ ID NO: 437 - DNA, 369 bp, Zea mays
agccgggcctatggtcgtcaccctctccttcctcttcctcttcctcttcttactccaccatctcctcggccgccaccgccgcaggaccaataatggcaagaacaagagaacgcagctgccaccgagccctcccgccatcccggtcttgggtcacctccacctcctacggaagcctatccacgcggcgctcgctcgcctcgcggaacgctacgggccggtgttcttcctccggctcggctcgcggcaagccgtggtggtgtcgtccgcggcttgcgccacggagtgcttcaccgagaatgacgtctgcttcgcgaaccgcccgcggttccccacgctcctgctggtttccttcggcggcgccacgctccc

SEQ ID NO: 438 - DNA, 710 bp, Zea mays
agtctattgttaaagatccagaatacgatgagttgttcaagctaatgagcacatgtggtcgactcttgaatgatgttcagagttttgaggtacattactgagttgcgagtcttaagctttcatgacaatcctgttacaggctcaagaaagtattagtgcgattaattatttaattagcataggacacaatgggtaattgagttagttttcattctcaggtgctattatttaataggtatatgagcatggtatactgaataataccactttagccttgactaattttaggaggtgttttctttgtaatcgagaaaaaggaaaacccttgtatattcaaaattgatatattgttgcagagggagtacaaggagggcaagttgaacattgtttctctcctcgttcttcatgatggctccatgtccatatcagatgccagatggaaattacagaagcccatagacacatgtaggagagacctcctaagactagttcttcgtgaagaaagtgttgtacctaggccatgcaaggaattattctggaaaatgtgcaaggtctgctacttcttttactcgagaactgatgggtttaggtcaccagtggagagggccaaagaagtgaatgcagtgatcaacgagccactaaagctacaagaaaaccatacacacatgtctgttttgtgagaggaaccaaatgtcgatgtgacgttttca

SEQ ID NO: 439 - DNA, 362 bp, Zea mays
ggactcccccaagtgctcagcgtcgacggagggggatgaggactcggcctccgccggctcccctccttccccgacgcaggcgccgcccgtgccggagatggcgaagctggacttcaccgaggcgccgtgggacgaaacggaggccttccacctgcgcaagtacccgtcctgggagatcgactgggattccatcctctcatgaacgatcaactacaactagtattttagtagtagtagcagcagcagcagcaaggttcagtcagtgatagctctgtgtaattttcgatttggggtttgcagctgcggtggatcgatggcattttagacatcggccatggcggctgtgttgtgatgcagaagta

SEQ ID NO: 440 - DNA, 258 bp, Zea mays
tctacggtctaccacacgaagcatcgtagccagccagccagctaaacccacaccacacatggccgggatcgtggtggtgttcgacttcgacaagacgatcatcgacgtggacagcgacaactgggtggtggacagcctcggcctcaccgacctgttcgagcgcctcctccccaccacgccctggaacacgctcatggacacgatgatgggggagctgcacgcgcggggcaggacgctggccgaggtgaccgaggcgct

SEQ ID NO: 441 - DNA, 590 bp, Zea mays
  misc_feature (576)..(582): n is a, c, g, or t
cccggcggtataccacccgagctcgggaggctgcgggcgctcgtccggctcgacatggctaactgcggcatctccgaggagatcccgccggaactggcgaacttgacgtcgctcgacactctgtttcttcagatcaacgctctgtctgggaggctcccgacggagataggcgcaatggggtcgctcaaatcgctcgacctgtcgaacaacttgttcgtcggggagatccccgcgagcttcgcgtcgctcaagaacctgaccctgctgaacctcttccggaatcgcctcgccggtgagattcccgagttcatcggcgacttgccgaacctcgaggttctgcagctgtgggagaacaacttcacaggcgggatacccacgaacctcggcgtggcggcgaccaggctgaggatcgttgacgtgagcacgaacaagctcaccggcgttctgccatccgagctgtgcgccggccagcggctggagacgttcatcgctctgggaaattcgctattcggcgacgttccggacgggctcgcggggtgcccgtcgctgacgaggattcggctgggagagaatttnnnnnnncgatgaac

SEQ ID NO: 442 - DNA, 1094 bp, Zea mays
  misc_feature (798)..(1089): n is a, c, g, or t
ctatttacaaggacacaaacatccaaaagcacactaaatggccatttcatcttcaccagaacatttggtgattggcaacttgggggcactaccagttttccttcacaatctttgacttctcgaatatgaattttccttccttgtatttctgcgtctcttcatatgctctcacatacttccagcccaacacctcacggcagtcattacagtagatatcagcaactgtgtgtagccctgtcatgaggtgtctatcctccttcgcccccacaactacgttcatggcatgagagaacagaaacgcacggccattcctcccctaaaacagaaaaaaaggaagaaggcatcatcatccaggcgccagcagaagactcagctagttacaaagaattttccagtccctaatgagtaatgacacagagcttacaaacggtttcagacacaatacttgggatcctggtttttggttgtgcgtttagcaccaagtcaacgagaaggtatccagtattccattcttcccagattcccaagctcccatttggggaaaaaaagatatccaaatgtgcccggaaaattacaaataaaaatatgaatggataggtgatgcaaagtttagttttttaaaatatctattaatggataggctctgtttggttccacccaactcaagtttagctaaggccctgtttggtttggggtgactaaagcttagtgactaaagtttaatcacttttagtctctaaataagcaaacatggtgactaaagtgaggtgactaaactttagttctttagtcaccaannnnnnnnnnnnnnnnnnnnnnnnnnnnnnnnnnnnnnnnnnnnnnnnnnnnnnnnnnnnnnnnnnnnnnnnnnnnnnnnnnnnnnnnnnnnnnnnnnnnnnnnnnnnnnnnnnnnnnnnnnnnnnnnnnnnnnnnnnnnnnnnnnnnnnnnnnnnnnnnnnnnnnnnnnnnnnnnnnnnnnnnnnnnnnnnnnnnnnnnnnnnnnnnnnnnnnnnnnnnnnnnnnnnnnnnnnnnnnnnnnnnnnnnnnnnnnnnnnnnnnnnnnnnnnnnnnnnnnnnnnnnnnnnnnnnaaaaa

SEQ ID NO: 443 - DNA, 442 bp, Zea mays
  misc_feature (368)..(368): n is a, c, g, or t
  misc_feature (430)..(438): n is a, c, g, or t
tgctcacttgggcggaagcgacgccgatgacatataaaacacgatccaacaagctcaagcctgtcgttgatcccctgtaaataacctgggtggcgttgctctttaggcagccgacagccggggattgctccattgaaataattcgccggcgtaaattgttgctgttccaggtgacatgatcgtatccctccctccctcccgttgtccctggaagtcattagatgttaccgctgtatatgtgcgtaacctgtgttgcttataagtccatctgagttgtatgccaagcactagtgaccaaataagtaaagtaaatttctcaagtgtctggtcgacctgggtgtcaagcgagggcagtatgtacaaatcanatggacttataagcaacacaggttacgcacatatacagcggtaacatctaatgactttcagnnnnnnnnngagg

SEQ ID NO: 444 - DNA, 532 bp, Zea mays
ccccttcggctccggcagcagcagcagtctcttcccctcgttcccgcggaccagctcggagaccgcggccttcgctggcgcgcggatcgactggaaggagactccagaggcgcacgtgttcaaggccgacgtaccggggctgaagaaggaggaggtcaaggtggaggtcgaggacggcaacgtccttcagatcagcggcgagcgcaacaaggagcaggaggagaagacggacacctggcaccgcgtggagcggagcagcgggagattcctgcgcaggttccgactgcccgagaacgccaagacggagcagatcagggccgccatggagaacggcgtgcttacagtcactgtgcccaaggaggacgccaagaagcctgaagtgaagtccattcagatctccggctagacctcggtctgcggtcgtcgtacctgcgtggtttgaggaacggcagttcgcctcggtcgttctgtgaaataaaattgggttacaagaattatggcgtttgtcaatatgatcgtaatgtcgtaggat

SEQ ID NO: 445 - DNA, 593 bp, Zea mays
caccaatttgtatcctagtggtaaaaagagtttggcgttacctgtttctaacaggatgcttatatgattacagcttgatgtaacgtcatctcaacttcttgtgacggatcgtgatttcaaggatccaagttttggggaccagctccgtgagactgttttttcactgttagatcttaaagtagtacccttatttaatgagaatgatgccatcagtacccggagacagccatatgaggtctgttttcttaattgcttctgcacggccgtacaccaaccttccaatctaataacagctgggcccttggttgtgttcctacttactactgattgtaataatgaatttaatttacaggattcatctggtatattctgggataatgacagtctagcagctctgttggcagcagaacttaatgctgatcttcttatcatgcttagtgatgtggagggactctatagtggtccaccaagcgatcctcagtcaaagattatccacacatatgtcaatgaaaagcatgggaagctaattagttttggagagaagtctagtgttggaagaggtggcatgcaagctaaagtgtctgctgctgcta

SEQ ID NO: 446 - DNA, 463 bp, Zea mays
gcgtcgacgaatacttggaggttggtaaactcacaggtctcatttgttgttatttctgaagtgttgctgcaactctgacatgcctgcactccatgggcaactgcagctcaagtacatctgcatgggcaacttgggttgagttctgaaatctggcctgaggctagaaacgcatggaagagatgatgaaccgagagaccaagaaggcaggcgtctagctacaagaccggaggaacatggctgaaaggggccggccactggttgtgggggagcagttttcgaataaagcgaataagccgcggaacatgaacaaaagaaagccgaaatgagttgtaaatgacgtgaactataaagtatggcttcgcctccggacttttgtatacgtaatcatggcactacttgtctatagtgtctccaaagacgtccatgttacagaataaaagcgtatagggtggatgctacgtta

SEQ ID NO: 447 - DNA, 721 bp, Zea mays
gagatcatcagaatcctcaccactaggagcaaacctcagctgattgctacattcaatcattacaatgatgcatttggccaccgaatcaacaaggtgcatacatatttcatcaacttatcttgttctttgctttataaaatcgtacaagatgtgaccttattctcatatttgtcctgcttatatgtgcttctgcattgcattcatttaccaaatttgtaagatgcatactaacattgcatgctgtcccttgtttacatgtataacgatccacatgaataaaaatcgctccttcatattctgaagcagaataataagctcacatgctcttaccgatatactctctgttcttacactgtgttataatacactgatgaatccattcgtctaactagtaatgaccatgtgtgagattgagcaagttgtttactcattttagtttttgttctcatcaagattaacctcatccaatagttagtgttcagacccagttttgataatttctatgttccttatgtctggatcagttgccttgtgttgttttgtccattaagatcgatcattttgttggtctgttatcatccgcagcttgttctgtttggcctttggcatagacttttcatgacgctctatcaaagctatccatgttcagaactgtatatacaactgtagtcgaaatttcttttcttgatcatttaatgggtccacatttccctcaagtctt

SEQ ID NO: 448 - DNA, 446 bp, Zea mays
tcgcggaggtaaaagtaaaacccatcattcggttcaggttcagttcagcagcaatccgttcgtttctgatggccttgttgttccaggtcatccggagctccatcgtcgggcttggtacggacgaggagtccctgacgagggcgatcgtctcgcgcgccgagatcgacatgaagaaggtgaaggaggagtacagggccaggtaccgcacgacggtgaccagcgacgtcaacggagacacttccggatactacaatgtcatcttgctcactctggtcggccctgagtgaatgaccatggatggacgatggatccatataggttgaagacattgtttgcgacttgtagtttgcttgaacaagatcacactcgtttttgtttgattgaacgaaacgacactagtgttgtttgttcacatatgtgtacagaactgctgagtgaaatggtga

SEQ ID NO: 449 - DNA, 373 bp, Zea mays
tgcccgggcgtaccaccacatgtacgaccgccccctggagcgcgccgtcaagagcgagacgtcgggcaacttcggtttcggtctcctcaccgtgctccgctgcgccgacagcccagccaggtacttcgccaaggagctgcacagggccatgaaggggctgggcaccagcgactcggtgctcatccgggtggtggtcaccagggcggagatcgacatgcagtacatcaaggcggagtaccacagcatgtacaagcgctcgctcgccgacgccatccacgccgagacgtccggcaactaccgcaccttcctcctctccctcgtcggccgcgaccgcacctagtgatgacgatgatcgctgtttcgtctctcatct

SEQ ID NO: 450 - DNA, 567 bp, Zea mays
agcgtcgagaaccggtgccgcttcgtggtcgaggtcgtggacgctctcgtccgtgaaatcggcgcgagccgggttggcatcaggctctccccgttcgcggactacttgaactgtgcggattccaaccccttggcgctaggtcactacatggtggaacagctcaacaggcacgaggggtttctgtactgccacatggtggagccgcgaatggccatcgtcgacgaccgtaggcagattccgcatggactcctgccgttcaaggcggccttcaatggcaccttcatcgccgcgggcgggtacgacagggaaaaagggaacaaggtggtcgccgaaggctacgcggacctcgtcgcatacggaaggctgttcttggccaacccagacctgcctaaaaggttcgaggtagacgagatcctgaacaagtatgatcgttccaccttttatacacaagaccctgttgttggctatacagactaccctttccttagggacgacagcgaagacttagctgctcaagcttaatggcgtggatgatcgatgtaatcacggttactgcacgatcgagat

SEQ ID NO: 451 - DNA, 1172 bp, Zea mays
tgttttactaaacaggttttgtaaaagtgtttgttgaacagtaattgtcatatatttccttaatgatgtgcacttgcagaaacatcaaagagtacgcagagttactggtaatggcaaccacaatctctcctatgcagggagagaccttcaactgcaagagacctacttaaaggtgcttcttggaaatagcagtcgaagcagcagtaccaatgcatcaagtacagtcaccgattcactgctaccctcactagttttaaatttatcatcaccagaagtagaagacgcatcaaagttttcagctcctgctgtggtggaaaataattggtttaaacgatcactgccttcaaaaacttggaaattaaggtatgatccatttgttctcctgtctcgcactataattaatttgctgggtcttgttctctttctttttgtatggtttctattcgatgtcaggtgaaatctcttagcctcttttgaatgaaaatgtgtattgcttaaattttattactaagccataagacatgtttaggtactcttaggttaaagttgcatagtggccaggttcatatctgacaagcttaatcctctcttatacatatgaacttaattttgactaaacatgcatgtagtgtaattttatgaaacatatttaattatatattgttcttcagttcttgattgttgaaaatttatttctgaaatagtattacaaatggggggtaaggcttgtctcggttattcctttcactcacgtggagctgttagcactgggtctttctttcttctattacaaatggtaccagatccagcacttctgattctcgtttagctagccatgaagtaagcttgctgaactgtagcagatttcaagaaattgagttaatgcatatacacacatgaaggtggaccacctatatggttagtggtagtaagtcctatacgaccccactttattgagtcttgtagtcatatatgttaaactaggtaagcatggtgatggatcatctcttatttgtatgtagatgagatgcaattactgtgggggtattttaaattcttctgagtgcattattttatgttaatgcaatacattttttttcagaactgttgattccacccttagtcatgaagagagggagcgtaggaggaggagagctgctgtgagatcagct

SEQ ID NO: 452 - DNA, 468 bp, Zea mays
tcctcctgctcgtttgttacaccggtacgccttcgccatgatatataaatatacatgcaaaaaaaacattgtgtagattacacatgtttgtttgcgttttgcagggacgcaaggcgggccggtgactatggtgtcggcgaggaagtgcgagtcgcagagcttccgcttcaagggaccttgctcgagggacgccaactgcgcaaacgtctgcctgaccgaaggtttcaccggcggcgtgtgcaagggcctacgccaccgctgcttctgcaccagggactgctagtactgcctcgtctcgcctcgcctcggctcgtgtcctgcgtgtgcatatatagccgcagcggatcagtaaaacatgcatgcatgcgttaccgaatatttggcagtaccagcaagttaatggattaaaatattaaataatatgtcatggaacaaagcctgttttgaacgtggaactgctgagtgcta

SEQ ID NO: 453 - DNA, 915 bp, Zea mays
taacccagcgatggttattggtcccctgctgcagcctacactaaataccagtgctgaagcaatcctgaagttaatcaatggtatgatatatatgtccgattaacttttaagctggcctgtttgtagagtagttgaaatctcatcgttttcatatcattgcagggtcatcgtctacatatcccaatttttgctttggatgggttaatgtcaaggatgttgccctggcccatatccttgcatacgaggttccctcatcaaatggaaggtactgcatggtggaaagagttgttcactactcagaactggtgaacattatccgcaacatgtatcctacccttcctcttccggacaagtaagttcatacaggtgctatttggttcatgaaatataacgtaaatgacaacgataataatgtacacttgagtactagtagtaataagtttgaataggccgataccaatatatagtgtggtatctgattacggttggagttaaacaaacatgatttaacattatcagttacctattacgttacaaatatgtgaaccaaacgacaccatattgcattaatcattttctgtatgtgatgccttcctcttattcacaaatgcaatgcaatgtatacatatggtttgtttggaacaagcaactctgtggtgttttttacttggttaatatctttagggacaagtgttttgctatgacttcagagcatcgtgatatgataaaaagcattgtcacttcgtcagcagtgtttgtcttagaatgaatgaaatattacttagaatagttcgtagaacgaataagataactaagagtatgttcctcttggcaggtgtgcagatgacaagccgtttgtcccaccctaccaagtatcaaaggagaagataaaaagcataggcatcgagtgatcca

SEQ ID NO: 454 - DNA, 691 bp, Zea mays
ctcgccgtccttctcctcctcgagtaagcggtgcgtgccctgcttctttcttcaattttcccccgatccatggctcgtgcgtgggttccctgctcctagctccactcccccgtccatggcttgcatctatgctgcacagctcggttgctgttgcagttcaacctacttgttactccaaaaagaaggcgggcttatccaagatattgatcaaaatttccaccttttcgcgtcgaatggcgatgaattgaaggatccacccaggccaagcactggtgctctgtgcttatcttttagcgagcgaagtggtcatttccccctctcttctttatgggaggaaaataggaaatggtgtgccaagtgtatcctcaaccattctactgttccaaacgtgcagtatacatcggcatacagtcgatccagttgcaacaccatagtacggtgctgctccatctccatccagtagctgtgcctgtatttttgtccttcagatttaatcttgcgtttcttgccccaaacacaggctggaagggaaggtggccctcgtcaccggtggcgccaccggcatcggcgaggccatcgttcgcctcttcatggagcacggcgccaaggtctgcatcgcggacatccaggatgaggctgggcagcagctgcgcgacgccctgggaggtgacgcgcagggcgccatgttcgt

SEQ ID NO: 455 - DNA, 545 bp, Zea mays
  misc_feature (535)..(540): n is a, c, g, or t
atggttgagatcaaccagaagatcattgccgtcggagagtccgacgaaatccccctagtgaagaacctgaagaggattcctcttgtcgcctctctggtgtccgagatcatcgccgcatacctcatgccccccatcgagtctggctcggttgatttcgccgaatttgagccccggctcgtttactgattctgtacaaagatttatccttgagttattcaccctgaaagacaagctgctggtgctttctgccgaaggggccttgaatgaatggtgaaaaccgctggatggttagaggatctgcatcttcttgtgttcttctgtaaaatactgagacttgggcagcataaaaagcttggcaaatttctgttgtgtggcatctccatgtaagtaacagtggactgcatgcagaagcgagcgttccagttttgcgacagaagggggcgtccgaagttgttgtactgctagtgaacgtcgaactagcatgataaaatgtatcccagcacatttggttgattgtgtaacactagaaagccannnnnncagcg

SEQ ID NO: 456 - DNA, 545 bp, Zea mays
  misc_feature (30)..(30): n is a, c, g, or t
  misc_feature (114)..(114): n is a, c, g, or t
  misc_feature (117)..(117): n is a, c, g, or t
  misc_feature (173)..(173): n is a, c, g, or t
  misc_feature (188)..(188): n is a, c, g, or t
  misc_feature (208)..(208): n is a, c, g, or t
  misc_feature (236)..(236): n is a, c, g, or t
  misc_feature (251)..(251): n is a, c, g, or t
  misc_feature (263)..(263): n is a, c, g, or t
  misc_feature (300)..(300): n is a, c, g, or t
  misc_feature (304)..(304): n is a, c, g, or t
  misc_feature (324)..(324): n is a, c, g, or t
  misc_feature (352)..(352): n is a, c, g, or t
  misc_feature (381)..(381): n is a, c, g, or t
  misc_feature (405)..(405): n is a, c, g, or t
  misc_feature (417)..(417): n is a, c, g, or t
  misc_feature (465)..(465): n is a, c, g, or t
  misc_feature (535)..(540): n is a, c, g, or t
atggttgagatcaaccagaagatcattgcngtcggagagtccgacgaaatccccctagtgaagaacctgaagaggattcctcttgtcgcctctctggtgtccgagatcatcgcngcntacctcatgccccccatcgagtctggctcggttgatttcgccgaatttgagccccngctcgtttactgatnctgtacaaagatttatcctngagttattcaccctgaaagacaagctgntggtgctttctgccnaaggggccttgnatgaatggtgaaaaccgctggatggttagaggatctncatnttcttgtgttcttctgtaanatactgagacttgggcagcataaaaagnttggcaaatttctgttgtgtggcatctcnatgtaagtaacagtggactgcatncagaagcgagcnttccagttttgcgacagaagggggcgtccgaagttgttgtactgctantgaacgtcgaactagcatgataaaatgtatcccagcacatttggttgattgtgtaacactagaaagccannnnnncagcg

SEQ ID NO: 457 - DNA, 1222 bp, Zea mays
atggagaggaggtttggtgagaagagaacccagccctgagcccctgagccccctccccccgctattgtaacaagaaatgggaactgaggagttctccttctcctcttgctgcatgctgctgtgctgactgagtcactctggactgagttcaggtaagtgggacggcgccggcgacctcaccgagaaggagatcatcaggttcgagaggaactccggagtggtcagcggcagggtgcgggagatccaggtgagtggagtagaagtagaacagaagtagtagtgtaggcgtgtagctggcaatgaaatgcgcagaatggtgtaggcgggaaatttggatccataccattaaaagatcaccactttggatccatatcattactatctcacttacatgtgggtccacatgagtcaatgacatgtggggtccatggtatatatctaaagtttggatcttttaatggtatagatccaattgttccgtcttcttttgctcactgcctgccatgtctctgcaaaactccccaccgcagctgcaaaactaccagaggaagatggagcagaagatgcagagggaagaggacctccgcatggggctcaagctgtacaagtcggtgaactgacagcgctatgcgattgcttgctttgcttcagttccggaaaaaaaaagtctctttggactaacggggggaaaggaaagaaatgcagggacgggaagtacgaggaggcgctggagaagttcgagtcggttctggggtcgaagccggagcccagcgaggccgccatcgccagctacaacgtcgcctgcagctactcgaagctgggccgggttcagtgactctcactggctgctcgctatcttgttcttcaggtctgctactctgaactgaaggaaggcggctcatgtcttctctgttgcttcgtttgtgcaggtagaggctgcgctttctgcgctggaggatgcgctcaagtcagggtatgaagacttcaaggtagtataatacttgttctgcagtatgaaacacatggtttgttgctactgatctgatggcacgagacttggtcgacttcttcttgcaggcagttcgcaccgacccggatctcgcgaacctgaggaagtcggaggagttcgagcccttgctgaagaactacgacgagtcgttcatcaacgagaacgccatcaacgccatcaagtccttgttcggactcggaaacaagtgaggcg

SEQ ID NO: 458 - DNA, 213 bp, Zea mays
gcgagcacaagaccagctcctaaggtcgcagcgtgtgcgtgtccgtcgtacgttctggccggccgggccttgggcgcgcgatcagaagcgttgcgttggcgtgtgtgtgcttctggtttgctttaattttaccaagtttgtttcaaggtggatcgcgtggtcaaggcccgtgtgctttaaagacccaccggcactggcagtgagtgttgctgt

SEQ ID NO: 459 - DNA, 837 bp, Zea mays
cagcatccaagtcgactgtttccattcctgatgatgctacgacggtgaaagaagcgcccgctcaggcacggaagctaaggtatattttatacacatccatatccatgctaaaatgaaacgctagtgagtcgacaggcttaacaaccacatcgttttttcgcccagtcgtggcggacaccatagtcttcatgttactttctggactactagtttagactttagagtcgggcatctgaactgtctcgtgtgacagggaaatcttatatgtggccgccatgcaaatctgagccagtagttctcgtagtcttgtagactagatagctcgttttgtttacccgttcggaaagatgcctcctgttgaataataaagtcttccaaccagcaacttggtttcattgaaaaaatgatgagcagtgtagtatcaaacttcctcttcgcccttctgcaacttgctgttttgtaaaacgcatagataaaagcaggctgtccacgcgaccattaaaccctgcccatcttaccaattgattgtacacacaacacagttcagtcatcagatgtgttctttttttttgtgtggcacagtatcgattcgtcgctcacaagtgaagaaagggagctgaagcggaagcaagcccgcgtcagagccacgttcgtgcaggacctgctgctctctactctattcggcgactgatgacgaaccagagcgagcctggtattatcactggaaggtgcagagttgatgtgggcgtgatgtatctttctaagttattgtaagccggtctctgtcttcacaactgacgatctgtgtgtggtacgcaccacgcacgcaagtcgcgg

SEQ ID NO: 460 - DNA, 388 bp, Zea mays
ccgcggagccaggtccgcgccatcggcccgctgctgacgggcctcatcgtcggcgccaacagcctcgccggcggcaacttcaccggcgcgtccatgaacccggcacgctccttcggcccggccctggccaccggggactggacaaaccactgggtctactggatcggcccgctgctcggtgggcccctggcaggcttcgtgtacgagtcgctgttcctggtgcacaagacgcacgatccgctgctcaatggggaaatctgacgaccatcagcccctgtgttgtggcgcatgatgcttcatgcttgtttctgtaaaacaggtcatttatctgcaagcatggtacatatattggccacggtaattagagaggcttgctgtaaagcagtag

SEQ ID NO: 461 - DNA, 778 bp, Zea mays
gacaggacattgttgcgctttctggtggtcacaccctggttggtggattattattattttttttgtcaacttttgaaagctggtgcttatgcacaattgtctctttcttgtagggaagatgccacaaggacaggtctgggtttgagggagcctggacgtccaaccctttgatctttgacaactcttacttcaagtacgtgatcttccttgatactgtgctgtactttgttggttaaactgaagacaacactgactgacagggagcttctgagcggagagaaggaaggccttctgcagctaccaagtgacaaagccctcctctctgatccatccttccgcccacttgttgacaaatacgcagcggtataatatatctttgatccttgtcatatttgtcgggatgggtttatgctattgttacctgggatgggttgatttgtaggacgaggacgctttctttgctgactacgccgaggcccacctgaagctttcagaattggggtaagcggtgctgatagatctatcatctatttctatgtattatgattctatgtattatgactgaatgattgtatctcttgcactatgcagatttgctgaggcgtaaagtgagagagaacgaaccagaagagtgtggtggctgtcgtcggccggccggccttgtgtttttgttgtctgcttttctcttgaatgaagatgtgatgaactcagctgaagatgtagtgtgtatgttgtcatggtttatttttctattttatttatctatctataatatcta

SEQ ID NO: 462 - DNA, 617 bp, Zea mays
caaacaacccagaacagacttggcttattccattcaccgattgacagggcaaccgtttcaagcagatggcttcatcagggcagcgaccttctggacagacggcctctccatcagaccagaccaccaggccttcacatgcgggtaggcgtcgagcacagatgcgtagggcgtagcaaacaggcagagagtgacagacacatggttcaggtcggcgaggctgaggaagtctccagcaaggtacttgcacttggtcaggcgtgcctcgtacacctctagcaccttcttcagcttctcaaggttctcatccacaactttctggtcggtggttcccccaagcataggactgatgaggacctggaagaggatgggattcagtgcagcggtgtactggttagcctccacctcgatccaaacatccaccattgctgcctcctcgaggtttccttccctcaacagctctggcttgtttttgcgagcagcgtacttgcagattgctcgtgattctatatagcacacagatggaaaacatttaattaagaataaaactaggaaagcaacatcattagtagatgcaaaatgattctacagcactagcatttgactatctcttttttttt

SEQ ID NO: 463 - DNA, 371 bp, Zea mays
tatgaagcggactaggacatcgccggaggggaagaagaacgggacatcgccggaggggaagaagaacgagagcctcttctgatgcttgacttcgtgtacaagttgtagctgaatgttcctcaaaatataggattaactagttctgtaacactaacaccccggcttggttatgacttagaaactgttaggccatgtttggttcacatctcctaaagtttagtcacttgtttaaaaatgttaaaggaggtaactaaaaaaaaaacctcttaaataggacattatagggactaatgtttagttcctaaaatttaggagatgactaaaggaaccaaacatagtttactaagccttagtaaacgtgtgaataaatg

SEQ ID NO: 464 - DNA, 478 bp, Zea mays
tatcagattgaagaggtatcctcttctgcactgttctatcttctttgaagcccagtgatgctgtttaccaaatctgctttccaggcatatatggttttaatggttattacaacttgcctttctttgcatgggcaggtggtgtttcgatgttgaacttgtatacctgtgcaagcgcctcaggatcccaatggtagaagtatccgttaattggaccgagatacctggatccaaagtgcgcatgacgagcatcatgcacatggtattcgagctcctgctgatcaaagtaggttatggactggggatatggaaaatcggctcgtagatccttgacattctatgctgactagtttctgcaactcagtttggaggaatactgtacaattttccgcaaaacctagttggtcgccagcaaatccatttggaggaatactgtacaattttccgagactttcaaatcgagagcatcaattcacatgta

SEQ ID NO: 465 - DNA, 1263 bp, Zea mays
  misc_feature (1156)..(1156): n is a, c, g, or t
  misc_feature (1165)..(1167): n is a, c, g, or t
  misc_feature (1257)..(1258): n is a, c, g, or t
cgggcagcggcggcgttcgcggctctcgcaccgccgcctccttcggagctaaggttcgttgcttccccacaccccaccagctcctatgcctgacgtgatgcctcctagccgtgatacccgagcccatctactgtcgccttgctactctatccgcggttccgccgcttccattcccctgctagccccaccggctgccacttccatggtcggcggcccgcacgtgctgcctgctgctgccctgggggggaagggggtataggattagatggctgccgcctgccgctgacggctggctcgaccctgcggctggctgggcggttgaataatggagttctgtggtagcatgttttgtgtggattattatgtttcaaaccgcgtggaaatggatgcagttcataggatgtcaacggctcagagtgaggtgttcctcggctgggtgtttgtactttgtagggccttccttttcatatatctccctgcaaggcaataacaatcgtaccatgtgtttggtgtcctgcaatggtcgggtctgttgcttcttgtttttttgactccttgtgagatttctggcaggttgcgatttgtgagctcccattccaccccatcagctcagagtggctaggaggacatggtgggacgtaagcatctcctagatgttttcgtgcatttctcgtgcttacttaaaatattcagctaatctgtttggtatattaactacattctaaatcgacatgttcataatgattttattattgtcctagttgcgtgatacgtggttgcgtacctaaaaagatactcgtgtatggtgcatcattccgtggagaatttgaggttagtcatgttactgtcttattatggtagaactaatgtgggtatccaaaatggttctgaagcggctaacatggaatctaaggacacacttgccttcattgtagattgtatatgaactgtagttttgttacaaatgcaggattcgaagaattttgggtgggagattaacggagatattaacttcaattggaaaacgctattggaaaataaggtcaggtttaaatctctaccatgactgtgagcatgttctccgcaactgctgaccctgaaggaatatcatattgcccaaggtcctaattttttcttctcttcagactaaagaaanggttagatnnnatggtgtgtatcagaggatccttcccagtgccggtgtgacaatgattgaaggggcaggcagtctagttgatgctcatactgtgaagtagnnagccc

SEQ ID NO: 466 - DNA, 962 bp, Zea mays
ccctctgtcagcacatatagcatgcatctgagcgattgcatgcctaaacaatgtaactgttgtttctttacaatgacacacagtggcctgaccaactccaactacacggagcttgcccagctacacgagatgtacaaggaccagggtgagtacgtctcggtcggtcggtcgcctttcagagagacatcgatcgaatccagtttctcttctggttatgcccgttttcctcatgtaattaattatttgggtcggttatgattcataatttggcgtacgtgacgacggacgaccttcagatttcgagatccttgcgttcccgtgcaaccagttcggcgggcaggagcccggcacgagcgaggagatcgtccagctcgtctgcgctcgcttcaaggccaagtacccgattcttcacaaggtaaatttaattctgtgcgcgcaaacctttcttataaatttctgggttttcttcttcttcttcttcttcttcttcttcttcttcttttgcatgtccaagctgaaatagacaacgatcgatcacatgcaattaataacaacacgtgttttcggcgtttgttttttgccggccgtaaggtcgatgtgaacggcgaggacgctgcgcccatctacaagtttctgaaatccagcaagaccggccccatgggcgaagacatcaagtggaacttcgccaagttcttggtggacagacaggggcatgtcgccgagcggtatgctccgaccacctacccactcagcatccaggtgagtgaggaggcgcgcgcggttcagcttcctcgatcggtcatctcatgtgatcttactacagcactgacttttttgcgtacccgcagaaggacatcaagaagctgctcggcgggagctattgaattgaatatccggagacaatataatagatagatgcatgcactgccacttgaaacgcctgaaataagcttgctatgttt

SEQ ID NO: 467 - DNA, 1077 bp, Zea mays
  misc_feature (58)..(58): n is a, c, g, or t
  misc_feature (666)..(666): n is a, c, g, or t
  misc_feature (704)..(705): n is a, c, g, or t
  misc_feature (727)..(727): n is a, c, g, or t
  misc_feature (946)..(948): n is a, c, g, or t
  misc_feature (997)..(1001): n is a, c, g, or t
  misc_feature (1059)..(1060): n is a, c, g, or t
  misc_feature (1072)..(1073): n is a, c, g, or t
ttgtccctccttgatatagaatattagtttttatctgtgctacttatttcaccgtcanagacatagacatcttttgtttacgctggatagaaaacattattgctgtacactgctaatcgctgcactgttttcgattgtttcagtggcttaaccaactccaactacactcagcaggcccagctctatgagaagtacaagaaccaaggcttgttcttgattcattgctcttgtatattcttagggttgtagtgcttatctggccttatgcaatattggcttatctttatccaactatcggttgttcaccaatttaaacaattccagttgttggggatgctaattgctaagtataattgtcaatttgtgatatatatatgcaggctttgaaatcctcgctttcccgtgcaaccagtttggtgggcaggagcctggtaccaacgaggagattgcccagtttgcctgcacacgcttcaaggctgactaccccatctttgacaaggtaactgtttttcctcaaccagaggtccagagctatctcagtgcaaatatacagttatctaacttagcaggatgatgtgaggatgatatcactgatggtcctaactcctaagagcttgtttggttaggggtggattgaaagaaattggagaggattaaatctccttntagtcaaaattgaatagaaggggttttaatccccctcnnccccctccgatccctgtcaaancgaacaaggcctgagggtagaatggtcagttgtggggtagtactgacctctatctcttatcaggttgatgtcaatggtaacaatgctgcgcccatctacaagtttctgaaatctagcaagggtggccttttcggcgacagcatcaagtggaacttttccaagttcttggttgacaaggaggggcgtgttgtggatcgctatgctccaaccacttcaccnnngagcattgaggtaaactgccagcgctgcaattcacatttgctataagcnnnnnactagtatgctattgtcatcgttataacgtttttttaatataatctctgtagaagganntcaaagaaaggnngttt

SEQ ID NO: 468 - DNA, 909 bp, Zea mays
gaactgtttaccagacttgctagcttgctagggaacttttggtcctttttcttagataaggtactctgaacagtagtctcgtttacctggcagctagaataatattggatattacttacgctaatttctagacgatgcaaagatcgcatggcagaatacatcaatttggaaactaacaacatgtggtagaaatacccttagtcctataactcgacgatgcgttgttatattggtttttagttggccacaatcagacaagttgcagaagcgtgtttaaagacgcaatctgcatctgcatctcaccatctaaaaagtacgattaatcagccatggtgagaatttgctggcacgcgtattgatattttggatagacctgacaggttgacatcaacgtgcaaaccagagctgtgtgttcttatattgctaataattaagaaagctgattgcattctaaactcgggttttgcaggtgcgcgtaaacgggccagatgcggcgccggtttacaagtttctgaaagctagcaagcctggtttgtttgggtcatcaaggatcaaatggaactttaccaagtttctggtggacaaagatgggaaggtcatcgagagatacggaacctcgacagctccaatggcaattgaggtctctttccctctctgtctctgtctctctctccctctccagacgtctgcctacgttttctttttgatgcatggattcgtgtttcttggactctgcagaaggacatccagaaggcccttgaggaataatttttgtgagcttgtctcgtctcatccaccacacacttgcagcagaaataggcacttgctgaaatattccgtcgtagtaacattcagaccggacgtctttgcttatctgtagtaaaaattctgtgtaatgttaccctcctt

SEQ ID NO: 469 - DNA, 596 bp, Zea mays
gaccttaaagctagtaacattctcttggaccaggatatgaaccctaaaatttcagattttgggttggcaagaatctgtagctccaatgatgctgaaggaaacacaaagagggtggtcggaacatagtaagaacacatgagtttatcaacattgttagcttgtttcctcttaattagtattgggtgatcaagcaattctaatatgttaggataacatttttatcttgcttaatataatgatttcagtggctacatgtctccggagtatgcctctgaaggcatctactcggtcaaatctgatgtgttcagctttggtgttctacttcttgagatccttagcgcgaaaaggaattcaggttttcaccaatatggagactttcttaaccttctcggatatgtaagtatatgctttctccacaaaatgcacgcaagttgttatggcataacagctgtacagatcatggaggcttgatgagctttctgctgttctgcagacatggcacctgtgggagataggaagatggcttgatcttgtagaagcatccatttcgaaagagatgcatgaagcagaggctaggcggtacattaacatcgcac

SEQ ID NO: 470 - DNA, 721 bp, Zea mays
  misc_feature (655)..(659): n is a, c, g, or t
  misc_feature (685)..(693): n is a, c, g, or t
  misc_feature (704)..(713): n is a, c, g, or t
cgtgagcaagagcagaaatactttgatgaaatggttcagaagtgcaaggtaaaaactaggctgcttttagtattacagaatatcaatgttgttgatacctgattgatgatgtttcttgcatgcataactaccatattgttctggaagtgacatttgtagttgaaatagtttatgttgttattttgcttagttacattatttctcatggttttgtagcaagtacataatcaattttgaaagacgtcctcaaatattttaattggctatatgggtatttgaagtattcatttaatgtggtgtttttgttttgctaaataatttattaattgtctacatattattgtctgtaggatgctggtgcaaccctggttatttgccagtggggttttgatgatgaagccaatcatttattgatgcatagaaatctgccagcagtgagatgggttggtggtgttgaattggaactgattgccattgctacaggtcaacatgctgctatatctcactctttatgtcattattatgtgactatgaattgcatgtcgttacattcccttacataaccgactgcaggagggcggattgttccgagattccaagagttgagtcctgaaaagcttggaaaggtataactcttctgtattcgttctttagnnnnnaaaacagctgtttgaatgtttctgannnnnnnnnatacttggatnnnnnnnnnnacttattt

SEQ ID NO: 471 - DNA, 555 bp, Zea mays
ggaagtagcagcaaatgcgcacgttggacaggatcatgtattgcatcacatacgtggttttggtgtagcgttggatgttcttatcaactacctaagttcagaatatggaaatgcatttgagcttggtatgttaatgccttgagcctttgaccacagcaatgtttcatattttgtttgaagactgtgggggtctgtggtacctgaccttatatgccactgtaacttgtcctgatatatatatttttaaaaacagctaggatatttgcgtttttatctggtccacccaattatggggctgggcagctggatataaatgaggaccaaaattctggtaaagcaaggggtgctgatcatatattgcttcaagaccagacaagtttctacagaaatctggtaactttgcacaaagatcagtcaatatactatgataatattttagaatatatctgattggcatatcacaggctactagtgctgttcaagcaggtgtatgcgtggacctttttgcaattacaaatgaatacactgatcttacttctctgaaagttctgagtg

SEQ ID NO: 472 - DNA, 757 bp, Zea mays
tgagagctatactggcaggtatctctattggaaattttcaaagctaacaatgactccaactccattgttggagtggaagcacgcttactgtcaattccatttaaaaaaaatcctttgtggtagatatactatgaacagagcgccattaaaaattctagttagatgcttcctgaagctctgaggctttctaattcgccacttcgttgaaaacagaaagcagcggtatgtctactgcactatacttgacagcattgcgaaggtgactggcatcataaagtttgatctgcatgctgaaccggaaagtggtgtgaaagaacttgaagtgggaggaaatgtacaaggcatatatgacctgggacctggtagatttggttcagaggcgatttttgttcccaagcatccaggtgtgtctggagaagaagatgacggctatttgatattctttgtacacgacgagaacacagggtactctttttcttggctctgcatcctcttatcctgcacatatcgccattcatagaaggcctgaaatgtctaatagacaatggttttgatgatgccgaaaactcaagaacccaacatgtgcctcttgctcttggtgtttcaatttgacggttgcaatttggttcggcatgtgttgttattgtggatgcaggaaatctgaagtaaatgttatcgatgcaaagacaatgtctgctgatccagttgcggtggttgagcttcctaatagggttccttatggattccatgccttctt

SEQ ID NO: 473 - DNA, 708 bp, Zea mays
ttcaactggtatacccccattttagccagtgtctggctattatctactccttttatgtgcttctctcatgacctctttgtcctgtgggttttttttgttttgtatcttgcaggtttatatccacctgttgagaagctcctggaacagtgtggtaaattccaactttttgacaggttgctaaatttcctgatggcgcaaaagcacaaggtatatggttttctctagtcactgtatcgtatatgcacactagttcaggtctgctacatttatagtatctcatttcaactgtgtttctgtttgtaggttcttgtattctcgcagtggacaaaagtgctggacattattgaatattaccttgattcaaaaggccatgctgtttgccgaatcgatggtaatgtgaaactggaagaaaggaggaggcaggtaatgttgtagcccgtgacagtatgttaattgttactgcaaccattgttgtaaaagctaaaagacgactgccattataagatgtgctctgccgcacttgtgtgcatttttcggtgaggggagaggcaatcttgaagcagttgttttgttaccatttcctcatttaagttttggttgcttctatttttacatggcagatagcagaattcaatgacgtgaatagcagcatgcgtatcttcctcctgagcacaagggctggtgggcttggcatcaaccttactgctg

SEQ ID NO: 474 - DNA, 531 bp, Zea mays
caccgccggtaccacgaggagacgggcgtgaccttcgcgtcgctctacccgggctgcatcgccaccacgggcctgttccgcgagcacatcccgctgttccgcctgctcttcccgccgttccagaagtacatcaccaaggggtacgtctccgaggaggaggccgggaagcggctggcgcaggtggtgagcgaccccagcctgaccaagtccggcgtgtactggagctggaacaagaactccgcgtccttcgagaaccagctctctgaggaggccagcgacgccgacaaggccaagaagctctgggagatcagcgagaagctcgtcggcttggcgtgatgcccaccgtggccggcgccggcagccggcgacagtttttcctacctaggacatgctcattagttggtctcactctcagtcgagtagtcgacgtgtggtgcgcccgtgtcagagtgccaagccaagacagaaagtgagtacaaacgtgtaaaatatgtgctactgcgacgtgatggtttgggcagtggactgtat

SEQ ID NO: 475 - DNA, 350 bp, Zea mays
taactggatcaggctgctgcatccatcaccacggccggtttgtgtgcagcataccgccactgtcggatcccacaaaacagatgcagaatccaaattagcatatcgcagacctaataatccaataaccacaatcaaacagcaaggctaacgacactacacaccaaatgaccattagggtccaatccagagcgtggcgcactgcagtaccgtaccacagtaccagcgccaccattgtacttcagcagccgtcatatgccaatggcattgccagtgacacaggcaatgcatggctaatagtggactagtggtaggtagttgctctccgtagggagcaccatattacaggtgca

SEQ ID NO: 476 - DNA, 482 bp, Zea mays
tccattttcagactgagctagttcagctgtcatttttttttcagccaaaggtcgcgttcttttggacctgctcttgattcgttcgttcgttcgtttggattgattgattgattgattcctttcgacttcccttcaccacccccctgctccgtcaagcgtgcctctgttcttctgccattgctggatcgcgtttgtctgtttgttgggttgctggcgctgcggccatggatcccttccacggcattgtgaaggaggagttcgacttggacttcgacttcacctgcgcgtctgcggcggcggcggcggcggcctcgtgggccgtcgccttgccggagatgccccggccgatggaaggactcggcgaggtgggacccactccgttcctgaccaagacatacgacgtcgtggacgaccccaacaccgacaccatcgtctcttgggggttcgccggaaccagcttcgtcgtctgggacgccaacgcc

SEQ ID NO: 477 - DNA, 482 bp, Zea mays; identical to SEQ ID NO: 476

SEQ ID NO: 478 - DNA, 368 bp, Zea mays
ggcggacggcgacgaggggcatggcggcagtggggaaggccccagcggcccagaagtgaagccaatgctgttcggcgtcccaatcggggccaagcggctacgcggtgcgcgtggtgatggagacgatgtagatgacggtgaggacaacgacgaggaacaagatgaagacgacgagaggcaaacggcgcggaagcagggggttaaagcggccaggaggaacgagacgtcggatctggacgtgctgacgctgtccgtgcgggcggccgcggcggcgaggacgggcggaggatcacgtgaccgcaaaagccccattaccgcccaccccgataggagcctcagcctagggctgaaatgactgacactcgtgt

SEQ ID NO: 479 - DNA, 489 bp, Zea mays
tcgctcgtgaggcgcagcaacgtgttcgaccccttctcgatggacctctgggaccccttcgacaccatgttccgctccatcgtcccgtcggcggcctccaccaactccgagactgccggcttcgccagcgcccgcatcgactggaaggagacgcccgaggcgcacgtgttcaaggccgacctccccggcgtcaagaaggaggaggtcaaggtcgaggtcgaggacggcaacgtgctggtcatcagcggccagcgcagcagggagaaggaggacaaggacgacaagtggcaccgcgtcgagcgcagcagcggccagttcgtcaggcgcttccgcctgccggagaacgccaaggtggatcaggtcaaggctggcctcgagaacggcgtgctcacggtcaccgtgcccaaggcggaggagaagaagcctgaggtgaaggctattgagatatctggttgagcatccaatccaatatggacgtggaaggaaggt

SEQ ID NO: 480 - DNA, 628 bp, Zea mays
  misc_feature (505)..(505): n is a, c, g, or t
  misc_feature (516)..(527): n is a, c, g, or t
  misc_feature (538)..(542): n is a, c, g, or t
  misc_feature (583)..(590): n is a, c, g, or t
  misc_feature (592)..(611): n is a, c, g, or t
aatatatgaattcccatgctcacttttatctgatggggttcgaaattcacttcggtaccttaaacttcgttgttgtgctctccgtcccacagttgaacttgcccccatgagaagcctaacaagtttacatttgtcctttgtgagcattaaatggaatgggttaaagcgcctcctttccaactcccttgctctggaggaattagagctagtatgttgtgacaagatcgtttgcctcaagataccttctgccctgcagcgtctcaacagccttaatatttttggatgctcggccctcaaagtgctagagagcaaagctccaaatctctctagtctttctctttcagattttggaggcgggctagtcttctcacttgtgaaaacattgcaaatgaagaaactaatcactgaaagtactgtctatgatgctcgtaccaggctgccatccattatgcccaatcttgaaactcttgtcataaactcatgtcagcaggtatatatatatacnctatttaaagnnnnnnnnnnnngatatgaatgnnnnncatttgtgattatctagtgcataagttatctgagatgcatnnnnnnnntnnnnnnnnnnnnnnnnnnnncaatgctgcctaccaaa

SEQ ID NO: 481 - DNA, 613 bp, Zea mays
  misc_feature (591)..(592): n is a, c, g, or t
gacactgctcccgacgagcgccaggaagtccgtgaagttgggcacgtacatggcggcgagtccgacgacgacgaccagcagccacctaagccaccagcagtaccgcttgccgtggagcaggcgctcggcgacctcgtacacggggttcatcatcaccggcatcgtgaagaagaggttgatgcagagccccagctgcacggcggccgacagccacccggctccgaggttggtggtgatgatgtcccgcgtggcgtcgccgaacgcgacgtagcccatgacgccgaacagcccgtacatgacggcgatgaacgccatggacagcccgagcgtgacgccgaacttgctcttgttcgccgcctctgcctccagcggcagcaccatgccgatgccctcgaacgcgtacacggagacgccgagcccgtagagaagcgcgccagcgccgccgaaggcgaccacgggcacgggcttggcgagccaggcggcgacgtcctggccgaggaccacgcccatggcgccgaggtcaacgacgtcggcgaagatgctgagcggcgcaagcagcgtcagcgtcttgatggagttgacctcggcgcnntgggcgtggtcctcggccagg

SEQ ID NO: 482 - DNA, 571 bp, Zea mays
tgcgtcgtcttcgatttctcggacccgaacaagagctcagtggagaaggatatcaagaggcaggcattgctggatcttatagagtttgtcgagtcgaccaacgctcgcttctcggaggcagccatcgcggcctgctctaggatgtgtgccatcaacctgttccgggcgttccctccgagttgcagatctggctcatcaggtggtggtgagggcgacgaggaagagccaatgttcgaccccgcgtggtgccacctgcagcttgtttatgagctgctgctgaaatttatcggatcctcgtccttggacgcgaaggtagggaagaagcactttgatcactcattcatcgtgaagctccttaatcttcttgactccgaggatccaagagagagggattgcttgaaaactattctgcacagggtatatgggaagttcatggtacaccgtcctttcatccgcaaagcagtgagcaacatattctaccagtttgtctttgagactgatcggcacaatgggatcgcggagctgctggaggtctttggcagtgtcattagtgggtttgccttgcctctga

SEQ ID NO: 483 - DNA, 456 bp, Zea mays
gccggtcggtttgtatgcaactacgtgtactaccactctcttcggttcgcggagcaacacggcatcaaatccctgttcgtgcatgttcccctcttcttgacgatcgacgaggaggtccagatgcacttcgtcgcttccctccttgaagtcatcgctttctcctccaactaggaacagcagttggaaggtgcgtatgctcagctttccttcctgtccagttcattgctgtaggacagaatagcagagtgagcgtaacactgtcctgtccgggttggtttcctgtttgcagatcagcgtctggattcctatctcaaggatggatgtaaagctggaatgctgcatgtaggctgaataaggtggtgtggtcattggcgatagatgttaatcttgctccacaggttgtgtttgggaatcgggagggaaaaaaagagaggtcattggcgatagatgatgatc

SEQ ID NO: 484 - DNA, 521 bp, Zea mays
gtaactgaggaagttgctccggtcgtcaccgtctccgaggagccggcgccggaagcggcgaaggaggtggtggagaagccggaggaggggaagaagcccgacgaggagggtgacgagaggaagaaggccgaccccgccgccgagaaggagaagaaggcgaggaagccgcggagcaggaagcccaagtccgccgggctgcaccacccgccctatttcgaggtgagcaaagatgccgtcgtcgtcgtcgtcgtcttgtcggttactcatccgtgcttggattctcattctgatgatcggtcgctgtgtctgctggggacctggggtgatcgaggtcagatgatcaaggaggcgatcctgtcgcaggacggcgggaaggtcggggcgagcccgtacgcgatcgccaagcacatgggggagaagcaccgggacgtgctcccgcccaattaccgcaaggtgctggcagtgcagctgcgcggcttcgccgccaagggccgcctcgtcaaggtcaaggcttccttcaa

SEQ ID NO: 485 - DNA, 375 bp, Zea mays
ccttgcctttcgtcgccgtccagctccaccttctcgtccaactcctcgtcaaactcctccagcgcctacaccaacacggcaggaagagccggcggcgagccctccgagcctgcttcggccggagaagggtttgatgcgctcgatgacatcgaccagctcctcgacttcgcgtcgctttccatgccgtgggactccgagccgttcccgggggttagcatgatgctagagaacgccatgtcggcgccgccgcagccggtgggcgacggcatgagtgaagagaaagccgtgccggaagggaccacagggggagaggaggcctgcatggatgcgtcggagggggaggagctgccgcggttcttcatggagtggctcacg

SEQ ID NO: 486 - DNA, 694 bp, Zea mays
  misc_feature (674)..(677): n is a, c, g, or t
  misc_feature (684)..(689): n is a, c, g, or t
acaattttgtcatagacgtttatattttgggttgtagaacttgagtttagttatttgattgtctttgccttgtttttgttattatattctgcacttgtgcaacattgctaccctacagttacatttctcgtgggcatgccatgacaggttgcagaagccgaagacaaaactcctgggggccttatcctcactgaaacaactaaagagaagccgtccataggaacggtgagagttcttgccagcagcttgtctataagaattatgtatttctcttctttgcttgcgctagttgcagcttacatgtgtaggagatagcactagcagaagttaaaaagctctgtttcgtcgggtgcaggttgtagctgttggcccgggtcctctggacgaggaaggcaagagacagccactgtcagtgtcggcgggcagcacagtgctgtactccaagtatgcagggagtgagttcaagggcgcggatggcacggcctacattgtgttgagagcgtcggatgtgatggctgtcctgtcttgagcatttcgtttccggctcgttaatgtagtttgcagccaatagttgtcatgtggtatgaaacgatcgctttgtggtggtcatcacaccatgctggtgatcatcacaacatatgctgatactgttccggacaatcggctagaatttnnnntgtggcnnnnnnaaacg

SEQ ID NO: 487 - DNA, 394 bp, Zea mays
tgttcgagatgcccaccggcggcgccgccatcatgcgggagggccccaacctcttgaagctggcgcgcaaggagcagtgcctggcgctcggcaccaggttgcgctccaagtacaagatcacctaccagttctaccgcgtcttccccaacggcgaggtgcagtacctccaccccaaggacggcgtctacccggagaaggtcaaccccggcagggagggcgtcggccagaacttccgcagcatcggcaagaacgtcaaccccatcgacgtcaagttcaccggcaaggccaccttcgactaatcacacttcacgtacgccgcacgccccagccgggatccaaattaaagaacttcttcttctattaattacagtatattgtaatttagctgctggta

SEQ ID NO: 488 - DNA, 276 bp, Zea mays
gctggatgccaaggtcctgagcaaaatccccaggggtgcggtcaaatccaaaaagcagaactagttaggataagccgcagattgtgaatgcccgtatcatgagtatcgggcttgtggttttgcatggcatatgtcaatctgtctgttggcttcagcttggttcttctgcgactactttgttgatgttattatagtcctatgtatgtcactgtgtacatgacagagatgttcggatgctacgtctagactactgctgtgctgtagcttgtaaattcc

SEQ ID NO: 489 - DNA, 1032 bp, Zea mays
tgagttcccaacctgccagcatgtcttgttttttcttgaactcagttggttacactgctgccttagcatacataatgctaaggagatagtaagcatcgaatactgattttgcttgacaaattgagttgtacgattgttgatcagactacctagccatttggaactcagtggtttccacatacttgggtacttcgtacttcgcagttaagagaggaaactatgctctgctgtctgctaatctgtaatttatcaagaacaaacagtgttgtgggttacttgactgacagcaactgatgaaggattgaaacaacctcctaattaaggctgaacaaaatgaactcattttagcttaaagacagtgaaatctgagttaacgattccagttcctcacaattcaatttgaaccaatttattcacatggctttctttgagttcaattgaagctgtgcaggataatctcctactaacatctggttactgcattttttttgcatttattaggtccagaagcatatgcagatccgaatggaggcgaaccagaagtacatcgacacgatactagataaggcgttcaagatagtatctgagcaactgagtggcttcagcatatctgaccaagacctaccgattctcacctctgctagggccatgcttagccctgcagatcacttgagttcgtctgtcttcccccagctctccgtcagctccgttagccttcacaatcctggtcctggaggagggaaaggccttccgcatgttgccgacagccacgtgttctcccagaggccacctgaacaattcaagcgcaaatcacgttgagaagcattgctagctcgacgcagatgcatgacctgatcaagggcacactggaaaatcagaggaatttcgtctgacatgtgcacggtgcaatcgttcacccatcctcccgtagcacatctgtgaaaatcaaggttatcttggtctatttcggtacatctagactgacctttattaatatctaatgtaatgcctaagtggactagataagtaatt

SEQ ID NO: 490 - DNA, 456 bp, Zea mays
gtccgatcgcaagaagcaagcgacaatgtcgccggcgcgcagcagcagcagcaacgtcttcgatccgctgtcgctggacttctggccgtcgtccgccgacccgttcggcgtcgtccggccgctggcggagcagtgccccgtcctcaccaacgtgcgcgtcgactggaaggagacccccgaggcgcacgtgttcagggccgaccttccgggcgtcaggaaggaggctgccaaggtcgaggtggaggacggcaacgtgctcgtcatcagcggcgagcgcgccagggaggaggaggagaaggaggaggccggcaaggacgaggcgtggcgctggcgcctcgtcgagcgcagcagcggcaggttccagaggcggttccgcctgccgcgcggcgccaggctggaccaggttcacgcgtccatggagaacggcgtgctcaccgtcaccgtgcccaaggagga

SEQ ID NO: 491 - DNA, 1297 bp, Zea mays
actggtgaacataagttttttcttgataattatgtttttaacattgcttgcattttatttttgatctttttgtcaactaaaaacatttgcattcaacctatccaccttccagttctatgtggaaaatggggagctatcttgccagatgtatcaacgctctgcagacatggggcttggtgttccattcaacatcgcatcatattctctcctgacatacatgattgctcaagtttgtggtaggttttaaatgccttactctaatatttccccttagtccaatgtttattgtgcaccttaatacaaaccttattggttgtactgtatatcagtattctagtttagacttaatttaatttggaaccatttattctgcactttgattttcgtttttacgtgtagcaataaatcttccattttatttgtcataccgcacacacaagtctcggggctatatgttttcgaatatttgtcgcccgctagttcatttttgtactaaaacgcgacaaataaaaaagaacagagggagtagatatttttgtaacgagttgtgaataatttgtttgctgcaagaatttgtgatgccatctttgtatgttgtttgtcccttcttttcttctgatgtttcttgtacctaactgatagaagccagtagcatgtttttcaactctaaccctttgtgtcttaactttaaccttttgtgtcttaatcttgcaagatctttctcctggagattttgtccatgttataggggatgcccatgtctatagaaaccatgttcgagcactggaggagcaaattcagaagatgcctaaaccatttccagtgagccactcctaatagaactgttttgatgtttctttttgtttactttctgtgaccatgcatcttctaagttctatgtgggccttatgcacagattttgaagataaatccttcaaaaaaggatatagattcttttatggcatcagacttcaagctggttggctatgacccccaccagaagatagagatgaaaatggcagtgtaatggtaatatagatatcctatcatttctcctgatggattgtcattatcttttgtcattacaagtttgcttgctcgccggcacaaaacagagttctagttctcgttagtatgcatttttgggattaattttatctgtcaattacatggacgcttcatgttgtcatgcactggtcttttcatcgatttgtcactgtagagtgtggaactagatgcatataggcagcaaaattttggtatagttgcttcacgctttgctttgttaatttttgca

SEQ ID NO: 492 - DNA, 1017 bp, Zea mays
  misc_feature (631)..(633): n is a, c, g, or t
  misc_feature (675)..(677): n is a, c, g, or t
  misc_feature (995)..(1000): n is a, c, g, or t
tgcagcggcagcgagggggagcagacgaagagggcgaggagggaggagaagaggaggcaggcgaaagggaaggccgtggcgcctcagatcgacacgggcttgttcagcaacgtcccccctgagctgttcctgcagatcttcaagttcctctcctccgaggacctcatctcctgcgctctagtctgccgcttcatgaatgctgccgcgtccgacgagaccctctggcgtcgcctgtaagttggctggggaggctgcagtatcgattcgttgccaaatgtggcgcaactcgatcgagacttacatattgcatgcctttccgatgttttttccaggtactgcatgaggtggggactggcctccaatgccaaattcagggagtgcgcttggaagaacctctacatacaggtaaattcatccgctcatcatcactgcttctaattcgaggtagtcagggtctcagggagattttaaatgacatttttagttagttttagtgctcacaggtgatttggatatggtctagttacatgctgtaaatgtgaaccaatttgggcactaggtgcaggtcgttgaagtgcaaagtttccatttttacgccatgctcagcagaacaaaatagtagtattgttgnnnaatatttttgtttggtgctactgttgtattaatgaactgctnnnaatgtcgtttttttgttgtgtttaatctccagagagatagagaggatatggttgaatttgtgaggaatactcctacagagttcaaggagtactatattcagatgcaggctgcaaaaaggagtcaagctccccgtccgtcagaagtaattactaaattcagactcttgtttaatctctgtcacatgtccatcttgtagtctcccttcactccaacaaaattgtgttgtgttgatgaaacttcaagtgctcttcatatggattttgaaggtcaacgacgacaaggttatgcttgataagacagtagctgaccaggtatcnnnnnnaaaaacagccgggggct

SEQ ID NO: 493 - DNA, 783 bp, Zea mays
  misc_feature (772)..(777): n is a, c, g, or t
gcatctcttccgcgtcggaaagatcttgcgagtgaaggtcatatgttccattcttccttatttttcccagaacacagctccctcatgctgttggagctgcctactctctgaagatggacaagaaggacgcgtgtgccatcacatactttggggacggtgggacaagtgaggtagatgaaagctctccagccactgaccagtcgcttgccagtgccattatatccagccttcctgacagatgaacatttctcagggagacttccatgcagcgctcaacttcgcggctgttatggaggcaccggtgatcttcttctgccgcaacaatggctgggccatcagcactccgactactgaacaattcagaagtagcaacagcgtgtcttcatatactgatccatggcagttacaagtaaacaatgcaatgtcgtgttaaaattctagtcgtgttgcaggtgatggagttgtcatccgtggccaggcttatgggatccgtggcatccgagtagatggcaatgatgctcttgctgtgtacagcgcaatccatgctgcccgagaaatggctgtaactgaaggaagaccaattttagttgaggtgctcagtagatccatggagtttcattacctgaaatgcacaaaaaaaacttcagtatataattaatctgagtatcgactaatgagatttcaggcactgacttaccgagtcggccatcactcgacatccgatgattcgaccaagtacaggccagttgatgagattgagcattggcgaacnnnnnngggatc

SEQ ID NO: 494 - DNA, 519 bp, Zea mays
gtgctggtgggcaaatcgcagcgggtgaaaggcgcggaccacgcgctggagagcatccacaacatcagggaagcgctgccggagctgtgggaggaggccgagaaggcggaggacgtgctctaccccgaacgcgttgcgatggagacctcggtcaccgcgtaaaacccctgaatgcctccggtgcaccgtcagccgaactttctcgacatctccaggaccgcatcaacgatcacatgtcactcgctccccgagccagggccggtgatgatctcgcgctggaactgaatccaccagcaatggccgggccgaggatcgatttccgacagcaggaagggtgcagcatgtaaagggggaacagatgagatcatgtttgtttgggttggtcccccgttgtatatgtagttatgtatcagccagtcctttgtttgtaaattaccagtatttagaagtaataagaaaatgggggtttacgtgtacgtttcctgtgctctgtcatctgaagcaataaaactggttagc

SEQ ID NO: 495 - DNA, 519 bp, Zea mays
  misc_feature (301)..(301): n is a, c, g, or t
  misc_feature (332)..(332): n is a, c, g, or t
gtgctggtgggcaaatcgcagcgggtgaaaggcgcggaccacgcgctggagagcatccacaacatcagggaagcgctgccggagctgtgggaggaggccgagaaggcggaggacgtgctctaccccgaacgcgttgcgatggagacctcggtcaccgcgtaaaacccctgaatgcctccggtgcaccgtcagccgaactttctcgacatctccaggaccgcatcaacgatcacatgtcactcgctccccgagccagggccggtgatgatctcgcgctggaactgaatccaccagcaatggncgggccgaggatcgatttccgacagcaggangggtgcagcatgtaaagggggaacagatgagatcatgtttgtttgggttggtcccccgttgtatatgtagttatgtatcagccagtcctttgtttgtaaattaccagtatttagaagtaataagaaaatgggggtttacgtgtacgtttcctgtgctctgtcatctgaagcaataaaactggttagc

SEQ ID NO: 496 - DNA, 457 bp, Zea mays
cttccgttccctagatagttctcatgtgattattatccactgctactgctatatatatggcctactatacagattgatcctgcgctgagcaaagcctacgcgttcctcctcaagagcatttgcccgtcaaacagcggccggttcttccccaacacgacgacgttcatggacctcatcacgccggccaagttcgacaacaagtactacgtcggcctcaccaacaacctgggcctcttcgagtcggacgcggcgctgctgaccaacgcaaccatgaaggcgctggtcgactccttcgtgcgcagcgaggccacgtggaagaccaagttcgccaactccatgctcaagatggggcggatcgaggtgctcacggggacgcagggcgagatcaggcgcaactgcagggtcatcaaccctgctaatgccgccgccgacgtcgtccttgccagtcagccagatt

SEQ ID NO: 497 - DNA, 658 bp, Zea mays
ccgccgccgccaagaaggggtcgcttagggtaagcccatctttttctcggaattgaagacgggtccgttttaatttgatctgcgctggacgaatttagctaatagtctgatcgaattgaatcgtcgtgcagttggatgactgggtgctgtgccggctgtacaacaagaagaacgagtgggagaagatgcagctggggaagaccgccgtcgccggcgtcggcgccaccaaggaggaggcgatggacatggccacctcgcacacgcactcccactcccaatcacactcgcactcgcactcgtggggcgagacgcgcacgccagagtcggagatcgtggacaacgacccgttcccggagctggactcgttcccggcgttccaggacccggcgatgatgatgacggtgcccaaggaggagcaggtggacggctgcagcgccaagagcggcaacctgttcgtggacctcagctacgacgacatccagggcatgtacagcggcctcgacatgctgccgccgcccggggaggacttctactcctcgctcttcgcgtctcccagggtcaaggggaaccagcccgccggagccgccgggttgggacagttctgagctgaggcgaggatggagccatggatcaggagatgaagacggttgcgaactct

SEQ ID NO: 498 - DNA, 336 bp, Zea mays
gaactgactcccaggggagatacccccggggaggtcattgctcccgagcccgcaaagcttcctgccgctacaaagcctttggtcaagctggggtcggaggaaaggtcattggtctctccaggaagatgagacggtccgatgcttccgttctgtatagttccatggttcttgatgtgtacaggttgtagcttctcatggtagcagagtgcaggctaaggttttttacatgtgaagcctgcccacctgtcgtcccgtagtttggctcggttgtactagcaggtagcaataagtggtgctgtggagctatgtcttagggaaatcgtatggtagttgcat

SEQ ID NO: 499 - DNA, 616 bp, Zea mays
ctgataatgagtatctgttttgccttgcacaatgttagttggctatttttctgtgaggtaaattgcctttatgttggaggttgccattcacactgtccatttccggggcatcaggtgccatcatggatagctttgctgtttgtggcattgagctgccatcatcatgggttgctatgttaacaatgcttgtatactgtttaagacaattcaactcttaacttttgtgtttttgtatataagtttaattttcttacctgtatgctcgcaggtacctctgtgcaagtgaatactgaattggaggagaatcttaggtagggaatatagataacaggcgctccatatataaacttcgttattaggtgctgtatggactatggttcacatatttgtaacgtgaacggtaaccgataatgttaaaacatgtttgtttaagtccaaccgtaatcagataccacactagaaactgatatcatcctaaatcattattcttgcaatttaagttagtggagaatctttagcgggcagggctagcaactcacaatgtgaagagtgggcgtagccgaacacctcaagactggtttcatggctgtattacatgccaagtgcttttccgacg

SEQ ID NO: 500 - DNA, 510 bp, Zea mays
ctgcagcccgggacagaggacgcggaggccgtcgcgctcgggctcggcctctccgacttcccctccgccgggaaggcggtgctggacgacgaggactcgttcgtgtggcccgccgcgtcgttcgacatgggcgcgtgctgggccggcgcagggttcgccgacccggaccccgcatgcatcttcctcaacctcccgtgacagccacagacggtcacggcgccgaggcgtacgtcctcctgctttgctctgctctgcgcctgatgatgagtgcaaggaaatggagcgctttgattcttctgctattggttgcatctgctaattgatttagcagtggtggtaaggtacacgcacgacgagctgactgcgtggttcttggcttgggccttagtatatgatgatgatgacgatgatactagttgtatgtgtgacgtgagagacgatcgcgacgacgaccttgaattttagtttctgagatgagaaaggtcaactagtggcctctgtatgacttta

SEQ ID NO: 501 - DNA, 199 bp, Zea mays
ctcaaaagcaccaggttaatcccttctcctaacccaactcacgtaagaacctaagacactaggcctgcgctttacacaaaatgtctagtaatagcagccagattagtgaccaaaaacttcctacaaggctctatcccgtaagtagaggggcgctacccaagggcgcagcagcaatggcggaaactcattttccacagta

SEQ ID NO: 502 - DNA, 1129 bp, Zea mays
ctctgttccttttggtttgcgcactctcccttcatgcaaacttcactgaaatgacaattgcccactaataggaccaatcagatacttcattttactgctttacctttggaatgcaggctgaaactgattctgatgaagtttatgctcaaattatgctgcaaccacaaacagaggtgagtaggttcacgtatataatttcttgtggatctcaatcctctcactgcattattgtccgtttctttgtatgttcagtatagtactgtatctcactcatgatctttcttttttgcaatcaacttttctaactatattgcacagtcagtattacatgtgaatgtgttgacttattttcctaattcactaaattagcaaagtgagcccaccagcccagatcctgaaccacctgagcctgaaagatgcaacattcattccttctgcaagaccttgactgcttcagatacaagtacccatggtggattctctgtcctcaggaggcatgctgaagaatgtttgccccaactggttagcgccataatttataacatacctgggtgcagtatttgagttacggctttttaagcgggatgatttttatctgcaggacatgactcagaatccaccgtggcaagaactagtggctaaagatctccatggaaatgaatggcatttccgtcacatctttcgaggttagtttctgatctcaatgtaccagttaaacctactttttagttccatagtattatagtgttgtttttatagttctgatgtggcgttaattttgaatgaacttagttcccctgattcaaaaacaaatttcctgtgattattttgatcacaaacattgatgctttcataatgatttagattactatgaactcttgaagtatttgctgtttcttttagggcaaccaaggaggcatctacttacaacaggctggagtgtttttgttagctcaaaaagattggttgcgggtgacgcgtttatcttcttgaggtgtgacagaattgcatgttgaagctgtcttgtacatttatggatcaacctgctaactgttcttcatctaacagaggtgagaacggagagctgcgagtcggggtaaggaggctcatgagacaactaaataacatg

SEQ ID NO: 503 - DNA, 423 bp, Zea mays
gtggcggcttctcggtgccgcgctactgcgccgagaccatcttccccaagctcgactaccgggccgacccgccggtgcagacggtgcttgccaaggacgtgcacggggaggtctggaagttccgccacatttaccggggcacgccgcgccggcatttgctcaccacgggatggagcacgttcgtcaaccagaagaagctcgtcgccggggactccatcgtcttcctgcgcactgagcatggcgagctgtgcgtcgggatacggcgtgtcaagcgggtgtcctgtggtggcatggagtgcatgtctgggtggaacgccccggggtatggggccttgtcggcattcttgaaggatgaggagggtaagatgatgaagagtcatggtgggtacatgagaggtagggggaaggtgaagatcacggatg

SEQ ID NO: 504 - DNA, 407 bp, Zea mays
ggggcagatttgtgaatgcttggcaagtccagcgtattgcctacccttctatttgcggcggccttggagatttatgttacccactgccactgatggagtcggaaagccaggtcatggccatgatattggagcagatgccaccgcgtacaagtgcttctcctcccaacaacccgccgcgtccaggtccaggccaaaaagtgaacaccataatgctcttcggcgccacaatccacgttgtgcagagtgataccgacgatgatggttatgaacagctgaatcgagatcctcctcctaatgctgctggtggtggtgatgatatggatcatgacagtgctgaaaatatataaactctgattctgtaatccatccattgcttgaaaatttgcaattgcatcgtgtggaactaa

SEQ ID NO: 505 - DNA, 669 bp, Zea mays
ttttctcaggtcagcaagcatcatgtcaaccgaattttaaccctatagccgttttggttttgcattcatccagacgtaactccttcacttgaattgtttcaggatcctctcagagctagtgataaggtattgactagttgtggtccatacatgatgaaggaagaagatgctatggtgtatagaaggccataccttgtctctggttcctcggggtttgcacttaatgcaataagcaaagctatgaaaaaggaccttaaggtttttctctttatctatctctttgtgttttgttttagttcatatgttctaaattggatgtttttaaggcttatattgaatccatgagaagcatattaagaagcagttcgtggaaaacaaagacaacagtatgctggggcatgagagatcgttggctaagctatgatggggtggaagatttttttggaggcctaaaccagaagattgtagaactgccaatggtttgtcatgaaaacccagctattttcaactttaactcattttcatgactatttatgcatggggtggtgtggtttgtgtagcatgcataaggacatgtggttgtatgcgtgaacgaagaacacattttctggatttatttcttccttttccttcatttgatattatattgtcatatcattttgtgcaatg

SEQ ID NO: 506 - DNA, 876 bp, Zea mays
atttttgccggccctgtctccggtaagacggattccgattccgttgttttcttgccaaatccttcgcagcttgggggcggtttcgctccggttcttgcgcttcggctccaggccatggagcagcggaggtggctcgcggtagccgttttgatgtgcctgctggtgctttgctccgggagaggtgggttgttggcccttctttggtcctcccgtttctcgctgccggaaaggaaaaaaattgtcttttgaatcggtttcccctaccgtttcgtgcaagcggactctgcctgccggttgattttccttagtttatgtattgcacatttcatcagattcttattttacccgtaccttttggattcagaactgaagaccaaacatgtgcccatatatgacccagtgctggcccggacacttgctgaatatacttctgctgtgagttcacctgaccttcttgatgctgtcatcattcacatccacatccacgttggattatgttattgttgaatacgtcctttttctagtgaaatatgctgcattcatcgtggagttgaacttggtgcttttgtgcaggtctatactgctgaccttacccaactgtttacatggacatgtgagagatgttgtgacttaacagaggtattttatatttgtcatcaccatctgacattctataattttaccaatggttttcaaattcacatttggcttggtttgaaatcttcattaaatttatttggtagctcaggggttcgaggtgatagagctgattgttgatgtgaaaaattgcttacaggttactgcttctgccagtgcacctgaaccgttttctttttacctagtaataggcttttgattatattgatgatgatgtgt

SEQ ID NO: 507 - DNA, 519 bp, Zea mays
cgtttggctggacccactcgccgtactggagcgaggagagggagaaggaggttccgaccgccgaggcggtagctggagtgctggactacatcaggagcctggggctgtcggacgaagaccttggcaggctgctgaagaagttccccgaggttcttgggtgcgacctcgacggcgaggtgaggccgaatgtgggcaagctggacagtgactggggaataaacgggaagaccctgcggagccttctgctgaggaaccccaaggttctgggctacaatgttgactgcagaggggattgcatggcccagtgcacccgctgttgggttaggttctgatgatgattggttttgttcttcgtcgccacatcgttggtcaggaacttgggacttggttttgcttgctggccatttttctgtaagctagcacctgtcgaatgtagcacaatcgctagctgctggatattgggttggccactgttagttcttatgtacgtacaacagattcaagagctaaaccatgctg

SEQ ID NO: 508 - DNA, 921 bp, Zea mays
gttttcggtgaagtttgacagttctgatattcctgcgtctggtgatagggcctttggggcttacatagctccagtcaaagggaagacctcaggtaaactaaacagaggcttgccatttcaacttcattgtacaaactgtaattggtaagaccctagtgacctcaggcaaactgaaatactgaatactctctccgttctaaaatagtattcgctttggcttttgatttttatgtctatattcaattggatgatgatgaatgttgacacatatatagaacacatacaccaagtattgtatgaatctaaaggcgaaacgaattttattttgggacggagggagtactccgtaatgtttgcacaaagcaacagctcttatactgaacaatgaccagttagatggttcctttagctgtgtgtgattattttcattgaacattcataacttggcctgccactgttgtcttttgttatcacaattcactgcattgcacaatatgctacacctgtgtactttttctaagctatagtaatgcaaaatcatattccttatttttattcaaaacacgtgtgttttggggtccactcttgtagaaagagttgaagatgttgacctgctgattaggagggcagagagatgcttggaagcaggcgctgatatgatcatgatcgatgctgatgatgtttgccagcgtgctgaatctctgaggacagacatcatcgccaagattgtaggccggctcgggcttgataaaaccatgtttgaagcttccaactccaacacctcggagtggttcgtcagacgttatggcccaagggtacggactcctctccctcttggaaagcctcaagctgactaatgctaataccattgtttctcattgttcatttgatcccgatgctttgacatgtgtcggtctgcaa

SEQ ID NO: 509 - DNA, 554 bp, Zea mays
ggttcgagtcctccgaagtcaagtccaccccgttgcagccctacagcgaggtgttcggcctccagcggttccgcgagtgcgagctcatccacggccgctgggccatgctcgccaccctcggcgccctctccgtcgagtggctcaccggcgtcacctggcaggacgccggcaaggtacgtgaatagctagctattaagctatgcatgcatgaatccatggagttcgttctcgatctgctctcagacgatctaaccaacctgcgaattaatgtgacggccggcgtacacgtacgtgcaggtggagctggtggacgggtcctcctacctgggccagccgctgccgttctccatctcgacgctcatctggatcgaggtgctcgtgatcggctacatcgagttccagcgcaacgccgagctcgacccggagaagaggctgtaccccggcggctcctacttcgacccgctcggcctggcggccgaccctgagaagaaggagcggctgcagctggcggagatcaagcacgcgcggctcgccatggtcgccttcctcggctt

SEQ ID NO: 510 - DNA, 481 bp, Zea mays
gctagcataatatcttcatgttgggataggtaaggctcatttaatttcccccatctatatcatcccactttgtgctagcataatatctccctgtgttgctcgccacactcatgctgaactcccccttttttttcagcgatccgagcaaaaggccgtcgttctcccagctcttgtcccctctaaagcaactacaacatttagttgttacagaaagctgctgacatgcgtttcctgggacaaatctcaggatacatatattcaagtatttaagctctgttacagggctaaaattttcttttttgaagctcgtggaggagtctctgcggtatagatgtgtttgggcgaaggttctgcacatcagtaatcatcaccttgtgaaaatgcgagtctctgaagctgtgcaaaggcgctgctggagaaagcgtagtgtgtagtctcaagtgaagaaaagtggtgcgacacaaagtgttctgtgccatgg

SEQ ID NO: 511 - DNA, 337 bp, Zea mays
tcccctactggatccgcatgcgcactgacaataccatcaggtgacggccgcgacctcactatctcctgctcgtctggtctggattcggccgtcgctgaccccgccgctccattccgtgccgtttcaggtacaacgccaagcgcaggcactggcgccgcaccaagctcggcttctgagcgtcgggattggccggctgctgcgtcggaaggctagggtctaagagctatcttccttctgttttatcaatgtgtcagtttttctgtaagctagcaagtgttgctatgacgcttttattaagattctggtgagcggtgatgttaagagaaaattggcacta

SEQ ID NO: 512 - DNA, 411 bp, Zea mays
ttggtggttcgtcgatgccatgtttgctgtggagacccagcttctggacagcatgaacaaaagcaaggagcatggcttcctcggcttcaggaacactgtcagctctttcaacacatggatcgagaagctgaaggtcttcaagattgttccctaataataattcatccttgctattcacttctatactgttgttctgcatccttattatcctgctcatttatcagcaccagttctcttgtaatttagttccatttcaaacatcttgctatctgtgccaggtttgcatgttatatactagggacaaataaagatcaacacattgcaaaataggttattcttgtccagcatgggtttgattgaaattgtttgtgtattgaattactagctgaaaccgttcttgtttacgagcat

SEQ ID NO: 513 - DNA, 522 bp, Zea mays
gcaggggaagggggaggaggacgaagcgaagcggcgcgcgcggcaggtacgcaaccgcgagagcgcgcacctgtcgcggcagaggaagaagcagtacgtggaggagttagagggtaaggtgaaggccatgcaggccaccatcgccgacctctccgccaggatctcctgcgtcaccgccgagaacgccgctctcaaacagcagctgggtggcgctgctggggccgcgccgccgccgatgccgatgtaccccacgatgtattctttgccgatgccgtggatgcacccatcgtatcccatgcgtggatcgcaggtgccgctcgtgccaattcctcggctgaaacccccgcagcctgcacctgctgtagcagagccaccggccaagaaggctaggaagaccaagaaggttgcaagtgttagtctcctggggttgatttgcgttgcaatgctttgtgggtgtttgattcctgcagtaaatcggatgtatgactctgttgatgctggagaaggtgctgcatacggtcc

SEQ ID NO: 514 - DNA, 307 bp, Zea mays
  misc_feature (270)..(270): n is a, c, g, or t
  misc_feature (282)..(282): n is a, c, g, or t
  misc_feature (300)..(302): n is a, c, g, or t
agtgcagattggtggagctagtgaagctgaagttggtgagaaaaaagatagggtgacagatgctctaaatgctgcaagggctgctgtggaggagggcattgtgccaggttcaaattttttctcgagggatcatctccatcagatctcctatatcatctcctatatgtattatttttaggagatctcctaaaaccagccccctctcccctaaataaaggagagaaccccttctcctctatccctatagaaatatgagacaaattttagggnaatctgctgcancagcgctctcttataacnnnttata

SEQ ID NO: 515 - DNA, 784 bp, Zea mays
aggaaagtcacgatacatcagactacaacaaccctcatagcagatgcagccagtaaagatgagatccaggcgaggattgcacaactgaagaaggagcttgctgagactgattcagtttatgatactgagaaattggccgagagaattgctaagcttgccggtggtgttgctgttatcaaggttggagctgcaactgagactgagcttgaggaccgccaactaagaattgaggatgcaaaaaatgccacttttgcagctatagaggagggcattgttccaggaggtggtgcggcatatgtgcacctatctacggttgtccctaagatcaaagaagcaattgaggaccctgatgagcgtcttggcgctgatattattcaaaaggtaacttggctagcatatttataaactgatcagtgcctatgcagttagatggtatgaactgtatttgccagaggtccaatgttgttaatatgtttatttgtgctggtaaatgtgactaggatccatcatctattatgtgcgacactaagttcatgagtagacctataccgtcgtagtgtgtgttgctggcattggaattttttagacaattcagactagttcttgtcacagtagacacatatactggatcctttagagcaataaatcacgtttttacattatcttctctacttgtgcaggcgttggtagcacctgcttcattgattgcacacaatgctggagtagagggtgaagtggtagtcgagaagatcaaggagagcgattgggaggtgggctacaatgc

SEQ ID NO: 516 - DNA, 368 bp, Zea mays
  misc_feature (357)..(357): n is a, c, g, or t
ttgacagatcagggaactgtagcctttgtgagattaggcccaaagatatcctgatcagtgaaacacctaatttttctgccattgttccttttgcagcatcatatccatttgagatatggattattcctcgacaacatatttcttattttcatgaaatagatcaagataaggtatggagtgtttttaaatcagctagatatttcattttttactgaccaatagtccaatagtggtttagacttgtgtatacgaatatcactacatgttttgaagttcaaacttcccttcatattttctcttgtcgtacctttttcgagttcctgttaggttattgataaacttctgtgccaatagttnaatgcatctgc

SEQ ID NO: 517 - DNA, 262 bp, Zea mays
  misc_feature (250)..(257): n is a, c, g, or t
cgcggggctgagagggtcagggttggttagcagcagcagtaccggcttgttcgccggcgactgcaagaggaaggctcgtcgcccggcgtgctcggcctgggccctcaggcagagccggatcggcagcaggagcaggatcaggagcaagaggggcctcggcatcgtctgcaacctcgcgggacagtacgaggattccttcgacgacgtccagcgggtacgtcaaaaccaaactagtttcatgtcagcagtnnnnnnnncttgt

SEQ ID NO: 518 - DNA, 751 bp, Zea mays
  misc_feature (697)..(697): n is a, c, g, or t
  misc_feature (699)..(699): n is a, c, g, or t
tgctcttcgacggtgccaccctccctttccggttccgtccgcgtcttgcgaaatcaaaactcctaacctgccagctgccgtgctctgtgcttgcaggcgtctgcaacctctgcaacggcggcgtccgcttcgtgcgggagcacgaccccaacaggtatagccgcgctgctcaatcctcagtcaaagcaacagcgattcagccgctgaaaggttcttcccatgggttcgcaactccaacaggagcatcaggtacgtgccgctgcagagcgagtccgggaggaagctcctgcagaggtcagggaggtcccctgacgacatctccagcgttgttctcgtcgagaaagacaggtgccccaaccataagctcccttccttcaagaactgttgaatgctagtagctagtactagtgtactacagattgctagcttatgtatgacgatgatgataaggtgctcgtcttacgatgagtcttgcaggtctttcatcaagtctgaagcggtgctgaggataatggagtacctcaacctgcccttcccgcagctcgccgtcttcctcaagttcgtccctctgtaagctagctccctcctctgctgtccagcttaattaatgcactttttttttatgattcgcacaatcagttaatcagtttttcaacgaaatgcaactcctccctactgattctgttgcggcggttangntcctgagggacttcgcgtacgacaacgttgcgaacaacaggtacgccatgtt

SEQ ID NO: 519 - DNA, 548 bp, Zea mays
cgcggcgagggagccaagaggcgcctgcgcagcctcgtccagcgcggggaaatcgacgaagcgctcgtgctcttcgattccatggcctccggcggcggcaggaactgcccgcccgttgtcccctgcaacatcctcatcaagcggctgtgctcggacggccgcgtctccgacgcggagcgcgtgttcgcggcgctcggcccctccgccaccgtcgtcacctacaacaccatggtaaacgggtactgccgcgccggccggatcgaggacgcgcgccgcctcatcaacggcatgccgttcccgccggacacgttcacgttcaacccgctcatccgcgcgctctgcgtccgcgggcgcatccctgacgccctggcggtgttcgacgacatgctccaccggggatgctccccgagcgtcgtcacctacagcatcctcctggacgccacctgcaaggagagcggctacaggcaggccatggcgctcctcgacgagatgcgcgccaagggctgcgagccggacattgtcacgtacaatgtcctcatcaatgccat

SEQ ID NO: 520 - DNA, 513 bp, Zea mays
tttgaagctttttgggaagacagttatcatcccagacccaaagaaagtctgttcctcggatgggggagctggagatgatacacaagaagtgatgcaaacatcctgggttggaggaggggtggcagcataccctgcccataacggatggtttcttccgttccattctttccctgctcatatgtatgagtcgggggatgctaggatttcccctcttcatatgtggtggccttactacggttttccggccggccatccaagagggtttggcacagggctgcttaacgaaggcaccattgagagtgatgccgacaatagcccatcggttgaaactaattctgatcgcacgggcaatgttcatgttcagacgacgacccctaccattcacaacaatgctgtcaaggagtcagttgggccagttgagatgccagagtcgggtcctagcgttgagctgaaacccagcgcgaactcggcctttgtaagagtgaagccgagcagcagcgtcagcggagacca

SEQ ID NO: 521 - DNA, 508 bp, Zea mays
agcaaggtgtaccgcggccagctcggcgatggcagagtcgttgccgtgaagaagcttaggccgctaggaggcacggacgaagacttggagttcctgtcagaggtacgcgaactagactgccaaagcagcagccttgcgaatggcagggcagcaccagccattgcggttcctcttttcatctctgcgacaacgtgtgctggatgatattatgcgtagatcgagctgctgtcgaggctgaaccactgccacgtggtgccgttgctggggtactgctcggagagccagggccggcagctggagcggctgctggtgttcgagtgcatggccaacggcaacctgagggactgcctagacctgaagcgagggaggaagcccatggactggcagacgcgggtgagcgtcgcgctcggcgccgcgagggggctggagtacctgcacgaggcggcggcgccgcgcatcctccaccgcgacatcaagtccaccaacatcctcctggacgacaagttca

SEQ ID NO: 522 - DNA, 361 bp, Zea mays
cccgatgggaaggagaccatcaccgacgtgaaagcgcgggtgtcggacctggagaaggagtgcaagagcatgaagcaggagatccggcggctcgggaagccccggcggtcctggagcctcctcacaaggaagtgcggttttggggccaaggtgcaacaagcgcagactgccatgagcggcaaatagattattttcccacttcatttgtttattttaggcaggagcctcgatttcattccctaaggagtcttatcatctgtttgctacagtaacagttcctaatctagccatagctcctagtgttatgcaataattacgtgcggatggtttgcaactttgcacgggatgataataaacgtaa

SEQ ID NO: 523 - DNA, 971 bp, Zea mays
ctgctgcatgcttccggttattgcactgcatatgcctctctgctgcacgagagtgcaaaaatctaacagagcctcgttccctttaatttgcttcctctccagggtttgcaggacaagatggagctggtggccatcgatctgcaggacaaaccggcttggtacaaggacaaggtttacgcacagggcacggtactgtttctcggatgttcctgtctagctagctaccactaccaccctgagcatctccgtgaacactgcactactgtttctcggcagcaggtgccttccctggagcacgacagcgaggtcaggggcgagagcttggacctgatcaggtacatcgacagcaactttgacggccccgcgctgctcccagaggtacggtacctaccccaccataccgcctgcagtcagtgcagctagctagcgtaacacttgcagagcagcagactgaggatgtgctggttttcctgcaggatgctgcgaagaggcagtttgctgacgaactgttcgcgtctgccaacgcgttcaccaaagccctctactcgccgttgctgtcccacgcggccgtgtcagacgaagttggtaagaagaccgttggccattgcttagacagaaaggattgcgatttgggatcattggcacagttgctgacatagctcgaactcgacgtttcttcttcgccagttgcggctctggataaactcgaagctgacctatccaagttcgacgacgggcccttcttcctaggccaattcagcttggtacctcgctgcattcttcccggcctgaaacgtggtttgatcgcccaagatattttttttactctttctaataacaatatgctcgaccccccttttcaggcggatgtagcgtacgttacgattctggaaagggttcagatatactattcccatcttaggaactacgacatcgcccaaggcaggtccaacctacaggaatcatcgacg

SEQ ID NO: 524 - DNA, 202 bp, Zea mays
gccgcccagctaaaaatcccccaggcgttcctgagcacccgtttatcatcacatgaccggagtcggccagaatttgccgtagctctcgcccccgctcgccgtgcgcttctcgtcccattcccccgggatcgtagattctcgagctgagctgagctgagctgagctgagcgatggatcgcgagctcagccccaggggcaatgc

SEQ ID NO: 525 - DNA, 491 bp, Zea mays
agacgcgctgtttcagctacagatacagccagtaagtgtatagctagtagctgtagtgacatgcatgttccttttcatgcaacaacaatcatgtattctctgcagcactctcaactcagcccttcttttttccttgctgtatttttcagtcaagcgagagcatagatgcagcaataggtgatgtcttaacgaagccgtggctgccgctgcccctcggactgaagcccccttcggtagacagtgtcatgggcgagctgcagaggcaaggcgtagcgaatgtgccgcaagcttgtggatgatccccggggctgcatagctgctagctcgtccctgcacgcagtgcaacaaaaggaatttgtcgacatgccttttatgttttgaattcccgtgaaccgtttatggagcactctcaactcgttcagggtcagatgaacagaacattataggagtacattctttgaggtttcaggtttgagggaaatcaacctgag

SEQ ID NO: 526 - DNA, 912 bp, Zea mays
ccattggcacacatgatgtttgccggggctgacttcattatcgtcccgagcaggtttgagccatgtggtctcattcagctgcaagggatgagatatggagtggtgagacttcctagctccgctttgttacagcagttcagattttttgttacagttcagatttgagtgcgcgtaggataaatattagcagccattttttttcctcatcatgtcacatcttgattcctgtaaagcgttagaaaataccacgtagttaagcagcagacaaagtgcaaaagaaaaagaatgaccatcgaagctgcaaatatatatatattttttggcagattcccatctgttcatccactggaggacttgtcgacacggttgaggagggtgtcaccggattccacatgggttctttcaatgtcgaggtaaagaacaacacggactcattgttctcacgctcaataaatgaaaatagcctttggttaatcttctcctccatttttttagtgtgaaactgtagacccagccgacgtgacagcagtagcgtcagccgtcacgcgagccctgaagcagtacgacaccccggcattccatgagatggttcagaactgcatggcgcaagacctgtcctggaaggtacgtataggcacatgtgtatatatatgccagccaagctctccgtttatcgttggcatgcagctaggtaactctttgtcaagataataaggatcaccgacccctctcgtctctggtctaggggcctgcgaagaagtgggaggaggtgcttctgggccttggagtcgaggggagtcgagctggtatcgacgacgcagaggagatcgccccacttgccaaggaaaacgtagccactccgtgagggcttggtggtgcctcggactcggaaacacgcgttggtgataggaa

SEQ ID NO: 527 - DNA, 920 bp, Zea mays
gccgctcgtcttatttgcactgcgctactttgcacgatagccttggcacttctttcgcagcatatatcaacacttaaatttcaatttggccaatatagagttatacaattccggcagttacgtatccaaatttgtctgcaggttcagttattatgttcagaatctaaatctgctggttctctctttcaggtctagcttgaaatctgggtgtgtaaaatctgaacccgcagtggaataacctgaagctgaaacctattacgcaggttggcgcctgggcagctgaagcccgtggatgggctgcaggagctgtgcggatggatggaaggccgcgacctgaagcgcgcggcggtgacgaacgccccgagggcgaacgccgagctgatgctgtcgctgttgggcctcaccgacttcttcccggtgctcgtcatcgggagcgagtgcgaccgggccaagccgttccctgacccgtacctcaaggcgctccagctcatcggcgcatcgcctcaacacaccttcatatttgaagtacggatgaagctctctctctctcgctcacacacacacaccgtaattcagtgaagaagctttgttgtttgtttcatcgtcactagtcgaaacagtcagtaaccaacggtaatgctgtctgtgcgtgttcgtgcatctcgttctgccgcaggactctgcatcgggggtccgggccggtgtggctgccggagtgcccgtggttggcctgacgacgaggaaccccgggaaggtgctgaaagacgcaggggccagcttgctggtcaaggattttcaggacccggagctgctgtccgtgcttcaacaggtggaggtcgaacccgcagcggagaatgcacaaggctgatgggtcgggcattgcggaaaatgtcatgctggacagactagccatcagcgat

SEQ ID NO: 528 - DNA, 387 bp, Zea mays
ccacagcaaaataacattgagccatctactgctcctaagctagggtataacatttattctctctatatatttcaattggttaactagtgttgaccagtgctataatgagttgctaaacacatgcagattgcaattaattccatgaagaagagtaaaactgccgtcttatgatgctgaaggaaactatttattgtgaagagatgatactcagagaaagacatatttgtggcagggagatttgagatatgaacttataaatgtaatgcaaataattttcagaccggaatggggtcgtggaattcagaggatgattgctttctagttgcatttgatgtttgatgagacttttctcatgtgaaacgtttattaaaacttcaaaatggtgca

SEQ ID NO: 529 - DNA, 754 bp, Zea mays
tatgatgaactcactcatcactagtcacatcgccaacaacacctacacaaacaaccagcatgttgtggcaagtcgtagtgccattgtgaaccacaataactttgggatgccaacggaggtcgttccacccgtggacaacatggacatgatgcaaggctatctaatggatgatacggatgccatgaggcttgttcagggacaacaacatatgccaaatgttgttcctaatcaaaggaggcatgcagtgaagttttggactacagatgagcacaggtctttaattaatttttgcattattcatttggaatctttgtcacatatatacatcttcgttcagtgttattaattttcagtacatttaataagcatgtggtagtattcataatttcataccatgagatgctgagatttgattttcactgatcattagagtatatatatatatatataggacatcgtctatttttatctgattattatattaatcttgcttacgtactatatatatataggaatttccttcgtggtctagaagtgtttggccgtggtaaatggaagaacatctccaagtacttcgtccccacaaggacaccagtgcagatctctagccatgcacagaagtatttccgcaggcaggagtgcaccacagagaaacaacgctttagcatcaacgatgttggcctctacgacacacagccatgggtgcggcagaacaactcctctagcagctgggaggcgctcaccttcactgctg

SEQ ID NO: 530 - DNA, 757 bp, Zea mays
  misc_feature (21)..(21): n is a, c, g, or t
  misc_feature (118)..(118): n is a, c, g, or t
  misc_feature (375)..(376): n is a, c, g, or t
  misc_feature (378)..(378): n is a, c, g, or t
  misc_feature (384)..(384): n is a, c, g, or t
  misc_feature (441)..(442): n is a, c, g, or t
  misc_feature (445)..(453): n is a, c, g, or t
  misc_feature (461)..(463): n is a, c, g, or t
  misc_feature (511)..(514): n is a, c, g, or t
tatgatgaactcactcatcantagtcacatcgccaacaacacctacacaaacaacaaccagcatgttgtggcaagtcgtagtgccattgtgaaccacaataactttgggatgccaacngaggtcgttccacccgtggacaacatggacatgatgcaaggctatctaatggatgatacggatgccatgaggcttgttcagggacaacaacatatgccaaatgttgttcctaatcaaaggaggcatgcagtgaagttttggactacagatgagcacaggtctttaattaatttttgcattattcatttggaatctttgtcacatatatacatcttcgttcagtgttattaattttcagtacatttaataagcatgtnntngtattnataatttcataccatgagatgctgagatttgattttcactgatcattagagtatatnnatnnnnnnnnnggacatcnnntatttttatctgattattatattaatcttgcttacgtactatatatannnnggaatttccttcgtggtctagaagtgtttggccgtggtaaatggaagaacatctccaagtacttcgtccccacaaggacaccagtgcagatctctagccatgcacagaagtatttccgcaggcaggagtgcaccacagagaaacaacgctttagcatcaacgatgttggcctctacgacacacagccatgggtgcggcagaacaactcctctagcagctgggaggcgctcaccttcactgctg

SEQ ID NO: 531 - DNA, 926 bp, Zea mays
  misc_feature (918)..(922): n is a, c, g, or t
cattgcataattctggatgatgttgaaattatggttggttttctgtacctttgtaccaagtgataaaaccttgtttaggaacatgaatatctcattgttgttttctttcgtttctgtttgtgtatcaggaaaatgctgttgttatatattcaatcgtagggtggaaatcatccattggaaaatggtcacgtgtacaggcaagctttcctctttaccatttcatttttattcatttcaaaattaatgaatcctcaatcctcattatgtatgaagcttaaaaagcttgtcttaggattctttctcaagttcaattcaagaagcatgactgcatgagcattgtcctagtgttacaatgatcattctctctgccaagattatgcttctgaaatctgaacagttcagtgcacctagttttcttgaatcgatgtttgatagttccaaccgcaaagctaataaattccacgttgaacattggatgcaaatagtttagttacaacatttgaaatcggtgcgactatgcatgcctgtatgatctactcttttcctgagcacatcagctggcttcatttaatggaagttttgttctgaattcagggcgaaggtgatcacaatgccaaacttggcattactattcttggtaagacccaaattgatgatttacaacagtattccaaataattttgtgataatttcgtttctggaattgacatcctattttaacacaggtgaagccgttgatgttgaagatgaagtagttgtagttaacagcatcgtgctcccaaataaaactctcaatgtcagtgtccaagaggagatcatcctataataaccatcgttttttttgtctaattccatataaggtctgagtaccaatcacatagtttaagtttattcgttctcaccatgtaatgtaacctnnnnnttag

SEQ ID NO: 532 - DNA, 262 bp, Zea mays
tcgactcgctcgtgcgcctctacggcaccaacgccgacgccttctcgtcggacttcgccgcgtccatggtcaggctcggcaacatcggcccgctcacgggttccgcgggggaggtcaggctcaactgcaggacggtgaattcgaattcgtgacttcaggacggtgaatgccaccattttgaattggtactgctctttttcccccacaaggagttgtagaatttgcattccttcaacgatttcgaatttcgaatttgctgtga

SEQ ID NO: 533 - DNA, 356 bp, Zea mays
ctcttcacctccgacgccgcgctcctcacgtcgccggagacggccaagttggtgctggacaacgccaagatccccgggtggtgggaggacaagttcgagaaggccatggtcaagatggccagcctcgaagtcaagactgggcaccaaggacaggtcaggaagaactgcagggcgatcaatcactactagctaacagagctggttgttgatcagcttgcaccactgcaatgtggaagaccttcagaaaaagaaaaactgcacagtacgggtgatggatggtgaaggatcaatcggttcagttgtgttggtgtttaatttgttcatgacctgcaagcgtgtggttgttgtatgatatg

SEQ ID NO: 534 - DNA, 1191 bp, Zea mays
  misc_feature (1137)..(1137): n is a, c, g, or t
actttggtgagggagttggattcagtggcgggtctgtggaggtacactcttcggtataagcaggctcgattgcggaataccattgcgatggactcctgatcttgttttctgcctgtttattttttgctcattggataggtgctggcagctacccaaacagctggggaatccggaaagaaatggttccagggaacagcagatgctgtcaggcagttcctctggctttttgaggttcttcctgggccatgtgtaatactctacctttcagagtatgctatcactatgtcgaattaaccttttacctgatgttattctgtgaaggatgcaagactcaaatgtatagaaaacatactgattctgtctggtgatcatctgtatcggatggattacatggattttgtgcaggtctcctatctgctgcaagttgatgttgtaatttcaagtttcagtcttatttttcattgcttgacaaaggtatattataatattgttttgcagaagcatgttgactctggtgctgatatttcagttgcgtgtgttccaatggatgaaaggtcatccagctttgtcccttttaaatttgttccttgctttttcttggtaattaaactagtattcagttggctaacaaagcaatatgccaatatgatgatatcttagctacctatactgtatgcactgtttattcagtagtgcatatttgtttatgactatcatcaatgttcatgctggaaagcttcggatatctcatgctttgcattttataagaactagaatcactttgtttactgttgtcatatcccacgctaacatattcctatcttcttattttgtttttttatctcatatatacatgcagtcgggcatctgattttggattgatgaaggccgacaggaatgggcacatcactgatttccttgaaaagcccaagggtgcagatttggaatcaatggtatggtacaccccctctcactgaccccaaagatgaacaactacttaatgatttattcagacaagtatagattgactgcatattgcctttcttttgcataattagtatttttgtcatgggcttccttttatgttgcatcatcttctaaattatttgagttgaatcctatgtctccctaacttcntttcaaatgctatccttggatttatttactttgtggaaagatttttaaatactc

SEQ ID NO: 535 - DNA, 480 bp, Zea mays
gttcgtgccgcgcgcggtgctcatggaccttgagcccggcaccatggacgccgtccgcacgagcccctacggccagatcttccgcccagacaacttcgtcttcggccagtccggcgccggcaacaactgggccaaggggcactacaccgagggggcggagctcatcgactccgtccttgacgtcgtccgtaaggaggccgagaactgcgactgcctccagggtatcgatctctcatcatctgaattgaatcccatcatccattgtttcggaatttctgttgcgttgtctgtctcacatgatctgttcgtgccatcaggttttcaggtctgccactcgctcggcggtggcacggggtctggcatgggtaccctgctcatttctaagattagagaggagtacccggatcgaatgatgatgacgttctccgtcttcccatcccccaaggtgtcggacacggtggtcgaaccctataacgccac

SEQ ID NO: 536 - DNA, 891 bp, Zea mays
ggaagagtacccagataggatgatgctgacgttctcagtttttccatcacccaaggtgtctgatactgtggtagaaccttacaatgccacgctctcagttcatcaacttgttgagaatgctgatgagtgtatggtcctcgacaacgaagctctctacgacatctgcttccgcactctgaagcttgctacacccacttgtaagtttgcattgctacttttgctcagttactgcaaccacagcttcagtatcaatccataatttatttcatactgtatagtattgtggtagtcatcttcgtttgaagtgctgtgacacaaaactttctttgatgtcttgtgatgctgcattgaattacattatatggtccttgtctgtcatagatgcatatttattgcaatcatgtgctacttgattgaattaatttgtatgtcaggcacatgcatctcacaagcattttgtcaccatactatctgttctaaggtttgctttgtgctcctactgtcctgagatgaccatttcatgattccctgccttatttcttgcatttgtttctgccattaagatatgaatctgaatgttgccatttttatgctgttccagtcggtgacctgaaccatctcatctctgcaaccatgagtggtgttacctgctgcctgcggttcccaggccagctgaactcggacctccggaagcttgcggtcaacctgatccccttcccccgcctccatttcttcatggtcggcttcgcgccgctgacgtcaagggggtcccagcagtaccgcgccctgaccgtcccggagctgacccagcagatgtgggacgcgaagaacatgatgtgcgcggctgacccgcggcacgggcgctacctgacggcgtcggccatgttccgc

SEQ ID NO: 537 - DNA, 351 bp, Zea mays
caagtccagcgtgtgcgacatcccgcccgtcgggctgcccatggcctccaccttcgtgggcaactccacctccatccaggagatgttccgccgcgtgagcgagcagttcacggccatgttccggcgcaaggctttcttgcactggtacaccagcgagggcatggacgagatggagttcacagaggccgagagcaacatgaacgacctcgttgccgagtaccagcagtaccaggacgccaccgccgaggagtacgaagaggaagagcacgacggcgaggaggagcacgcctgatctggacgccaactcatcggtgcaaagcgtttcagtttcatcgctcctatggtacacaa

SEQ ID NO: 538 - DNA, 1100 bp, Zea mays
gtccgtcggcgcggaggtcgtcaacggcctcttcctaaggtatatagcagctagattttacaggaacgcaagtgaatgctgtcattcatactcatgcactgatgctggcagcaataaaactgcattctgcttgtaccacctactctactagtacaagttcattttagtacaagttcatagtggaaaaacatttgaccttaatttgtgcatgcatgtcagtttagatagcttgtgcgtgcgtgttaaggctctcaattctagtagtactgtcacaatttgaaattgaattccattcatgtgtgaatttgacaacttaccagtactagaattgaattcgattccattgcttaattgatatgtgaattaaatggaatttgattcaaaacgaatcgaatgggtcaaaagtgcacatggaaaaaaatggatctgcatgcatgcttcaaaagccaactctgaaatcttgaatgccagttgctgtgcaagtgaaggcgcggtgtttgatgtacctgattgttttgctcaggtacgaggcgcccaaagagccgaacggctcgtacgtggtgcactacaaccactacgacggcagcaacggcaaggtcggcggcgagaagcggtcgttcgaggtggacgcgatcgtgggcgcggacggcgccaactctcgcgtggccaaggacatgggcgcgggcgactacgagtacgccatcgcgttccaggagcgcgtcaagatccccgacgacaagatggtgtactacgaggagcgcgcggagatgtacgtcggcgacgacgtctctcccgacttctacggctgggtgttccccaagtgcgaccacgtcgccgtcggcaccggcaccgtcacgcacaaggccgacatcaagaagtttcaggccgccacgcgcctccgcgccaaggacaagattgagggcggcaagatcatccgcgtcgaggcgcaccccatccccgagcaccccaggcctaagaggtacctggtggctttctcttctctcggtgcaagaatataatgtcggttgctggatcatgtattcatgtatgtatgcctgatctgactaattggccaacaaataaaataaaaataaaatgca

SEQ ID NO: 539 - DNA, 762 bp, Zea mays
  misc_feature (655)..(655): n is a, c, g, or t
  misc_feature (664)..(668): n is a, c, g, or t
  misc_feature (685)..(686): n is a, c, g, or t
  misc_feature (752)..(757): n is a, c, g, or t
gatttcggctgccgcgttggtttaacacaaaccacgcgtccatgcctgccgcttccgcaggctccatgccactgccacctgggtggcgttttctttccgggggcacatcacacatggcgtccgtccgcgtaggcacagaaggcttctcctggagttcagtggctattccctactaactgctaacttttcgctcggtggcagcagcttctggatcgggccatcggggtcggtggatctcactgttttcttttcctgctgcttgctgcatttttcgcagggtgtgggagctgagttgggaggaggactgctgctgcagccatgaaggccctcattctcgtcggaggcttcggcacccgcctgcgcccgctcacgctcagcgtccccaagccgctcgtggatttcggcaacaagcccatgatcctgcaccaggtcagcgcgattcctccgtctctgggacaaagttcagttctttgtttttagtcattagatacagcgcagggcgaaccggggaagttcatattcagctgtaggaattgcctatggtttcctgttgctgaattgatactgtatttggttgttctttcttggactgaatttactgaatgaatgctgtgatacccacccagatcgaggctctgaaggaagttggtgttanagaggttgnnnnngccatcaattaccagcnngaggtaacataacaggcccgtctctgtctgtctgtctgtctccatcagcaagcaagaagcaagcgnnnnnnaacct

SEQ ID NO: 540 - DNA, 350 bp, Zea mays
ggactacattactggcttgcgtctttatctagactcgattaggaagaaatcagctgccaagctagctgctggagcacatgttgttggcaatgtgctggtgcatgagagcgccaagattggagaaggttgcctgatcggtcctgatgtcgccattggacctgggtgtgttgtggaggacggcgtgaggctttcccgctgcactgtcatgcgcggcgtgcgtatcaagaagcatgcttgcatctcaaacagcattatcgggtggcactcaactgttggacaatgggcacggatagagaatatgactatcctgggggaggatgttcatgtgtgtgacgaggtatacagcaatg

SEQ ID NO: 541 - DNA, 900 bp, Zea mays
ttccccaggtacatgggctatgtacttcccatttcatatgcatattgcagatttaaacttcacattgacataatgttttatatttttgttggatcatcatggatgatatgcagaataggcagactgttcttttttctgctacacaaactccagaggttagtagatcttttatgctgcttgtagtcaacttttcattcatgatttatataatttgctcttatgcggtgatgccccacaggttgaaaaatttgctaaactgtcatttgagaaaaatgaagaaagtaaaaaaaaacctgtttatgttggagttgatgatgataagtcaaaggtaaggaattggtttacctggttattcaactgtccttccaagagtcttctgtagaaaaaaaataactatggtgctttgtcaggctactgttgaaggcctgcagcagggttattgtgtcatttctagcgataaaaggttcttggttctgtatgctttcctaagaaagaagcggaataagaagataatggtgttcttctcatcatgtaattcagtaaagttccacgctgaacttctgaatttccttgggatagagtgttctgatatccatggaaaacagaagcaacagaagcgaactactacattctttagcttttgcaaggcagaaaagggcatcttattgtgcactaatgtggctgcccgtggacttgatattcctgacgtggtgagattttgacttcttattttttaacgctaaacttaattcttgttcacggctaacagaagcatctggtttcttctttaggattatatcttgcaatatgaccctccagatgaaccaaaggttggtgattctaaacagagcctgtgaaattttctacacagtgcttgctataattattatttgcaatttc

SEQ ID NO: 542 - DNA, 348 bp, Zea mays
tcgtgcgcggcacctacaagggccgtgagggcaaagtggtgcaggtgtaccgccgtcgctgggtcatccacgttgagcggatcacccgcgagaaggtgaacggctccaccgtgaacgtgggcatccacccttccaaggtcatggttacaaagctgaagcttgacaaggaccgcaaggcgctcctcgaccgcaaggcccggggccgcgccgccgacaaggctaagggcaagtttactgccgacgacgtcgccgccgctgctggtggcgccgccgccactggcgcgtctctccaggagatcgactaggcgcttcgcggggatctgatggtggtcctaccgcctattactc

SEQ ID NO: 543 - DNA, 921 bp, Zea mays
gatgcgctcgtgaggctgaggtgtacccatcttctcagttttttatattttttcaacaaggtgttctgttacctgtgtggatgtgctaatgatcaatacttgttcagcggaattactgcagagggccaaggtgtgaaggttgaatcctcagcagttccttcagccccaactccagatgttgctgaagcacaggtaaactcaaccaatgatttggctgattgtgcagattccttatgatttttggctgaaaattgtcagttgctttacaagctcacatccacatagttattttgtgctgatcgctgacttgaatcattattggtcactgaagttactatcaaccgtatggttcaaatatcagaaaaatgaaacttgtacagttgtacactacttgagttacatagtttggtaactgaagtccattttctaataaccacaggccccagctgctgaggaggaggacgatgatgatgttgacctttttggtgaggagaccgaagatgagaagaaggctgctgaagagcgtgctgcagctgccaaggcttctggcaagaagaaagaatgtatgtcagtgtgcatattttttctgtttcattctctcatcacactgtgttgacatgtgctgacactaatctataatgacacccttggaccgctatatcattttttgaagctctgtttgatatccaaaaacttgtgatttcatcaatcttctttccatacattgtcagctgggaagtcatcagttttacttgatgtgaagccatgggacgatgagactgacatggccaagctcgaggaagctgttaggagtgtccagatggaagggctgctctggggcgcatgtatgttacctcagttttccgcgcattaatttagtcattcatgaacttgttttttttaccatttagtatggtttct

SEQ ID NO: 544 - DNA, 497 bp, Zea mays
ttacccgcaagttcatgaacaagccagtgagaatcctcgtgaagagagatgagctgacccttgagggtatcaagcagttctatgtgaatgtggataaggaagactggaagctggacacactgtgtgacctgtacgagacccttgccatcacccagagtgtcatctttgtcaacacccgccgcaaggtggactggctcactgacaagatgaggagcagggaccacactgtttctgccactcatggtgacatggaccagaacactagagacatcatcatgagggaattccggtctggctcctcccgtgtgctcatcaccaccgacctgcttgctcgtggtattgatgttcagcaggtgtccctggtcatcaactatgatctccccacccagccagagaattacctgcatcgcattggtcgtagtggtcgtttcggtaggaagggtgttgccatcaactttgtgacccgcgacgacgagcggatgctgttcgacatccag

SEQ ID NO: 545 - DNA, 540 bp, Zea mays
ttgctactggtatgaaggttcggatcatgggtcccaactatgtccccgggcagaagaaggatctgtatgtcaagagtgtccagcgtactgttatctggatgggaaagaagcaagagtcggttgaggatgttccgtgtggtaacactgttgctatggttggtctggatcagttcatcacgaagaatgctacactcactaatgagaaggagactgacgcttgcccaatcagagcaatgaagttctccgtctctcctgttgtgcgtgttgctgttcagtgcaaggttgcctctgaccttcccaagctagtcgaaggtttgaagcgtctagcaaagtccgatcctatggttctctgtacaatggaagaatctggtgagcatatcattgctggagctggtgagcttcatcttgagatttgcctgaaggatctgcaggaggacttcatgggtggtgctgaaattattgtttccccacccgtcgtctccttccgtgaaacggttcttgagaagtcctgccgtactgtcatgagcaagtctcccaaca

SEQ ID NO: 546 - DNA, 361 bp, Zea mays
gcaatacttgtggtggcaccggtgaattctccactccttgcaacacctgtgggggtgatggccgggtgcgaaggacaaagaggatcagcctaaaggttcctgctggagtggattctggaagcaggctgagggtccgatctgagggtaatgctggccggcgaggaggccctcctggggacctttatgtcttcattgatgttctctctgatcctgttcttaagcgagatgggacaaacattctctacacatgcaaggtttcttacattgatgcaatccttgggacaaccgtcaaagtccccactgttgatggaacggttgaccttaagataccctcagggactcagccaggcacaactctggt

SEQ ID NO: 547 - DNA, 408 bp, Zea mays
gtggcttgaccccaatgaagttagtgagatctccatggcgaactcccgtaagacttatccgctagctccccccctccgattaattgctcactgggttggggttgtatggatctctgggtgaggtggatgctttatctggtttcatatattggatcaatggctgcattattcttttctactatcattttgcagtgtcgtttacctacggccaccattgaaaacactattggctgtagctgttccagtttgttacgtgtgtaccagtgcagtttctaatttgtatgtgatactagttaacctgacgcaattatagatatcttgaaataacaagcccagtttatgattatttcattttatgtactgcttgtattgtttatgtatatgtgattgtagtttttggtaggactg

SEQ ID NO: 548 - DNA, 895 bp, Zea mays
ggctcgcgcgatgatggccgacctggccggtgagcacgtcgcaggttgaatttgatcacgcagcgaagcgcagcccagggttggtgatgctagtgttgtttgtttactgcactgcagctggacagcacggccccaacgttggccaggcgatcttctccctgtggatggccctcggcagcgtgcttggatacttgtccggcgccaacgcgaaatggcacgagtacggtagcctgcctcgaagccactcgtcccctttcgttttgctctgttttcctttcctttcctttccttcgctgaatcgtgctgctggttgatccttatctccatcagctggctcccttggctcaaaaccgcggcgtgctgcgatgcctgcgccaacctcaagggcgccttcttgactgcggtggtgagttattacgagcacaccattgtatcgttgtcgttgcttcgccctctcgttgcgctgtactgagattttggtgtcgattgatcaggtcctcattataatcagcatgtctgtcaccttgtggctcgccggcgaggagcggctcgacaaggaaagcgtcgacacctccggcggcgcgtgctctgcgttcatggatctcttcaagagcctcaagaacctcccccctgccatgttcagcgtgctcgccgtcacggccgtcacatgggtacgcgtacgtcgttgcttgcaagcgggttttttttctagtttgactccatctgacctatgtgggtctctctggacggcggatatgatgtgcatatgcagctctcgtggttccccttcttccagtacaacaccgactggatgggccgggagatcttccacggcgagccgcagggctcgggcagcaaggcggacctgtacgaagccggcgtccgcgagggcgcc

SEQ ID NO: 549 - DNA, 798 bp, Zea mays
  misc_feature (777)..(780): n is a, c, g, or t
cttccaccttcgggtccgggttcaccccttccatgtccttcgtatcaacaagatgctttcgtgtgctggggctgataggctccagactggaatgaggggtgcctttggcaagcctcagggcacctgtgctagggtggacattggtcaggtcctcctttctgttcgatgcaaggacaacaatgctgcacatgccagtgaagctctgcgtcgcgccaagttcaagttccctggccgccaaaagattattgagagcagaaagtggtgagtgcatgatgaattcattgctgccatgaaaccaaaatgccatagcctaatagcttgcataagttattttttattattgttttttgatttgcactgtcttgtccaggggcttcaccaagttcagccgtgccgactacctgaagtacaagagtgagggtagaattgttcctgatggtgtcaacgcaaaggtacagctatcacatatcttgctacatttagatatatctctgaattagttttgggatagtaatgtaatttccattgatacgcatattttgaaatggagctattcttacaatgtttgctccgtcttctcttcggcagtatattaaccagttcataatctaattttaacttctcctgacttattacagctgctcggtaaccatggaagacttgagaagcgtgctcctgggaaggctttcctcgaggccgttgcttaagtccaatctacagttggaatgcgaatccagacgttttggtttagcctatcttattttgctttgtgcaacnnnnattttaagtgtatggggt

SEQ ID NO: 550 - DNA, 357 bp, Zea mays
  misc_feature (7)..(9): n is a, c, g, or t
tcaacannngagcgcctctggtcgatggtgcccgccgaaaaggcggcggaagccgtcggcgacaaggccccgcagatcgacgtcacgcagttcggctacttcaaggtgctcgggaagggggtgctgccgcccaagcccatcgtcgtcaaggccaagctcatctccaaggtcgccgagaagaagatcaaagccgccggcggcgccgtcgtgctcaccgcctagttttcagtccttattcgcctcttggttttgagatctatatctggactagcagtgctttcttgtctcacctatttgtgttaagaagacgtagtttttaaatccattgctccttcctgtttggacagtgctttcata

SEQ ID NO: 551 - DNA, 491 bp, Zea mays
  misc_feature (53)..(53): n is a, c, g, or t
tgggcattgttatttgaaataggtaaggacaaatgcttatattggtagtgtanctctaacgcttgatcacttgttttagatggtgaagaacatgtccagatgtcctgtttgctagtacttttatgttctgaatgatttttgttcctgctttgtataatttatgtcctaaattgaattggtagtctggcttgaaattttatttgttatttggagaattggggggcaattaggttatgatcccaaattctcaggtactatggcacatgaaggcaatgcatctattagtgatgtttcttgcatgtgttaacatatattcaatgtctgtttgcgcacagggacctacattgacaagaaatgtccattcactggaaccgtttctatcagaggcagaattattgctgggacatgccacagtgctaaaatgaacagaaccatcattgttcgcaggaactacctccactttgttaagaaataccagaggtaagtggact

SEQ ID NO: 552 - DNA, 1274 bp, Zea mays
  misc_feature (36)..(37): n is a, c, g, or t
  misc_feature (649)..(649): n is a, c, g, or t
  misc_feature (665)..(665): n is a, c, g, or t
  misc_feature (724)..(734): n is a, c, g, or t
  misc_feature (736)..(736): n is a, c, g, or t
  misc_feature (746)..(748): n is a, c, g, or t
  misc_feature (750)..(755): n is a, c, g, or t
  misc_feature (760)..(764): n is a, c, g, or t
  misc_feature (767)..(769): n is a, c, g, or t
  misc_feature (771)..(773): n is a, c, g, or t
  misc_feature (777)..(788): n is a, c, g, or t
  misc_feature (791)..(807): n is a, c, g, or t
  misc_feature (809)..(809): n is a, c, g, or t
  misc_feature (811)..(811): n is a, c, g, or t
  misc_feature (814)..(828): n is a, c, g, or t
  misc_feature (831)..(852): n is a, c, g, or t
  misc_feature (856)..(865): n is a, c, g, or t
  misc_feature (867)..(870): n is a, c, g, or t
  misc_feature (872)..(883): n is a, c, g, or t
  misc_feature (886)..(888): n is a, c, g, or t
  misc_feature (890)..(896): n is a, c, g, or t
  misc_feature (900)..(900): n is a, c, g, or t
  misc_feature (904)..(908): n is a, c, g, or t
  misc_feature (912)..(919): n is a, c, g, or t
  misc_feature (921)..(922): n is a, c, g, or t
  misc_feature (927)..(940): n is a, c, g, or t
  misc_feature (945)..(946): n is a, c, g, or t
  misc_feature (948)..(955): n is a, c, g, or t
  misc_feature (959)..(959): n is a, c, g, or t
  misc_feature (964)..(965): n is a, c, g, or t
  misc_feature (968)..(988): n is a, c, g, or t
  misc_feature (992)..(992): n is a, c, g, or t
  misc_feature (994)..(1002): n is a, c, g, or t
  misc_feature (1005)..(1008): n is a, c, g, or t
  misc_feature (1016)..(1034): n is a, c, g, or t
  misc_feature (1036)..(1057): n is a, c, g, or t
  misc_feature (1059)..(1060): n is a, c, g, or t
  misc_feature (1065)..(1072): n is a, c, g, or t
  misc_feature (1074)..(1075): n is a, c, g, or t
  misc_feature (1077)..(1082): n is a, c, g, or t
  misc_feature (1084)..(1087): n is a, c, g, or t
  misc_feature (1089)..(1095): n is a, c, g, or t
  misc_feature (1098)..(1101): n is a, c, g, or t
  misc_feature (1103)..(1114): n is a, c, g, or t
  misc_feature (1121)..(1125): n is a, c, g, or t
  misc_feature (1127)..(1129): n is a, c, g, or t
  misc_feature (1133)..(1144): n is a, c, g, or t
  misc_feature (1146)..(1147): n is a, c, g, or t
  misc_feature (1150)..(1154): n is a, c, g, or t
  misc_feature (1156)..(1167): n is a, c, g, or t
  misc_feature (1173)..(1188): n is a, c, g, or t
  misc_feature (1200)..(1200): n is a, c, g, or t
  misc_feature (1203)..(1208): n is a, c, g, or t
  misc_feature (1210)..(1212): n is a, c, g, or t
  misc_feature (1214)..(1214): n is a, c, g, or t
  misc_feature (1219)..(1222): n is a, c, g, or t
  misc_feature (1225)..(1227): n is a, c, g, or t
  misc_feature (1230)..(1230): n is a, c, g, or t
  misc_feature (1232)..(1256): n is a, c, g, or t
  misc_feature (1261)..(1261): n is a, c, g, or t
  misc_feature (1263)..(1263): n is a, c, g, or t
  misc_feature (1265)..(1268): n is a, c, g, or t
attgaaaagcatgctgctcagctttgcgttcttgcnnaggactgtgaccagccagattatgtcaagctggtgaaggcgctctgtgctgaacacaatgttcaccttgtcactgttcctgctgctaagactcttggcgagtgggctggggtgtgttagactatccttctctaaaacttgtgctcctttttacatagtatttagtgttgctaccttgatagtgttactggattacttattttaacattcattttataactcaatgctccaacttccgttgaacggagaaaaaatagtattctctgtaaatgtcaagtttttacatttaatttttaatccatttagttgtgtgttgattcttcactagctgtgtattcttttatatgaactttggccttgatcgtaacaatctccactttcactccttgcagctttgcaagattgactccgagggcaaggcaaggaaggttgtaggctgctcctgtgtcgttgtcaaggtagcatatcaatcccttactttcctacaaattaattattttggtttaccttagggcaagtaacatgacatttcactgtttcatttcaattaccaggactacggtgaagaatctgagggccttaacatagtgcaggagtatgtcaagtcgcactngatgtaacacgtttcngtaatactctacatttggatctgggcttaatattatgcttgcgtcttgggcttgcctannnnnnnnnnnantaaaaaaaannnannnnnnccccnnnnntcnnncnnnttcnnnnnnnnnnnntannnnnnnnnnnnnnnnntntnttnnnnnnnnnnnnnnntcnnnnnnnnnnnnnnnnnnnnnncccnnnnnnnnnncnnnncnnnnnnnnnnnntannnannnnnnncccntcannnnnaacnnnnnnnntnnacatnnnnnnnnnnnnnncacannannnnnnnnattncttcnnctnnnnnnnnnnnnnnnnnnnnnactncnnnnnnnnnccnnnnactcctannnnnnnnnnnnnnnnnnncnnnnnnnnnnnnnnnnnnnnnnannacttnnnnnnnntnntnnnnnntnnnntnnnnnnnacnnnntnnnnnnnnnnnnttacacnnnnncnnnactnnnnnnnnnnnncnnctnnnnnannnnnnnnnnnncctctnnnnnnnnnnnnnnnntccacctctctnccnnnnnntnnncntcttnnnntcnnnccntnnnnnnnnnnnnnnnnnnnnnnnnnacctncncnnnncaccct

SEQ ID NO: 553 - DNA, 827 bp, Zea mays
  misc_feature (60)..(60): n is a, c, g, or t
  misc_feature (777)..(777): n is a, c, g, or t
ccaccccccgagcggccgccgccggcgagacaggggagcatggcgacttcctcctccttnccgccgtcttcttcagcagcgccttcgccgcctgcttcgcagaggtaccgtcagcacacccgcattccttttttctagcctcccgcgggcatcgcatcgcatacatccgtctaagaggcaaagtcgaagtcggagtcggagtcgtccaaattggcttgtagtaggctcaagccgtgacgagtgcttgtagtagctctgctttgttgaggctttgacgcaaattgaagagggatttgtttggcttgcaactggcgtgctatctgtctttttatttttttcgacttttaaggattattagtttggggctactggctgggctaacgttgccatttgcttcttcaattaaaaataggagtatgattatttgatctaaaaaagaatggatctcactgtcaacgatttgggtttggagccagctttgatttaccaatgatataatcaggtgtgcaccattcctttggacacagccaaagtgcggctccagctgcaaaggaaggcgccactaccgctgccaccggcggctgcagcagccacagctgctgctgctggaggcacgctagccacaatcatgtgcatcgccagggaggaaggggttgccgcgctctggaagggcgtcatccccggcctccaccgtcagttcctctatggcggcctccgcatcagcttgtatgagcctgtctgtactcctccacattctttcacctgtctcctcccatnaaaagtgacttcctcacgacaataaagggaattttcccttctctttactg

SEQ ID NO: 554 - DNA, 1363 bp, Zea mays
  misc_feature (483)..(484): n is a, c, g, or t
  misc_feature (1337)..(1338): n is a, c, g, or t
ctcacctcctctctcctccttttactgcgtttattttccttgaaccgctgctctgtttgtttgtggttgccaatgtgtcggggttgtgatgtgcttttggcttgttgtacctgcaggctttctttgatctggagaacgggaaccaggagctcaagagcgacctcaaggacctgtacatcaacaatgctatgtatgcgtaacgtttctttctatattctatcgcctgttgagatgtagtagcatgtggtgcatggttgtgacatttggtgaggatgtttgttgtgactttgcagccagatggatgttaccgggagtaggaaggctgttgtcattcacgtcccataccgcctgcgcaaggccttcaggaagatccatgtcagactcgtcagggagctggagaagaaattcagcggcaaggtgaatttctcgtttttgttttttctactgctgctcatggtttaggtttatatatgctaattgtanntactacataaaattgaacggggtaatgcgtttaatggccatgagattacatagatttatgcaacttctattactctagcgtaaaattggttgtcaatatccatctctttgtttcatgccattttttgggatttttactcgaactgtgcagaagcttttgaccccacttgtactacatatgcttcttctttttgttttgttagtgcttagtgtctgtgtgataaagatatgtctttttgtcataatatgcaccttgttatgagtctggtccttatggtgatttttgtaccctagcatatgtttagaattttttggcggagcagtcttgtttggtctacaatattagagtcaagtttgcaaggatgcttatcatgcattttacctggcacaggatgtggtaattgttgctacacggaggattgtgaggccacccaagaagggttcagctgttctgcgccctcgcaccaggactctgactgctgttcacgatggcatcttggaggatgttgtctacccagctgagattgtggggaagcgtgtcagataccgtctggatggttccaagattatcaaggtagatgcttccgtcttcctttcttcagatagtctacatgtcctactgaggaactgaaggatgccactggcatctctactgacaactgtattcacttgtataaaaacatctaaaattttggcttggcattagttacctagaatttctttgtatacatttatggtttgttggctaacatattgcagcaagttacttaaccttctcttgtaatggcattcagattttcttggacccaaaggagaggaacaacactgaatacaagctggagacctgcactgcnntctaccgcaggctgtgtgggaaaga

SEQ ID NO: 555 - DNA, 831 bp, Zea mays
  misc_feature (54)..(56): n is a, c, g, or t
  misc_feature (680)..(682): n is a, c, g, or t
  misc_feature (693)..(700): n is a, c, g, or t
  misc_feature (725)..(726): n is a, c, g, or t
  misc_feature (738)..(745): n is a, c, g, or t
  misc_feature (747)..(747): n is a, c, g, or t
  misc_feature (751)..(751): n is a, c, g, or t
  misc_feature (757)..(766): n is a, c, g, or t
  misc_feature (782)..(785): n is a, c, g, or t
  misc_feature (787)..(790): n is a, c, g, or t
  misc_feature (794)..(799): n is a, c, g, or t
  misc_feature (801)..(802): n is a, c, g, or t
  misc_feature (811)..(825): n is a, c, g, or t
cttcctagatctcctgagcctatgagtggttcctatatttttgtttgctccccnnnaagcagggacaaaaggtgtggtgtttgtggacctgctttgattaaaaggttcaaggaagagataaatgaactgggacttgatgatcaggtggctgtcagtgcatgctcacacgtgggaggtcataagtatgcaggaaacgtcatcattttcagttctgatgccaagggagaagtgactggtcattggtaagtactgttattaaattaacattaaacgttcactttgtcttgtgcaactatttttttacttttgcatatacacattcttgccttttataatctaattagtactcaatacaattgcaattataggtatggttatgttgttcctgatgatgtgcctgttttgctgcataaacatattggacaaggagaagttgtggaccatctatggaggtatcccccttgttgaacccttgtactcctatctgtacaccataggttgtgaatttagaattgtttactcatcatttacatcttatcctgatgtggagtcatgaatgactagatgtcggttcccagcctattgtgatgctctttcttatcctacaaagtacatgcttatgtgaacatgtgttcatattctatgaataatcataccaaaaacctgcataatgttctagnnnaattgcatttnnnnnnnnactgttaattcgttttttaacaatnnttaaattacctnnnnnnnngnattngaaatnnnnnnnnnnaaactatgtgcatttnnnnannnntatnnnnnnannggggcaaannnnnnnnnnnnnnnttcaaa

SEQ ID NO: 556 - DNA, 819 bp, Zea mays
  misc_feature (33)..(33): n is a, c, g, or t
  misc_feature (623)..(628): n is a, c, g, or t
  misc_feature (713)..(717): n is a, c, g, or t
  misc_feature (773)..(808): n is a, c, g, or t
tctttggtgtcgctcacatctttgcatccttcnatgacaccttcattgtaagtatcatatgcgccatctgtggttagaccttttcattcacttctccaagtttaactgaactgtgtcttgttgtaatatctgcagcatatcactgatttgtctgggagggaaactctggttcggatcaccggtaccatcctaaaaccttgggccatgcacgacctaggtggcagatgtatattgttttaactgagatgtgctaaacctaaaccctgtaggtggcatgaaggtgaaggctgaccgtgacgagtcgtcaccttacgctgctatgcttgctgctcaagacgtcgcacagcgctgcaaggtactcactcatttgtccgtctgtgtatccaaagacgacgttgtcttaatatttacattgaagccaaggattacgtagctctgctttagtgttgctgtatatctggataagtaatctgtggccggtattttgtcttcaggagcttggcattactgcactgcacattaagcttcgcgccaccggaggcaacaagaccaagacccctggacctggtgcccagtctgccctcagggcgcttgctcgttccgggatgaaaatcggacgcatnnnnnnaggaggtcctggatctttcaagggctggctggcctgtgctggttatccctgctttgtttcataatgctttggttctgtatactgnnnnngcgtttgtgctatgtgcagaggacgttaccccggtccccactgacagcactcgcannnnnnnnnnnnnnnnnnnnnnnnnnnnnnnnnnnntctcgtctgcg

SEQ ID NO: 557 - DNA, 776 bp, Zea mays
atatatatacatatgttttttataaaaaaaaattagagaggatacgatacatatatataaagttaccatatttacatacatacatgcagcgcttggctacaaaagttggaccgtggggtgggagcggcgggtctccggtggacatcacggcagagcctcagcgtctgaagagcatcaccgttgctactggcatcgccgtgacctcgatcgccttctcctacgtcgactccgccggccaaacccaatctgctggtcgctggggcggttccggtggagaaactgagccggtggtaagtggacactgcacatatatatatgcattagacttgtagtgtatatgctcagctcagctcgtctcggctcggctcgcgacggactctgaaattcctacacgcgccccgcagatccagctcggcgactccgaggtgctcacggagctgtccgggacgatcggcaacgtcgacggccacaccgtcataacctccatcaagttcgtcacaagcctcaagacctacgggcctttcggagcatggggggacgggagtgacactccgttcgcggtccccgtgcagcaagggagtgccatcgtcggcttcttcgcacgagctgggatctacctcgacgcccttggcgtttacgtgcgatccctgtgatgatgactctgacgacagaggcagctagctgctctgctctgctctgttctgctccaccggcttcatcgcgcggattccagtcaccctccgttttatttcctactgctacttgtgtcttgcctc

SEQ ID NO: 558 - DNA, 708 bp, Zea mays
tgtgggctctcataatatcacatttttgccataactggggaacattcattcttctaacatggatgcccacatactacaatcaggttgctaccatgttatgctgtgaaacgtttgactttccccattatttaaattatataatgatagcatatcatgccattggttgtgctccccaaatccttttatccaggttttgaagttcaatctaactgagtcggggcttctctgtgtcttgccatggctgacaatggctgtttttgcgaatattggtggatggattgctgatactctagttcagagaggggtctctgtaacaaacgttcgtaaggtaagttgtcttatccttcagtaattttgtttcatgtgtgaatttataagaatagttatgcttagaggtaccgatcttgaaatactttataacctcactgatgcagatcatgcaatcgattggtttccttggaccagccttgttcttgacactgctgagcaaagttcggactccagccatggctgtgttatgtatggcatgcagtcaggtttgatgcacttcagaaccaatcatatggatttataagtagcttccgacacggcaacaattgataacttgtctgttataaatgtctgctggttttactgtccattgtctcagggtagcgatgctttttcacagtctggcctgtattcaaatcaccaagacataggaccacg

SEQ ID NO: 559 - DNA, 685 bp, Zea mays
  misc_feature (674)..(675): n is a, c, g, or t
aagtgagagcaccaaaaagtaaggaaggttatgcatccataggtggcggttctcctctacgacaaattactgatgcacaggtatattgtgaccttttctggtctaattcagaactgtcaattggcatgactgccattcattgaatcttagcaatctggattttccgtttacctagaattggagaggacacaagtggataatggggaaactaattttgttttgattaattccagagccaatattcttgtcacatgacaaatcaacccatgcattagtgtcacatgaagtctttttgtggaacttgaagtaattgcatgctccttctcacttggttgacaaatgattctcccagcaattgggttgatattgtgatgactcatgggttaggcctaggaaatgtcctggtgatcttatactgtgagatgacacagaattttatttgctgtttcactgtttcattgccactagggtgatcttatactgtaaaaaacagtatttggggttttagtgtcattctggtcagttatcttttacattggactacaataggattagaatgcgaatggatgctgctatattactttattgaaattagagaataatgaatggttttcccactttccctaaaatgtctaaaatatgtctgaagctacactattagctctcatttgatnncttttatgaa

SEQ ID NO: 560 - DNA, 683 bp, Zea mays
  misc_feature (633)..(637): n is a, c, g, or t
  misc_feature (647)..(651): n is a, c, g, or t
  misc_feature (658)..(659): n is a, c, g, or t
ctcctagagctgttggagcactgattgcactttatgaacgtgctgtggggatttatgcttctttggtaaatatcaatgcctatcatcagcctggtatgcttctcatgacatagtaatgaagctctataattaagctatttgctatgtgcaattatgtgtgggctatgtaatttacaggtgttgaggctgggaaaaaggcagcaggagaagtattggcccttcagaaaagggttctgactgtattaaaggaggccatgtatggaacttctgacctgtgttctttctgtttctctgtgaagtgattggttatatgcatagtatttttggggcatatttctagttgtgatgctttgaaaatgcatttcgttgtatgacttgtatcactaggtgggactttgttttgaggaatggtgtggttcatcatattctcaccctcacttttttgtttggtttatggagttgaataggttcatctgccaccaccctatcccttgcaaagtaataattagtacaaacatgagggatgtactcatgggttggttcctcaaaatacattcgaagtgcacccaccccaatagctgtggcaatgtccatttctcctttgagactctctaagaaggcatttttagatgnnnnnactgatatannnnngaaaagnnttcctagctgaaaattacaattga

SEQ ID NO: 561 - DNA, 379 bp, Zea mays
gccggccatcgcgttcagcaggaaaacgtacaaggagatggtggtcggagacgtcacgtaccctgccggcgtgaccctggagctgcccgtgctgttcatccaccacgaccccgacatctggggaagcgatgcgcacgagttcaggccggacaggttcgccgagggggtggccagggcgtccaaggataggctagcgttcttccccttcggctggggcccgcggatctgcatcggccagaacttcgcccttctggaggccaagatggcgctgagcatgatccttcagcgcttccagttcgagctcgcgccgacgtatacccatgcgccgcgccgagttataatgctgcgcccgatgcatggtgcccagatcaagctcaga

SEQ ID NO: 562 - DNA, 476 bp, Zea mays
agcccgaatttgcatatttgactacgaactagcaaggcaaatcctttcgagcaagtctgggcatttcgtgaagaacgatgcgcaccctactttgttggctctggtcggcaagggactcgggttcatggaaggctctgactgggtgcgccatcgcagggtgatcaaccctgctttcaccattgacaagcttaaggtacacgcaatgcctagctctctctctctctctcgctttaaaaaagaagttcgtttgcagtatgcacgcgagcagcaagaacaatggccgtgctcattgcataaacagattgtgaccgagacgatgctggacttcgccgatagcatggcaggtgagttggaagctgaagcatcccagaacgagaacggagaaacacaagtggatatatacaaacatttcagcgatctgacagttgacaatatagcctacgccatctttggaagcagctacaagttagaaatgg

SEQ ID NO: 563 - DNA, 277 bp, Zea mays
tgtcctccagaagctgtgactgtgagcgccctaacaatctacgcgcgtacgtactctgagcgcactactgaagaaagttgatgagtatcatcatcaaaagttgttgtcttgctatcgttattaattcgtagggctatatgtatttgtgatccttccgtcgcttctagaaacaccgtacctgaatatcacagctagtaattatcaaataagataccttttccagttatataagatgcatgcatgcatccatgtaagtgccgctttcctttaatttgtc

SEQ ID NO: 564 - DNA, 414 bp, Zea mays
  misc_feature (407)..(408): n is a, c, g, or t
ggctgtttcgagctctcgctcagcgtcctcatggaggccatcgcggagaccaaggcgaagcgccgggacccggacccggagccagacgcggacggcaccaccgacatgtcgccggaagcgcaggagttcaagcgggtcatcgacgaggtcttcccgtacgtcagctcggtgctgtgggactacctgccggtgctgcggtggttcgacgtggccggcgtgaggagcaggatcctggccgcggtgagcaggagggacgcgtttctgcggcggctgatcgacgcggagcggcggaggatggccgacggcgtctgcggcgagaagaagagcttgatcgccgtgctgctcgccctgcagaagctggagccggaggtttacaccgacaccgtgatcacggctttctgttcganncctatt

SEQ ID NO: 565 - DNA, 379 bp, Zea mays
  misc_feature (10)..(12): n is a, c, g, or t
  misc_feature (266)..(284): n is a, c, g, or t
tgaactcctnnncggtaaaaagcccaatgtttcatattttagagtctttggtagcaaatgttttattcttgttaaaagaggtagaaaatctaaatttgctcctaaggctgtagaaggctttttacttggttatgactcaaacacaagggcatatagagtcttcaacaaatccactggattagttgaggtttcttgtgacattgtgtttgatgagactaatggctcccaagtggagcaagttgatcttgatgaactagatgatgaannnnnnnnnnnnnnnnnnntcctcaacggcgtgttctgcgtcggggacttcatcccgtggctcggctggctggacctccagggctacgtcgggaggatgaagaggctgggcaag

SEQ ID NO: 566 - DNA, 359 bp, Zea mays
tcggcttcaaggggcagcacttcgagctcctgccgttcggcgccggcaggaggatgtgccccgggatcgcgttcgcggagggaagcgccgagatggcgctggcgagcttgctgtatcattttgactgggaggcgagccggggccagaaccgggaagggacgccgtcgctggacatgaccgagatgagcgggataaccgtgcatatcaagtccggtctgccgcttgtatccaagccgtggagtggatcccccttgaactagtagcagaaaaacattgatagggcgcattaaagatggcaatggatacctaaaatccaaatacccgacggacccgatataaaggtgggtatgggatgattt

SEQ ID NO: 567 - DNA, 506 bp, Zea mays
acgatgcgctcgccggacggcaagaagctggacatgctagcggaggaggacctcggcagcatgccctacctcaaggcgaccatcaaggagacgctgcgcctgcacccgccggcgccgttcctcctcccgcactactccaccgccgactccgagatcgacggctacttcgtccccgccgggacgcgcgtcctcgtcaacgcctgggcgctcgggagggaccgcacgacgtgggagaagccggaggagttcatgccggagcggttcgtgcaggaaccgggcgccgtggacgtccacatgaagggcaaggacctcaggttcatcccgttcggctccggccggaggatctgccccgggatgaacttcggattcgcgaccatggagatcatgctggccaatctcatgtaccattttgattgggaggttccgggctctgcagcaggggtgtccatggacgagtcctttgggctgacgcttcgccggaaggagaagcttctccttgttccaag

SEQ ID NO: 568 - DNA, 380 bp, Zea mays
agagctggacatgctagcggaggaggacctcggcagcatgccctacctcaaggcgaccatcaaggagacgctgcgcctgcacccgccggcgccgttcctcctcccgcactactccaccgccgactccgagatcgacggctacttcgtccccgccgggacgcgcgtcctcgtcaacgcctgggcgctcgggagggaccgcacgacgtgggagaagccggaggagttcatgccggagcggttcgtgcaggaaccgggcgccgtggacgtccacatgaagggcaaggacctcaggttcatcccgttcggctccggccggaggatctgccccgggatgaacttcggattcgcgaccatggagatcatgctggccaatctcatgt

SEQ ID NO: 569 - DNA, 353 bp, Zea mays
atgcccaggctgagctacctgcacctggtgatcaaggaggcgctacggctgcacgcgccggtgccactgctgctgccccgggagtgccgggagccgtgccgggtcatgggctacgacgtgccggagggcaccagggtgttcgtgaacgtctgggcgatcgggagggacgacgggttctggggcgacggcgaggtgttcaggccagagaggttcgacggcggcggcggcggcgtcgacttcaggggcaacgacttcgagttcaccccgttcggggccggcaggaggatctgccctggcatcgcgctcgggctggccaacatggagctcgcgctcgctagccttctctaccattt

SEQ ID NO: 570 - DNA, 916 bp, Zea mays
  misc_feature (120)..(123): n is a, c, g, or t
  misc_feature (157)..(160): n is a, c, g, or t
  misc_feature (204)..(206): n is a, c, g, or t
  misc_feature (212)..(220): n is a, c, g, or t
  misc_feature (396)..(399): n is a, c, g, or t
  misc_feature (410)..(412): n is a, c, g, or t
  misc_feature (417)..(419): n is a, c, g, or t
ctgaaccctggggttcctgaccagctctgccatcgcccactcgactgagatgactgttgtgtccattccagcagtgatcatatcctgaacatgatgaacaaaccatggaagattagtacnnnngaagtgatgcagaaggtgtccggtcatgaaggcnnnnaggttgatgccgagctgcgctcctgggcacacatgccggccaannncgaacnnnnnnnnnttgaagtcgctgcccttgatgtcgatgttctcctccaggaaacgctccggtctgtactgaagcgggttactccagaccttgggatcacgcgctaccgcccactcgctcaccatcacgttggcgcccttggggatgttgtaacctccgatcttgacgttcgagctggccttgtgcgnnnncatgagtggcnnnggcgnnngcagccggagtgattccttgacaacggcctgtaggtaggggaggttctggaagtcggtctccagcatgacgcggtcacggccaaccacacggtcgagctcctcttgcagcttcttctgaaccctggggttcctgaccagctctgccatcgcccactcgactgagatgactgttgtgtccattccagcagtgatcatatcctgaacatgatgaacaaaccatggaagattagtactcgcatcaccaacaagaattaccaggatcgattttttttacaaatcaattggcagtcacctagtggcatattagctaactggcctaacctttgcacattccacgtgttggtggtaggtaaaatgaacataaagtgcaaccatttccaactacaaaataaacatacagtttccaaattccacctccttgcacctaccctaagactgatgtctcgctctgacacaaactacaagctgatactgaactatacagtaacctttataa

SEQ ID NO: 571 - DNA, 618 bp, Zea mays
  misc_feature (609)..(610): n is a, c, g, or t
accgctccggcttgaactcgtcggcgtcaacccagtacttggggtcgcggccgatggcccacgcgttgatgatgacccgtgacttggctggaatcgtgtacccgtccagctcgcactcctcgatgctctcccggggcaccagcagcggtgccggcggatgcagccgcagggcctctttgatcaccagcttcatgtactggaggttgctcgcctgtaggtcgccctctgtcaccaccgtcttcccacggaacgcctccctgatcagcgcctgcatcttcttcatcactggtgggttccgcatcagctccgacatcccccactccatggccgaccccgacgtccccgtcccgcccgcgaacatgtcctgcgcatatatgcacacgtgcgtacgtgttgccattgaatataattaatggagatcgtgtaggactgaataatatactatatattaccagtatgatggccttgatgatgctgttggtaagttggaagccgaagccgcctttctcctgcaggccgatgagtacgtcgacgaggttctcgtcgacgtcctcggcggcggcgccgcccatgatcttttcgtcgcggatgcgcttgcgctcctcgatnntttcctcg

SEQ ID NO: 572 - DNA, 581 bp, Zea mays
gctggtccgcgccaagtccgagagactgaggaggaggtgggacgagctactcgataggctgatcgaggatcgtgagagcaagtatgaggcggcggcggcgggggcgagtgatctcaaggtcaaggacgatgatgacgataacttcatacatgtcttgctctccgttcgacaggagtacggccatattacgagggagcaaatgaaagctctcctgcaggacgtgtttatcggggggatagactccacatcttcgctgctcgagttcaccatggctgagctcatgcggaaaccacgagtgatgaacaagctccaagccgaggtaaggagcagcacgcccgaggggcatgatggagtcgtcggcgaagacagcctggagcacatggcctacctgagggccgtcacaaaagagtccctccggatccataacgtgacgccgctcctggccccgcacctgtccatggatagctgcaccatcgatggctacacggtccccgtcggggtgcaggtcctgatcaactcttgggccatcggcagggacacgcgctactggggcgacgatgctgaggagttcgtccctgaga

SEQ ID NO: 573 - DNA, 974 bp, Zea mays
gctccctgtacgacgtctcctgcttcgcggctggccttgctggtaccatctcttctccttctttccatctcagggttccaaacttctgaattgcttcgtgagactgggggtgtgcgtagctgaatttcttcccgtttggtcgccattgcaggcaacgtcttcgccctcgccctcttcctgtcgccggtgtaagctgctagccagcaccctcaccgtttctttaatttccttttttcgtctgattgttctggttgatcctaagggatgcaccgctgacgaatgccctgctcctgctgctgctgctcgcctgctcctcgctttctgcacgccgtcctccaggccgacgttcaagagggtcctcaaggccaagtcgacggagcagttcgatgggctgccctacctgctgtccctgctcaactgctgcatctgcctctggtacggcctcccgtgggtctccgacggcggcagggccctcgtcgccaccgtcaactgcaccggcgccctgttccagctcgcctacatctcgctcttcatcttctacgccgacagcaggaccactcgggtaagtaaattcatgtgcttgccgtggaatcgtgttgccttgcctgccctcttctcttgccgtgtctgtctgaccgaccgactgacaccagtctgctctgctctctccatctcctcccgtcctcgatccgcagctcaaggtcgcggggcttctggtgctagtggtcttcgcgttcgcgctcatcgcacacgccagcatcgccttcttcgaccagccgctccggcagctgttcgttggcagcgtcagcatggcgtccctggtctccatgttcgcttccccgctggctgtcatggtacgtatggtatgccattccagggggctgtgtatacttctcgatcgacttctcttctcccaggccgtgtgtctcatcgtcgcttctttgcgtgcttcgtcttggctgttcagggtgtgg

SEQ ID NO: 574 - DNA, 475 bp, Zea mays
  misc_feature (151)..(151): n is a, c, g, or t
  misc_feature (429)..(435): n is a, c, g, or t
  misc_feature (438)..(443): n is a, c, g, or t
atcttcggagtcgcttaggccgagcgaccgaagcaggaactcgacagcctttcccttgtcccagtcgatcaccgggcgaacctctaaaacctgcagcgtagcaaaagaattttttttttcgttgagtcttggagcaagtatcaagatcaanggcagtcgcagtagaacagtctaggctcctaccattcgcccgttggttactttgagacgagggaaggcctccaagacttgtttcacgagtcctgcgaccactttccagtcctgaaaaaaacaatagcataaagctctcagtctcaggtaaattcgctactgcttccctgtaataggcgcggtctgaatctgatgcatcctagtaaaaataaaaggatgtctgaagccgtaatttcatccatttctctaccgacaaaaaaaaggaaagataaacagatnnnnnnnatnnnnnntgaaagtttcaggggcacgcaatctcaccttc

SEQ ID NO: 575 - DNA, 411 bp, Zea mays
ctcgccgaggggttcgaggagcgcgtcagggacagggggctcctggtccgcgggtgggcgccgcaggtgaccatcctttcgcaccccgcagtgggcggcttcttgacccactgcgggtggaacgccgcgctggaagccatcgcctacggcgtgccggtgctgacgtggcccagcttctccgaccaattcagcagcgaacggctgctcgtcgacgtcctcaacatcggcgtcaggtccggcgtcaaggtgcccgccatgttcttacccaaggaggcggagggcgtgcaggtgtcgagcgccgacgtggaaaaggcggtgggcgagctcatggacgagggtcccaaggggacggcaaggagaggaagggccaaggacctcgccgcgaaggcgaaggtaaccatgatggaaggt

SEQ ID NO: 576 - DNA, 725 bp, Zea mays
tcgactgggagctgaccgacgaggagcggctcaagatcagccagatcccgcagaggaaggttgtccagactagtagcttgttctcgcaagagggtgagttcacggctgttgatccagcggaacttaatattttagaggaataagggggaaaatgacccgccacacatacactgcatcagtgttgcactgttgctgcatacagaactcagaagtgtatttcgtagaccatttgaataaggctgttggaaacggtgacatctagtgctgtttgtgtttcgttgccgggacggtaacatctacagttaagggggcgtttgagaacaaagtttttctgcagtattgaagcaatactgtagtattgagcaatactatggtattatatactttgaggtgtttggcaactcatctgaaatttctgtatactaaactgtagtattgtaaatactgcacttgttttgcagttttggaaactttggtctcagccaaagattttttctgtaaagagagcgtcagctgggtcccgctctggctgattggtctcaaccaaagtttttcccaaacatcttgatgtattggatactgttgtattccaaaactgaagcattgtaaactgtagtaatgtcatgactaaagtataccttagtatttgaaaaactacagtttggaaaaactgtgttcccaaacagggtctaatgctgcaatccattaacggaactgagggtaat

SEQ ID NO: 577 - DNA, 725 bp, Zea mays
  misc_feature (98)..(98): n is a, c, g, or t
  misc_feature (110)..(110): n is a, c, g, or t
  misc_feature (186)..(193): n is a, c, g, or t
  misc_feature (202)..(209): n is a, c, g, or t
  misc_feature (264)..(264): n is a, c, g, or t
  misc_feature (272)..(272): n is a, c, g, or t
  misc_feature (292)..(292): n is a, c, g, or t
  misc_feature (298)..(298): n is a, c, g, or t
  misc_feature (307)..(320): n is a, c, g, or t
  misc_feature (322)..(335): n is a, c, g, or t
  misc_feature (337)..(358): n is a, c, g, or t
  misc_feature (360)..(362): n is a, c, g, or t
  misc_feature (409)..(409): n is a, c, g, or t
  misc_feature (507)..(507): n is a, c, g, or t
  misc_feature (510)..(513): n is a, c, g, or t
  misc_feature (549)..(549): n is a, c, g, or t
  misc_feature (555)..(555): n is a, c, g, or t
  misc_feature (657)..(657): n is a, c, g, or t
tcgactgggagctgaccgacgaggagcggctcaagatcagccagatcccgcagaggaaggttgtccagactagtagcttgttctcgcaagagggtganttcacggctgtngatccagcggaacttaatattttagaggaataagggggaaaatgacccgccacacatacactgcatcagtgttgcnnnnnnnntgcatacannnnnnnnaagtgtatttcgtagaccatttgaataaggctgttggaaacggtgacatctagtnctgtttgngtttcgttgccgggacggtnacatcnacagttaannnnnnnnnnnnnnannnnnnnnnnnnnnannnnnnnnnnnnnnnnnnnnnntnnngcaatactatggtattatatactttgaggtgtttggcaactcatctnaaatttctgtatactaaactgtagtattgtaaatactgcacttgttttgcagttttggaaactttggtctcagccaaagattttttctgtaaagagancgnnnnctgggtcccgctctggctgattggtctcaaccaaantttttnccaaacatcttgatgtattggatactgttgtattccaaaactgaagcattgtaaactgtagtaatgtcatgactaaagtataccttagtatttgaaaaactncagtttggaaaaactgtgttcccaaacagggtctaatgctgcaatccattaacggaactgagggtaat

SEQ ID NO: 578 - DNA, 596 bp, Zea mays
ggctgtggctgtcgacgatgcctcatcacttaaaccccctgctggtgtatgaccttctgcatcgtacagatccatatgggggctatagccctttgcaagcatgacgatgcatgtttcccccttgcagagcaaacaccaccagggccctgctgctaaccaaaaccaaggcctgataccagattcatcggtgtattcccctggagatggggcccccaaggatgtacagtccctggacaagttctgaatttatgtccctgctctccatgacctagttaagggcatgttcggttccccgggaatgggcatgttcggttccccgggaatggtcgttctggaatgaatcctggtcggatttcttcactaatttatataagctttgatcggttggaacgattctcgggaggaatttcaggataaacgaacagggcctaaggcgtctccatgacctggttaaggcggcataatacggctttcacatgatgtttctaggcatatatgtaaaaaacaagtatattgtgtacccaatagtctgtagcctgttccaatcacattggttttgacatgcttgtatcctatgggtaggcggccgttgtgct

SEQ ID NO: 579 - DNA, 662 bp, Zea mays
aatgttaccaattgttcagtgatgacatatcaactacagtagatatcacgccacgttaggatgcctcaaacgtttcacccttcctttcacgttgccggtggttgactagattgggcagtgcatcgggatgtggtggagatctgaatttgaggccatcccgtttccctacatgcctccacgattccgtgctgcaaaggtacagagttgtggaaaattctgctagttaattttatcttcgtcggcattgtgccgatcgacctgagcgtgtgagtcctgtcttgccctgaaggaatgcatgaagctgttcctgatcaggctgccgatgtcccggcagttcatcgtgcccaggaacatgaagctcctggccgtgcctttgtcccagattcatggcaatgctcaggtatatgtaggctcgtgccacagtcagaaggttctatatgtagttcagggccaaaactccctccctaacgtcgctcccatctgcaggtttacggtccaattatagccgccattccgagcctactgtccaagttctccttcaacgtcatcagcgactgaattgtgcaaaccaaccagaatgttgaggggttagtagacgcatgcatacttggctagttgaagtcatagaacagtgtgcgataccgatgggagcttgtattgag

SEQ ID NO: 580 - DNA, 654 bp, Zea mays
  misc_feature (634)..(634): n is a, c, g, or t
ctggagttggaaggctggatgcacttttaatttttaacagagtttctgagaatgatccagtaagttctctatattctgtatctgtatagattgtgaccctttggtacagagctcctgaagttttgcttggagcaacacattactcaactggcgttgatatgtggtctgttggatgcatctttggtaagtctgttctccttttttagccttgagtcatgatgccaagtactttgtcttgtactggaaacttgacgaattatatgtatataatgtacggagtaaaatgcaataactgatgcatgatcttgtacaaggaatttagtagtgccccagtccaaactgtctacatcattgaatttttatgaccaaccaaataatatattgtgtttaggcttaaaatgttgccttcgctcctcttgattcaagagatggtgcattcaaatgattttgtactgttgaaatcttttaccccatcgtgacgttcgtagctttttaatgcagctgaaatggcccgacggcaggctctctttcctggtgactcggagttgcaacagttgcttcacatcttcaggtccttttctttccttctgtatccagtaatcggtaccataatatgagcagtaccttccttagntgctacaatagtatgattct

SEQ ID NO: 581 - DNA, 780 bp, Zea mays
aaagagaaaataaaatacgatgtcactaatatctcattgattactgattacaagtcaacagtttataatactttacaagtatcagaggtgaaacttggtgtacgcaaggccaaaccttttagacgaactgcattacatctgcaacttataatgatgataggttagaatatgacagttctcgtagagagctaaccctgccatttgaacactagctgcatggaacttaagtaaaatttctgttcccctttgatctcttagcctgttatagaacacaataagctgtcaccgcacaccaagtagacgggatacttctctgtccagttgtacacctcaccttgcaacatgtttactcactcaaaaactgtcatttgcagcaagacttgtctgctttcagatcagtcaaaaaggccatgatctcctatgctcccttgttctttcatctgttgctccaccagggggtcagggctcttcatgtatctcttgatcctcctgtaggtccaataatgtaatatacagccatatattaataaaacattcaatttagtcatttcgagtttggaaatcaaataatacagtaactattacctgtcctgttcattcagagcaggaaaagttggcatgaattccttcatcttgggcagaggaacttcacggaaccactcatggttcaaggcatcagcagcagatatgcgctgtatagaaggaacaagtctattaaggacatgcaaaatgtgtacaagagaatcaggtggtgcactagagaatgtatattaccttctc

SEQ ID NO: 582 - DNA, 517 bp, Zea mays
tgaagattctggtgccttcacttcttgtgttggcactaggtggttcagggctcctgagcttttatatgggtcaacaaactatgggctagagattgatctctggtcgcttggatgcattttggcagaactgatgaaattggaggctttgttcccagggatatctgatattgatcagattagtagaatcatcaatgtcctgggcgatataacagaagaaacctttccaggctgttcaaacttgccagattacaacaagatttcctttaacaaagttgagaaaccgacaggccttgaagcatgtctgcctaacagatctcctactgaggttagcatcataaagcagctaatttgctatgacacagcaaagaggaccagtgctgttgatctgctgaatgatcggtactttaccgaagagcccttgccggcacctatagaaggattacatgtcccggcatcaaaggacgaggatgatgacagctcaacagaagaatggggtaattacagggatggtgtctct

SEQ ID NO: 583 - DNA, 683 bp, Zea mays
ttagtattcccatttgtgttaccttttacatgattcatactcatatttaaattgaaaatgtcgtgttttacagattagcgatgatgatgatgcaaacatcagtgatctttttgaggaagcatcagacttcattgatcatgtggatcatgttgggggcaaggttctagttcattgctttgaagggaaaagtcggagtgccacagtcgtacttgcctatcttatgcttagagagtaagagtctttaacttactgccacttgcgcccgaattgcatgataatggatgcacaagaatttcatcggagctttgctattgacatgatagagctgtacttttcaggggctttactcttgcaaaagcctggaacttactgaagaaagtacaccgtcgagcgcagccaaacgacggcttcgcaaaggctctcctggcccttgacaagaggctgcatggcaaggtatctatggactggcaacacaagcggccagaaatgaaggtgtgtccaatctgcagcaagaatgttggtctaagtacgagttcactcaagctgcacctgcagaaggcacacaagcgtctatctgcaggcagtgtcgacagcgccatgaccatggagatccaaaaatcgatcgagtcactccagatcagccgaggaggaagcctgagcccgtcccagaagctgaccaaggt

SEQ ID NO: 584 - DNA, 1253 bp, Zea mays
  misc_feature (1241)..(1250): n is a, c, g, or t
atgagatgatgactgcgtccagaacaataaaaaataaggaaagatgcaattccaatcttcctatccttacagatgtcaattctgggttgatagaccttaaggtcacatgaaaaatagtaaatctgttaatagattgttttagtcgtggtgagttattggttttaatagagaagcatgatagtgatgatatagtaattactgtgcagtcttacttcctcagcatcaggtaggcaagaacaacagtcgcacttcgactttttccctcaaagcaatgcacaagtactttgccacgcaagtgatccacataactgatgaaatcagaaccatcttgaaagagatcaccaatgtctgcattgtcatcatcgtttatctacatagagaagcaattcaacactgaaagatatctaaactgagtcttctgccttatgctaaaggcaaatgattttccatccatgcaggtattatgtagaactcaccgagaaattcctatactcaaaaaggtcaggcttctgcgattctgactgtccaatttcatttgcacacaagcacaatatatgggtgatgccaaggtgtttaagtgtgtgtgttgaccgagcagcaagagcaccaccaatatacaggtaatctgtgatctgtgatggacgctcagtacttgcagcatcagagatcaaagatatcctctcgagaatgtgctcaagtcgaacctaacaacagaattgctcgataggttcaattaatgtgtacacgtagttagtacagagtgtacatttagatttaccttcaactcgtaagcatcaacaacagtgctattatcagtgccttcaaaaaaacctgtttgaaaattgttgtcttgacacaactttactacttcagtcctcagcatgtcattccattgttctatctctttgcttaattcactgtctatctgtaaaaatgtgttcaatgactaatagaatcacatgataaacttgccttgtttgtttaccctctagattatataatccagcttaaataagttaaaagacaaacaaacaacacaaattattaggtgaattatataatctagatacttaaattatgataatccataagcaggtcatgaggcccttcttacgtaaaaaaaatcatgaagccatttagctatttggcttcctgcaactaaatagtgggacaatctataagagtgaaaaaaacaactagaaacctacgtcagacagtttataatagacaatttatcaatnnnnnnnnnnaag

SEQ ID NO: 585 - DNA, 1158 bp, Zea mays
  misc_feature (1108)..(1110): n is a, c, g, or t
  misc_feature (1118)..(1120): n is a, c, g, or t
  misc_feature (1144)..(1146): n is a, c, g, or t
tgccctattttcttcttctgtgtacctgttgattgtaagttaaccatttccctggtaagttctcctaattaaatgctcctttgaacttcagagcaatgtgagagggagaaagcacgagtcctagtccattgcatgtctgggaaaagtaggtgtgtatggtacatatgtatattttttcatctgggggagctataatctttcttatttctgcactgatttgactaatgttatcgcgacactatatcagatcggcagcttttgtaatagccttcttgatgaagtcgagaggttggagattggcacaatcttttcagtgggtgaaagagcggagaccacaagtgcaactgtctgatggtaacttcatgaattgtgcataccttttctgtcatttttgttctcagatacccttgaagaaaaataggaagattgatgctcaagtaggctcttattgcaaaaattgttatgcttagctacacgagcgtgtgaattacacaataagattgggctactcaacgtgcacacaacacaagtatgcatatcaaagtgaaatgatgcatcatcatttgttgcaacacataatttattgtagtgacttgatctcatgttaattctgtttttgcactgggtgacaagtgacatgtgggtgtttggggaaaaactgatatgaggaacccagccctgatccaaaatgtcaattatggtgccacagtaataaatagcataaaacttatcatggtaagcgcaaagtaaggtgaaattagttcatgtttagtttattattaatgtatagcaagtagtccttaggacttcttgagtccgctagctactgaaatcatggagaggcaacaactaatgagttgaatttctacctgaaatgacctcagtagtttaggtaatacaagttctcacacttaaatttggaccttctagccacacaaataatagtgcatttaccaagtgctaacattagtgatgaacttgctttctgcagcagcacagcagcagctgattgagtatgaaaagaagctttttggttgtaatgatggcagcataccagctcaaccttttgctccagtggattcgctcccttctcttggatttggttttnnngaaaaccnnncaggcgacatccaagcgcctaccnnnaatcagcaggct

SEQ ID NO: 586 - DNA, 369 bp, Zea mays
atgcgccgcaagaaggatggcgaccttggccagctcccgctcccagtcccggccgcgcttctgcttgggccggccgtcgagtcgttctagccggcgctgtacattttttcgtccgcgggtggagctgtttaacctgctgtaccgtacttggtttttttttctttctcttccacttctatatttagtagttgtgctgtactatttagctagagctctgaattgtagaagctttattaggtcgagttaggtagtagagattaagatttccatggttgattaggattgttagggtatgtatggccatagtacttgtggtagtagttaagaacttggtgaggtgtttggcctgacctacgaggaatgatgttg

SEQ ID NO: 587 - DNA, 686 bp, Zea mays
caccctaatgttacaaaggtgaatattttcatgaattcctgtgcatgttcatgtctgtaactccggatagatgcttgtttatgtagtaaagctgttgatccttagcttgctgattattaccaaaatttgcccatgaccagttcatagcaggtatcttccataaaaagtttttccttttgtgctattggagaagtacttgaatgcattgtgttgttttttctcgcagtttgttggtgcatctatggggaccacagaccttaagattccatcaaacaattccaatggtgctgcacgtacaaatttgccagcaagagcatgttgtgttgtggtagagtatcttgctggaggaactttgaagcaatatttgataaagaatagccgacggaagcttgcttataaagttgtggtccagcttgcattggatttggccagagggtaaataacacttaagctgaaatactgccatgaattgttttctctgaatccactgctaactgtctggagatttcctttgcagattgagctatctgcactccagaaagattgtacatcgggatgtgaaaagcgaaaacatgctgcttactccacagagaaaccttaagattgccgatttcggtgttgctcgtgttgaggctcagaatccaaaggacatgactggtgcaacaggcacacttggttatatggct

SEQ ID NO: 588 - DNA, 251 bp, Zea mays
cgcggtggttgctaccacagttgactcctccgcgccgccgggggcggaggccaaggtcgccaattcttctgcagaaacaaggaggtgtaaacggcgagatttcagcgaaattcaaggaagtgagcccctaaaaaatcttgggacgcgaactgggtacagagcacggctccaacacgaagcaaacaaatcgccgcgcgatgggagggtgggagcgatggagagagagaaagattcggatttggattcgattg

SEQ ID NO: 589 - DNA, 499 bp, Zea mays
cctggtggccacgttcttcctcgaccgcgtcgggcggagaccgctgctgctcacaagcgcgggcgggatggtggtgtcgctggtgacgctggcctcggcgttgcgcgccatcgaccggctcccagagggacaggcgacgtcgctggcgggcgtgagcatcgcggcggttctcacgttcgtggcgtccttctccatcggcatgggcccgatcgcgtgggtgtacagctcggagatattcccactgcggctccgcgcgcagggctgcgcactcggcacggcgatgaaccgggtcatgagcggcaccatcaccatgtccttcatctcgctctacaaggccatcaccttcgccgggagcttctacttgtatgcaggcattgctgctgccgggtggctgttcatgttcttcttcctgccggagacgaggggcagcaacctagaggacaccgagaagctcttcggcggtggcgaccacgacgaggacaaggaagatggacacgat

SEQ ID NO: 590 - DNA, 588 bp, Zea mays
atgtctctcctgtggattggctgcctcatggacagtgtgctgttgagctctatagagagcagcgtcgcaagacatcgatatcacatgacaagctattactcaaggctgcaaaagaagctgccagacaactttggatgaatcacagaggtggtaaggtagaatatagatggatgaacacctgtggaaaggatggagtcctgacaagtgcaattaaggtagtaactcgatcacgaacactggaacttactttctgtctcttaatgaattacttataacacactcatattttatatgttgtgctatttatttcactatttcagacaagagttaaaatggagggtgcagcatgggaggtgaatgctcatttggaaagtaagaggatggacgaggactacgattccactgatcgggagtgcttttcatgcttctatgatctgcacttgtctgctgtgagttgccagtgcagacctaaccgctttgcttgcttaaaccatacaaaccttctctgttcatgcggaatggacagaaaaaccgtcttctttcgatatagcatggaggagcttgatactcttgtagcagctctggagg

SEQ ID NO: 591 - DNA, 355 bp, Zea mays
cgagaatcagagagcagtaggcatggtccacattcgtcaaagcgtgcataatcccaacatagcactaaacatgcagtcctatgctcctggtggctgcaaatccatggcaaaggatcttcttgagaggtaacgtagacataacactgagcggatcctaactctcgcttcactttatgagattgttgatcttatgcttctttattaattctaggttcttgctggcaagcggactgaatgagtttgttgacataagccaagtagagaagtttgtccagtagttcttatgcttattataggatcttagatttacctactctgtatatgtaacagctcagaacctagctaggagttcact

SEQ ID NO: 592 - DNA, 377 bp, Zea mays
gacgctagacagaagattcttgctgatggatttggcttcaagtgccgttgccttcggtgcttgtctggagactagaaaccatgtctactttcttcctgagcatgagtttgtcttcgattgtagcggattgaagcggttggtgctgaataccatcagaatcttaagttgcaatcttctgtacactagttacagccacgccaattgagttgtggttaagcattactttgccttttgcacttccctaccacgacatgctagaaatgttgtggtgtaaatgttgtagccgtttttgtttagcttcttgttcagtccttagtgtcagaaataaaatttcgataatactcggatcatttgaataccggaaaccttgtagctgt

SEQ ID NO: 593 - DNA, 574 bp, Zea mays
tcctcctcttccatggtgtcatccccatcatctccattgttatcatcatcatccttccactgactctccacctgacagcgatcacactcgcaccggaatccataatcctccagcagcctgcgctgcctatcagcatacctccaattagccgcaaagtagctgatgcagacctccctcccctcgggtatgtcatggagtgcacgcaccacaatgtcagtgttccctggcccaggcctgtcggggtaatcgaaatggcacgcattgggcaggcagtcatggttgaacagcgaagcacgggggtagactgcgtaggcccgcgccttcaggagctcgagcgacatcccgtgtcggtacggctccatgatggcgaagctgttgccccggtccttggcgaggagagccgccgttaggtctggcgacaatccctggggaagcatgtgcggcggcgctagggctgccacagcagcatggagccccgcggcgtcctgcgcgcccgggggcgggggcggcgccgaggagagagagagcatggagcgcatggttgactccgggagggagtaggcggagaggagga

SEQ ID NO: 594 - DNA, 503 bp, Zea mays
ggctgccctgtcttcacagtccagagacctggtaatcgctcaaatctcctactccctgaacgaacttggttgtccaatccaacttgtcctgacacaaaactgatggcactataatatcgctgctgaactgacgctgtccctgtctgtccatgaccagattcggcatcgctgggcgcagcgctgagagctgcccacgggtggctgtgcaacgcgcaaggtagcttcgtccccatctcgtgcctgtaccagggcaacctggagaagacctcccttggctcgaagctggcagtcccggccggggacaaggagcaggaccgggagctcctccagaagtacaccatcctgatgaggaagagaatggagatcgagagacgcctggtggagaagatcgggcgatcgtagggataaaaaaatcatgaagcgctgctgaggctggcaggaccgaataatttgtgaataagtatggattatctcgatcgtaggaaacaaattcatggcaggac

SEQ ID NO: 595 - DNA, 1296 bp, Zea mays
gctcgtattcgcctcatctcgcagcagcagcagaagaacaagggtatggcgaaggatgggggtcccgactggaacggcctgctcaagtggagcctcgcccacggcgacagcaccaacccgccgcgtgctctcaggtatgcaattcccgcgttcagatgccttgcttcatccccttgctctcgtcctgtgccacaaccctaatgactccgtgttcatcagtgcacatgcatagattttttttgtcttactccctgtactctagattttgctgttttactgcgcgttcctttttcccctaattttaatttgtgtgactagtaggtttaatatctgcttccaaaattgctgcgcttagttgaagagaagtggaacaaaatgttagtgtggttcttaatttcattggtttggttctgcagcgaggaagacagaaaatggttcatggatgctatgcaagccaacacggtagatgttgtgaagaggatgaaggagatcactcaggtgatgaaaacaccagaagatgtcttgcagtctcagggcgtgacccctgagaacatcgaaggtattgtctggtggcattacaatgcttccttagttgattttattttctctacgaaaatggcttggcccatttttgattcattgaccttttgttcagttattgcttatatgtttagtaatcggtgaagatcctcacacttctagtctgactaggttctttattgcttatatggttagtaatcagtgaagattctcacactcacttctagtctgactaggaacacgagagtatttagcgcagcagcagcatgcacacaactcttagtatgtgcagcagggtgtggtagcaagatgtggaaacacaataaacaaagaaacaatgtgattgtaatggtctagggctctaggctgttaattgatctgccaaatgatttccgtaacgctcaaagctaacagcggatgccctaagtactattatatttctttggcaaaagaaattcatagttgatggtcatggtcatataaggaattcatgattgatggtgtttatgtgctttcgcttgcctgctaaatgacgtctccaatcttatttggtcgtgtatcctctttggagattgactttatgggcattggtatttatcatccttgttatttagttcttggtgttggatccggaataaaaaattacttactctattttcagatatgttggatgagctacaggagcatgttgaatccattgacatggcaaatggtaagatacatagttgtaatcatcattctcttgtaaatgcttgt

SEQ ID NO: 596 - DNA, 703 bp, Zea mays
catggttgctcatctttgtttgtcgaacctctgaaatggatgactccaggtaggcttgatgttattaccttcctcttggagtatgaatctgtatggctgatgaaatttttatttgtgttgtgcaaagaaaaaaaaagccatataagtcctgcgcatatggttggttcctattgaacccatatacagagtatgatgcttaggtcaccttattactgaaacctgaataagtgaatatacttgatgtttgagcaattgcacaccctgtttggtcttagtagcacggttttattgccccatccttcgttaactaaaacttacatggtttcacctgcgcctttgttcacctagcagtagaagacggcgctttggagggaaagctatcatgcatccactgtggagctcggttgggatacttcaactggtcaggaatacagtgcaactgtggtagctgggttactcctgccttccaaattgttaagagcaaagttgatatcagcaccatctagacctgtgagcaaacgactggcaagtttgagggacgaggagcgcgacagcagtgacgcctgacggtttaatgttttgtgtaccatatgaacgctacgtatacaggtgaagcaatagcgtattttatgtttttccattgccgatcagaagctgtgtgtgacaaataccgtataaaatttcgcatttgctgatgtaacaa

SEQ ID NO: 597 - DNA, 427 bp, Zea mays
gaattcaacgtggtgtttcccgagcctggtgcgctctcccctgcccagtgccgatcgttggagaagatccttccgccgaaaccagggagccaactgtcggacatggagctggaccagtgcgaggagaccacccttcacgatgtcaacattgaagaggagatgaggcgcaggcagcagcagaagaagcaggaagcctacgatgaagacgaggaggaggatgctcaaccaagggtgcaatgtgcccagcagtaaaatccgtgttcgttggaactgttctccaaaagtttcagcaggattttttatccatctgatcatctcgattctttttggcaaaaatataatcgttttataaactttaaactgttagttccatcctagtgtcagggaaaaaatgagagcccggaatggcatgttccttgtttgaact

SEQ ID NO: 598 - DNA, 720 bp, Zea mays
aaatcttcggctgatcattctttcttcttttttcagcaagggctcgaagtctggtgcttcaatgaggtgccctgggtgccagggctcaggtatgaaagtcaccattcgtcagctggggccttccatgatacagcagatgcagcagccttgcaacgagtgcaaggggactggggagagcatcaacgagaaggaccgctgcccagggtgcaagggtgagaaggtcgttcaggagaagaaggttcttgaggttcatgttgagaagggaatgcaacacagccagaagatcaccttccctggtgaagctgatgaagcggtatgcttgttggagcatcagcgtgataagatctaaaggtctcttttttatgatttcaaaattatactgatatgttttgttactcgcagcctgataccgtcactggagacattgtattcgtcctccagcagaaggaccactccaagttcaaaagaaagggtgaagatctcttttatgagcacaccctgtctctgaccgaagctctatgtgggttccaatttgttcttacacatctggacaacaggcagcttctgatcaaatcaaaccccggcgaagttgttaaacctggtaagccatatcaaactgttactctgcctctgcagcaactgtatctgtcgctaatccttgcttgataaatctgagcagaccaattcaaggcaataaacgacgaggggatgccgatttac

SEQ ID NO: 599 - DNA, 676 bp, Zea mays
tcccgttcgacgaccggaacatcgtcgttctctaccagaaggtatactgggtcaatcatcagataaaacccgtaaaagccgaagcggtctttttgattatgctcttgcctactttacaatttaatttgccgggtctagattttcaagggcgatgctcagatcccggagtggctctctcccggcgcacggaaccttctccggaggatccttgagcccgacccggcggagcggatcgccatggcagagatcaaggcgcacccatggttccaggagcactacgtccctgtccttcctccgtacgacgacgacgacgacgacgacgattcagtgaagcaaatcggtgcgggtagtaaaaccactcatcacatcaacgcgtttcagttgatcggaatggcgtcgtccctagacctatcagggttttttgaggaagaggtacggtgtggtgtgtggacaacaaacatcttgggaacttccttttcttttttttctttttttttcctcctccatcacagcgatttgcctcttgctcatcaaaacagttcgctgcactactactgatatatagaccacagactgactgaattgagctcagagtaaactgttcttctaactctctgctgcaggacgtgtcccaaaggaagatcaggttcacgtccgcacaaccgcctgaggattt

SEQ ID NO: 600 - DNA, 441 bp, Zea mays
gtgctactacatgtactactacatggttcacttccatttcaagggggctctctggacgcggttttcgagtccataaagacacttgaacttgatttcagcagcaccccatgggaatcaatatcagttcttggacgggatcttattgggcgaatgctaaatcgagatgtctcttgtagaatgactgctgatgaagttcttagtaggttcaaacttcaaagagtctcatttagtgttgttatatttttttagaatttctttacttactgatacctatttcaggtcacccatgggtcgtgttttacacagaatgccccctgaaggtggtagctgctaatttgtgtctccctaacaaggttatagcacccaaaattccatggggcagacacaaatcagaatgtgactcattgtcagacgcaagccaaaggtcagaggatcaggatg

SEQ ID NO: 601 - DNA, 602 bp, Zea mays
gcttctccctagcttttgcttgctcttccacagcgcaaagctccgagatgatgatcaggcgaggcagcagcaacatctcctcacccctcgccctcctctgcctcctcctcctcctcctcctcctcgtctgctcctcctccaactgcgcggcagctgctcgcctcctgcctgccggtcctctccctcctctccgtgccgccgcccccagtggcggcgacgagcattccgcggcctccgaggtgacaacacaagacgtacgacgacactgatcaaatccggtgctcttcactttgagcgtttgacccctctttctcatcatcctgcttctgcatgtgcctgtgcagacgacgaagggagcggaggcgtgcgaggaggggaacgacgacaaggacgagtgcgtgcagaggcggctgctcctcgacgcgcacctcgactacatctacacgcagcacaagggcaagccgtgacggtcagcgaggagaacggtgctttgcgcatggtggagtacgtagatgaacgctgctgcggctagttaattaacatccggacggacgttgtcatccgtctagtagtagtagttagtatatatctatataatggct

SEQ ID NO: 602 - DNA, 542 bp, Zea mays
  misc_feature (532)..(536): n is a, c, g, or t
ctcgtgatgactgaggaaggtgacgctgacgccacgagcaatggcaacgacgacgacgagatctcctccgtctcagagtcagaggtgagtcaaaagggggagaaataaaaaaaaaaaagagaagaaaaatccatcgtccgtcccgacaaatctgcaagccttggttgggtgggttgggtgatgtcatgtcagtggagacgtacgagtacggcaggctaagaggcaggcaggctgcaggcatgcagctggctaatcgaagctgacctttgtccgtacgtgtcctgtctgtgcagacgacgggcgcagaggaggaggcgtgtgggacggagggcgacgacgacgacgaggaggagtgcctacagaggcggctgctcggagacgcgcacctcgactacatctacacgcagcacaagggcaagccgtgagccgagcccgtgaccaatgcatctcggcctcggcctcgccggtttgcatggatggcttggtttgttcagagtgcgtacattacatgcatgctgctgggaagaagtcnnnnncagacg

SEQ ID NO: 603 - DNA, 675 bp, Zea mays
caatcttattattcatgttgttatatgctctatttctggcttttattgtgtcatcatttgtgcttggcattatgtaccggtttccatattgtactcatgcacttttattctttgattgcctgttggtgcatctatattatcttttgcagcattcaaaatacgtaacatcttatgagtttttgactatttaagattcttctagatctttgctattaaagaattattttgacatgttaagtgattttttattgtttgtgttacacaggttgatacaatgatcattcaagccattggattattggatgatcttgacaaggagcttaacacttatgccatgagagttcgtgaatggtatggctggcactttccagagctcaccaaaatagttacagataatatacagtatgccaaagttgtgaagatgatgggcaacagagttaatgcagtcaaccttgacttctctgaggtgattattgacatctaaatatgatatacaattcatataaaagacattgtttagtaaggtctgttgttttcagatattgtcagatgaagagctagaaacacagctaaaggaggcagcagtaatatccatgggaacagaagttagtgaccttgacttatcgaatatcagagagctatgtgatcaagtgctggccctttctgagtacagag

SEQ ID NO: 604 - DNA, 405 bp, Zea mays
caccccttggcaccaattgaagacaagatcgattgtatgtatgctaactgcagaaacggtggtcaatataataataataataatatgtaggcttttttatatttatatttgcagcatgcatttcgtatgtttcagttgcatttaggttgtatgacttgagacaaactgggtttattgagcgtgaagaggtaagctcgcaaagatgttctgtatctatgcataccttttatgtggattcttttctagtaaagtggctaattgccatgccttgccttataggttaagcaaatggtaattgctatattgatggaatctgatttaaaattatcagatgacttactcgaggccatcatagataaggtaggcaataatcagctggaatgcccccaggattttttttttttt

SEQ ID NO: 605 - DNA, 231 bp, Zea mays
  misc_feature (217)..(217): n is a, c, g, or t
  misc_feature (220)..(220): n is a, c, g, or t
atgtatctcagatttgttcaagcactcgatgtcttttcagacgcgcacaactgctgccacggatgagattgcagcttatttggttttggttgtttaactgatcggttttaatttctggtgtgattaattggtagggggagattagtttagtcctgtccccggcgccggtgggatccaagcagcctaggtcaccggaccatcaccatcaccagcaggnggncatggaggagt

SEQ ID NO: 606 - DNA, 493 bp, Zea mays
attgccttggtaaaggtggtcaattagcggctgcttataagcttttctgtgagatgattgaaaatggctgcacacctaaccttgttacttacaatattatgattgcgctccaagccaaagcaagaaattatgagaatgttgttaagctgtacaaagacatgcaggttgctgggtttcgtcctgacaaaataacttacagcatcgttatggaagttcttggtcattgcggccatctggatgaggctgaggcggtttttattgagatgaggcgtgattgggctcctgatgagccagtatatggacttttggtcgatctctggggcaaagctggcaatgttgacaaagcgctaggatggtaccaagcgatgcttcaggatggtttgcagcctaacgtgccgacctgcaattcgctcttgagtgctttcctgaagatgaacagatttcaagatgcctacatcgtgctccagaacatgcttgctcgggggcttgttcc

SEQ ID NO: 607 - DNA, 380 bp, Zea mays
gcctacgccgtcttcgcgggccgcgaggccagccgcgccctcggcaagatgtccaaggacgaggccgacgtctccggggacctctccgggctcaccgacaaggagctcggcgtcctcgccgactgggagatcaagttccaggccaagtaccccgtcgtcgcccgactcgccgccgacgcctgaactcgtcagtctcggtctaaatttactctgtcctgcctcttgcggtgttcagtgctgtgcttgcttgcttgttgctagttgctttgctacccaataatctgaatggaaggacgtatgtgatgtgcctgctgaatagctcgagctcctagtccttgcatacactgctgtgctaccacatgacatgatgtactcgtgtg

SEQ ID NO: 608 - DNA, 540 bp, Zea mays
gagaagagcggctaccagaacgaggaggcgtacgctggaactggcgcgggaggatacggcgctcactatggtggtggccccgccgtcgctcagaagcaaggctacaggcagggcatatacgagagcgagagcgagagcgaaagcgagagcgagagcgacgagagcgactgcgaggaggcgttcctgccgcacggcggccggacgccgcagggcggcgtgcagcacagctacggctacgggggcggggcgtacatgcaggagaagcacggggctggcaacctcggcggggtgcgccgctacgagtcgtacgagagccgcgacgatctcggcggcggacgccgctacgagtcatcctaccagagcaccgtccagtacaccggctccccgaccaagaaccgccacgtcctacgctacggcgcgtaggcatatatacgctctggtccagttgcattgcagcacgtgcacctacgtatattcctatgccgcgtcgtgtgactcgtgtcgtataggcaggcggcaccgctacttggtgggccttgt

SEQ ID NO: 609 - DNA, 223 bp, Zea mays
tagttacctttacactccagtcgtcggataagaagaatgttcagcggctggctaaacagtctcaactgctgcagctattcaaattagtgttggagatgcaatttatagagataaaatactctagaagctatcgctgtagccggattaaattctgacctacttgtatagttttacacttacacagtgcaagtaataatatttaaggtagaagcagagagcactc

SEQ ID NO: 610 - DNA, 775 bp, Zea mays
cagcctacacgaggctgcccttcggtttcgcttgcttaggcagcaggggttttgggttcctgcaggtacggtgcagagcaaaatcagaagctataaaaattaatataagtacctaatgacataaataagtaatgttatctacttaactaatatcagggtattttttgcagatgaacttgtcaagttcatcaagaacgaagacgggagctttatcgatggtataaccaatgacccaaagggcctgttgagcttatacaacgcagctcaccttgttactcacgacgaggggacgacgacactacttgaagatgccatctcgtttgcaaggcagcatctggaagctgctaggagatgtagtctcaagtcccctctagctgaacaagtcggccgtgcccttggtatcccactgccaaggaccttaaagagggaggaagcaatagcttttatcccggagtatagctcatcacaacaagatcaacaagtgtacagccccgtgatactagagcttgccaagctagacttcaacctccttcagcatctccatcaagaagaactcaaggagatttctcagtaagctctgtactgtttttttttacatttcaatatatattgacatgattaaagtacgtacgtacgtacgtacgtacttaatggcagatggtggaaagacctctctggagaaatcggattaggctacgtcagggaccgcatcgtcgagtgttacttttggtcgtatactgtgcactacgagcgagggcaagcgcgtgcacggatg

SEQ ID NO: 611 - DNA, 1023 bp, Zea mays
gcatgtcatcagatataagtgacccttccacacctaggaaagttgaagatgccaagaacatttccatatataacgatgtgattgccttcacattgtttgagctagagacaatcacaaagagcttccgtgttgattatgttcttggcgaaggaggatttgggaccgtttacaagggttacatagatgaaaatgtcagggttgggctgaagtcactgcctgttgcagtcaaggtgctcaacaaagatggacatcaagggcacagagaatggcttgtgagtggaaacgttgttcagtaattttcatgctcacttgatcagtataccttttcattatatgcatggaaacatgagaaattgtctactaacatggacacatggtgtacttgtacactatgcatggcacattgacatggatacatgtagatatcattaggtccatgttgctaacaagcatgccggcaaataaaatacacatattggggattccatgcaatcatttttgtttctccatggctgtctggattagttctcactactttgttgcagtgttttgttgaccatgacatgggaaatagacaagctgataaggttatcaataatgagttcatgctcgtttacagacatgtgcagtccttgagtcatgctgttgttgacaaataacatattttatttgtcatgcttgaaaaatttaaaatatggtagcttacttgcatgaccggaataatgaacattaccgagaaaagaaacttgtggcgtgaagatggaaatccatgagaaaatgtgaatttatattcgaaaggttaagcaattgtatgtagctgcctgtaaaatgccattgagttatttttgcacatggtttgatagttatcatgcttattgctagcctacaaaattattgtgccagtattgttctttgctcaaaacaatgtaaaaaatggtttatccatcttttgtgtttatgtcagaccgaggttaactgcctggggcagttgaggcatccaaatttggtgaagttgatcggata

SEQ ID NO: 612 - DNA, 519 bp, Zea mays
agaagccgtagccggcacgccggccataaccaaccacctccgccggagcccagagccattcccctggtcggccacctccaccacctcctgagaaagaagccactccaccgcaccctcgcccacctcgctgagcgccatggagacgtcctggggctccggttcggttccagccgagtcgcagttgtgtcctctgcctcagtcgcccagcagtgcctcgtcgcactggacacctcgttcggcaaccgtccacggctgccgtccgcgaggatcctctcctacgagtggtcgaccatgggccattccaactgcgggccgtactggcgccaagcccggcgcaccaccagcacggagttctcctccgtggaacgagtgcagcacttcgctgatgtccacgagcaggcggcccgggccatggcacgccgcctttgtcgtctggcacttgcttctggccggggacgcgctcttgtagacgtcaagccacggctattcgagatgctaatgaacggcttactggacatg

SEQ ID NO: 613 - DNA, 538 bp, Zea mays
caccatgtcaatattgtgcgcctcatcgggttttgctccgaggaaaatagcagggcacttatctacgagttcatgccccatggatctctcgataagtacatcttctcgccggagaagagtttctcatgggtcaaactcaatgagatcgctctgggcattgctagaggtctcaactacttgcatcatgggtgtgatatgcagattgtacacttcgacatcaagccacacaacatccttcttgacaacaactttgttccaaaagttgctgattttgggcttgccaaactgttcccaaaagatgacagtttcgtgccactgagcgctatgcggggaacgataggatatatagctccagagatggtatctcgaagctttggtgtcatctctagcaaatccgatgtgtacagctttgggatgctactattggagatgacgggcgggcgaaggaacgcagatcctcatgcaggaagctccagtcaagcatactacccatccttggtgtacagccagctgagccaaggagatgcgaacgagatca

SEQ ID NO: 614 - DNA, 533 bp, Zea mays
gaagtgtggtacgggcggggcggtatggccagctcgtggacgctcctctccagcatctccagcaccctgctcatggacggcctgctggcgggcacggtctggatgcaccagagcccgatgagcgccatcttcctcgcgatctcctcgcctgccgctgcttctccggagcctcccgcgccgccaccgccaccgccccgaagcacgccgacgccgtcctcaagcagcaggtggtcgtacacccagagcgggaagaagagctcgccgccgccgctggacttgtcggcggcgcaggccttggcgttgctcctcccgccgaccatctccagcagcagcatcccgtagctgtacacgtcggacttggtggagatgacgccgaatccgcgggagaagacctccggcgcgatgaagccgatggtgccgcgcgcgtccgccatcgacaggatgctctccttggggttgcacagcttggccatcccgaagtcggcgatcttggggcggaagtcggcgtccaggagcacgttctggggcttgat

SEQ ID NO: 615 - DNA, 583 bp, Zea mays
atatattattacacacaagtaaactgttgattttgatgcatgtgtgcatgagtgcaggcaatgtgtattaccccaacgctggtctgccgcctatgtggcagcaatatggcagcaacggcagcatccctccgccgggatggcaccatcacggcggcgggaacccgctgtcgccatcgctgggctcgatggcggcgcccctgagcggcgagatgtactcgtccggcccccacgggcctcccctccccccaccttcgccgaacgtggcgctggggttctccaagagctccttctcgtacgaggagctcgcggcagcgacgtcgggcttctcgtcggcgaacctgctggggcagggcgggttcgggtacgtgtacaagggcgtgctcgccggcagcgggaaggaggtggcggtgaagcagctcaagtccgggagcgggcagggggagcgcgagttccaggcggaggtggagatcatcagccgcgtgcaccaccgtcacctggtgtcgctcgtgggctactgcatcgcgggcaaccagcgcatgctcgtctacgagttcgtggccaacaacacgctggagcaccatct

SEQ ID NO: 616 - DNA, 524 bp, Zea mays
ttgctgagagtttgggtatatacgactgcagttaatcatggggcggtcgacatggctgacgactgctgccttgctggtggcactcatcgccgccgcctcctcatccgtggcactcgcctcgccgcctgggaaacttgaggtcggtttctacgagcactcgtgccaacaggccgaggacatcgtgcgcaacgccgtccgccgcggcatcgcccgcgagcccggcgtaggcgcggggctcatccggatgcacttccacgactgcttcgtccggggctgcgacggctccatcctcatcaactccacgccgggcaacaaggccgagaaggattccgtggccaacaaccccagcatgcgcggcttcgacgtcatcgacgacgccaaggccgtcctcgaggcgcactgcccgcgcaccgtctcctgcgccgacatcgtcgcgttcgcggcccgtgacagcacctacctcgccggcggcctggactacaaggtcccgtcgggccgccgtgacggccgagtgtccaaagagg

SEQ ID NO: 617 - DNA, 314 bp, Zea mays
  misc_feature (309)..(309): n is a, c, g, or t
aggatatatcgcgcaacttcgtctagaccaggacgcctactcaggtggccagccacgcgcagaagtacttcatcaggctcaactccggcggcaaggacaagaggaggtccagcatccacgacatcaccacggtcaacctgacggacgatcagccgccctcgccgtcccagtcctccctgatcaccagccagtcgaacgcaccagctccagctccggccgcggggatatgccaggtcccattggcgcccgacgccaagcgacatggtgccggaactctgcccttcagctcactgaaccggacctctgtcntgccg

SEQ ID NO: 618 - DNA, 566 bp, Zea mays
tcatgatcgagcttggcaagatcctcggcgcgcggggactgtccgtaataattgtcgtcgtcgagcctcccttcaacacgggcgctacggcgcctttcctcgccggcgtctccgcggccaacccgtccatctccttccaccgcctgcccaaagtcgagcgcctcccgcccgtcaagaccaagcaccaggaggcgctcaccttcgaggtcacccgcgtctccaacccgcacctccgcgagttcctggccgccgcgtccccagccgtgctcgtcgtcgacttcttctgcagcatcgccctggacgtggcggaggagctccgcgtgcccgcctacttcttcttcacctcgggcgccgaggtcctggccttcttcctgcacctcccggcgatccacgagcggaccgccgcgagcttccaggacatggggaaggagctcgtgcacgtgccgggcatcccgtcgttcccggcgacgcactgcatcctgcccaccatggagcgcgacgacgtggcctacgacggcttcctaaagggctgtaccgacctctgccgctcccagggcatcatggtc

SEQ ID NO: 619 - DNA, 554 bp, Zea mays
ggctcggtcgtgtacgtcaacttcggcagcatcacggtcatgacgcccgctcagctcgccgagttcgcgtgggggctggcgaactgcggcaggccgttcctgtgggtcatcaggccggacctcgtcacgggcgagaaggctatgctgccggaggagttctacgctgagacgagagagagagggctcttcctcagctggtgcccgcaggaacaggtcctgtcgcatccgtccaccgggctgttcctgacgcactctgggtggaactctacgctggagagcatacgcgccggcgtgccgatgatctgctggccgttcttcgcagagcagacgaccaactgccgatatgcctgcgcgaactggggcattggactggagatcgacaacaatgtcacgagggacgaggtggcacggctcatagaagaagccatggacggcgagaaaggcaaagacatgaaggcgaaggcaacagtgtggaaggagaaggccgtggcagcaacagaaagcggcgggacctcgagcgtcagcattgatcgtttggtcgagttcctgcttga

SEQ ID NO: 620 - DNA, 564 bp, Zea mays
cgagttcgcgtgggggctggccaacaccggctactacttcctatggaacgtacgcccggacctcgtcaagagtggcgactccgccgggctgccgccagagttctcagctgcgacagagggacgaagcatgctgtctacgtggtgcccgcaggcagctgtgctggagcatgatgccgtgggggtgttcctgacgcactccgggtggaactccacgctggagagtatttgcggcggcgttcccatgctgtgctggcccttcttcgccgagcagcagaccaactgccgatacaagtgcaccgagtggggcatcggaaaagagatcggtgacgatgtacagcggggcgaggtagagtcgctcatacgggaggccatggagggggagaaagggcaagagatgctccggcgcgtgactgaactcagggacagcgccgtggccgctgcagggcctgacggacggtctatgcgcaacgtagacaggctcatcgaagaggtgctcctagcctagattgagcactggtgagcatcctagcagtcatgtgtcttcgcgtctggcactccaatcga

SEQ ID NO: 621 - DNA, 752 bp, Zea mays
  misc_feature (722)..(730): n is a, c, g, or t
ttatgaacgagtacgtgccttgaaccttgattatgtttgactgtaattaaatgtttgttcctgaccaaggcattgagaaagctttgttcttgttccagaaactacaaccctgtagaaaggaggtcaaagggatgcaaagaacgtgtctcaaagggttccaataagccatctaaatcattgcaagccaataggctttctggtgctgatccaacagatggaggtgcagagtctatctgatcattgattaagtgcttgtctaactaaatcatgagggtgcatctagcagccttttttttctttgacatacgcataggtagtgctactacacagtgtgattgttattgttctgaaatgatgtaactgttagagctggtttgggagtccaaaaaccggaggggattggagaggctaaaatcatcttctttttcaaaattgaataaggaggggattttagcccctctaatcccctccggttttgtggctctcaaactagcccttagagggaattactgctctcaaccctttgtctgcttagggatgttgtaaagggcgtacccagtgccgtaggcttcccgcactgtgcggggtctggggaagggtatctttaagcgccaagtcttacccgtataaaatgcagaggtttagggatgttgtaaagtttacaatttttatgcttctgtttgttattaatatctacatgctaatccaattatgcaggccannnnnnnnngaaagtatgtaacactttttct

SEQ ID NO: 622 - DNA, 814 bp, Zea mays
cgcgtcatcgagtccatcaagcacatgctagccatccgtatggacctcggcgaccccgacttcgtggacgtgaccggcgacgtcgccgagatgctgtccacgacattcgccgacaaagtccggcagaggatcgtggacaacacgacgttccctcccggctactacttccccaagtacgtatgcctaatttggcgttgcggattctatcggtcgcaggctcgcagccttgcagccagcggcgggcatcactcattcctgttctggttactggcggcaatggcatcaggtggagccagctggacgaccacggcaccagccacctgtgcgtggtggacggcgaccggaacgcggtggcgatgacgacgaccgtcaacgcatacttcggcgccaaggtgctgtctccgtcgacgggcatcgtgctgaacgacgagatggacgacttctccgtccccgcgaagcgcacgccggaccgcctcccgcccgcgccggccaacttcatagcgcccgggaagcggcccctgtcctccatgacgccgctgatcatactcaaggtatctctattctaatcgccgcgtgccgtctggcttgcactgcatgagctgagcccgttggtcgtctcagtctgacggcacgagcacgcacgtctcgctccgtaccgaagctgaaagccgttgagctgtgcgcgcaggacggtgagctcgccggcgtcctcggaggcagcgggggcacgaacatcatcgccacggtggtccaggtgttcgtgaaccacttcatcgtcggcatggaccctctggcggccgtccagcatcccagg

SEQ ID NO: 623 - DNA, 769 bp, Zea mays
  misc_feature (741)..(741): n is a, c, g, or t
  misc_feature (760)..(765): n is a, c, g, or t
tgctggatctgaatgcacggttgctggtgatattccgtatctagtaaatcacttgaaagatgaccataaggtcgacatgcacaatggaagcaccttcaatcatcgttatgtcaagtcaaatcctcatgaagtcgagaatgctacctggatgctcacggtaatggtcatcgatctctatactgcagaatctagtaaataactcatgtatctaggatcccagttctttatttctgtaaacatgatatattctgattgacctgaacccctgggacaatttcgtatatgtagatttcattgatttggatcttagcgttgagttcatgtttttccaagtgcacaattgtcagcatcactagcactgatacatactgctaaaaagctgcacgcttgccatcatcagctctgtgagtcatggtactcactacagacacaaagtgattgcttgccatcatcagctctacctgtttttcttctctgggtaaagtagaatatgcgttatagtagtgccttcttttttaaaaagggacgggtatcccaccttttgaagcctgtgttttggttttggttttcgttcccatgggagaaccgagtatatgccgtagctaatcacacactcatccctccaggttttcagctgcttcggccagtacttctgcctgcacttcgaggctttccagctgggcatggcgcccgtgtacatcgccttcctccggttcatgggggacgacgctgaggccaagnactacagctacagcctggnnnnnngggg

SEQ ID NO: 624 - DNA, 587 bp, Zea mays
agcgcgagatcgctgtgctacgccgcgtgcgccacccgaacatcgtgcacctgttcgaggttatggccacaaagactaagatctacttcgtcatggagctcgtccgcggcggcgagctcttctcccgcgtctccaagggccgactcagggaggacaccgcgcgccgctacttccagcagctcgtctccgccgtggggttctgccacgcccgcggcgtcttccaccgcgacctgaagcccgagaatctactcgtcgacgagcaggggaacctcaaggtatcggattttgggctctccgccgtcgccgagcagttccgtcccgacggcctgctccacaccttctgcggcacgccggcctatgtggcccccgaagtgctcggccgccgcgggtacgacggcgccaaggcagacgtgtggtcgtgcggtgtcatcctctttgtgctcatggccggatatctccctttccatgacaaaaacatcatggccatgtacaagaagatttacaagggcgagttccgctgtgcgaggtggttctccaaagaccttaccagcttgctgatgcgcattcttcacactaatcccaacact

SEQ ID NO: 625 - DNA, 526 bp, Zea mays
ctccggaagcagcaagccatcggcgccatcttcgcgccacctcccccctccgaacccaccgccggccatgccgattgccgtcgtcacgacatgacccgctcctccaaggacagccacgctgcttgcctggccgacagcacaccagcggctgatgaggtcgtcacccagctcatcgcccagcagttcgccgccaccgacggcgacacctcgtcgtcgtcgtcgtcgtactcgtacgcctccagcacggacaacatctccaagctgctcaacggcttcatgatgaagagcgcctcgccggcgcgggacgacgctaccgacaccatcaagacttcctcggccattgacatcgaccctttcgaccacaagtccggcggggcactactaccaccacccaagaagcggcagcagcagcagcagcatctgtcctccatagagaactggttgttcgacgatgccactgagcaggtcgttgtccagctgatggaggagatctccggcggctcatgctcagttcccatgctgcttt

SEQ ID NO: 626 - DNA, 431 bp, Zea mays
tgtttttcctcctcccgttcacctcgccgtcgacggggccaggcggccgaacacatccttgacgaccgccgtcgccctactcgcagcttcctgggtttcatcggatcctctgctagcgacgagcaccccctacaccaggtattccccctctccttcccttcctcgcaaaactgagcatccgaaccctaccttaagctatttggctatttgtattcagatctgacaagtatttgcatgtattgtgcctactaacttcgttttttctggcaaaaattatcgggtgtgctgctgacgcacacacgcaaggccgttacttgggcgccggtgccatgcccggcgggtcttcgggtccagatggtgaagtggatgcaggatttgcgaagctccagggagaggatttcgagtattacatgcaaacgtactccatcatg

SEQ ID NO: 627 - DNA, 355 bp, Zea mays
aggttgagtaccgtacagaatgcacatcgaattgctgtttgttcagagggcaggataactgaactggggacacaccgagaactggttgctaagggaggcagttatgcatcacttgtcgggacacagagacttgctttcgagtaatcacacgtcaactgcgaggaacggatcgactgcaatgtaggggattctatatattactctattttccttcagggcccatcggaacataggaattctcgtggaaatcagaatgaatttcatgggtaaaatatagaaaacagaagatgaaaaaaaacccaccttctgaatgtggccttggttataggttgtttcttatccacagaagcaacac

SEQ ID NO: 628 - DNA, 814 bp, Zea mays
  misc_feature (753)..(755): n is a, c, g, or t
  misc_feature (763)..(773): n is a, c, g, or t
  misc_feature (781)..(795): n is a, c, g, or t
  misc_feature (797)..(811): n is a, c, g, or t
tcttatgttccagacatctattggccccactggtcttagcgtggggtgagaatatctccattctctctgtggttatgttccttttgtgttgattggctaaaaaggttcaattttgtgtggcggaaataggtatatgcgaccagagaccgcacagggtatttttgtaaacttcaaggatctgtactattacaatggccaaaagctcccttttgcagctgctcaaattgggcaagcttttagaaatgaggtttgtgtttttttgccacatttctaaatggctaccccattttactcaattatggcatgattcagtcactgcttgttcagtgcctcgtactttgttcttgaaataataaatgttctacactagctttgtttttgttaatatgcttggaataatttatgcattctgatagttgacagtacatttgttacttgttatatagttagcatgcttctaaaaagcagttattggctattcaatagttgcttagatattcctttttttcaagtactcactatgtctagaacttgacaatcagatctcgccacgacaaggacttctccgagtccgtgaattcacattggcagagattgagcattttgtggacccagaggacaaatcacatccaaaatttgttgatgttgctgatttggagttcctgatgtttccaagagagctgcaactctctggggagtcagccaagctaatgaagcttggggaagcagtttcaaaggttaacaattgctggnnnttttctcnnnnnnnnnnntgatacannnnnnnnnnnnnnntnnnnnnnnnnnnnnnttt

SEQ ID NO: 629 - DNA, 714 bp, Zea mays
acttactgtgtttgtttgctcttagattacataagttggattatggtaaaatgatatgagggtaaaataatactttaaaatcataaataagctgaaataaactagtatggatagtttatttgtgatgcaaaagtgatatttttctctcctactattccactataattcaatttatataatataggaggaaacaaacaggcccttacttttagaggtgctgcatgtatgcacgattatgatggggactaaggatggttctgtctctgttgctgcagggaataatgtgctctggagtagcttactacgtgcaagggatagtgattaaggacaggggcccagtgttcgtgactgcgtttagcccgctctgcatgattttagtgactgtgctaggctccttcattctttctgaggtcgtcactttaggaaggtatgtatacgtgtctgacccaagatcaactactttcatacatcattgactgcgcgtaatttacaaagacatgtgtgtaggctcattggtgcgacagtcattgttgttggactctatgcgctcatctggggcaagaacaaggaccatgtgaagtcgcaaaacagttttgacaagcacgacacatttgagctgccgttctctacttctgccgttaacaatacaaccggtcccgtcctggcaacatctatttaaggctcgtgtccatgtgacttcctgtatcccgcacc

SEQ ID NO: 630 - DNA, 833 bp, Zea mays
tcggtttagtcgtgggcattgaatcgatttctattcctcgatggagcttttgctgatgcttttggagacgtgtttgtttcgtgtagacccctgaagcccataaaaaagcatggaaattgctgaaggtaggtgcaggcatcaaacggtagtttcttgaaagtcatgtgcttatgtacatacagtccgtctcacggaattccattccatcccagggcgcagatggcgtactcgtccctggagggtttggggacaggggagtccagggcaaaatcctcgccgcgaaatacgcacgcgagaacaacgttccttatcttggcatctgcctgggaatgcaaatcgcggtgatcgagtttgcccgctcggtgatgaagctacgaggcgccaatagcacggagttcgatccagctacgacgtcaccctgtgtcatcttcatgccagaggtaggtcatgcttacttggtggtactgccattcatttttgaaccgcgaacttctgactgacagcacttccactccacgtacagggctcaaaaacccaaatgggagccacgatgaggcttgggtcgaggaggacctatttccatgtcagtggctgcaaatctgcgaagctgtaagaaaacactagccctcatgttttcttcagtctagcgcatgattgtacacgtacatttgatgtggtgaaacataaccgttgtaaatatgcatcaggtacggcaacgccagctctgtagatgaaagacatcgccacagatacgaggttccgtgatctaatcgatctattagccatatcgaataataataataatgcatgccactgtttatctttttttgctc

SEQ ID NO: 631 - DNA, 575 bp, Zea mays
aatctgcggcgcaaccttccaggtaagatcggttcctttctcgaagaaagaattcagttctatgcatgcactagttcgtcaggcctgcatcatcatcggtctcatgcgatgtttggaaaggaaggatccagagaccagaggttaacttgaaatggatgctacacaattcagatgttggcagtgagctgaaaagcgtaactgaagaagaagaagaagaagaaagaactcctacaacatttctctgaaaaacctgtactcttgttcctgcactgcaggtggaaggagctacggtgctcacagcgctgcattaggagatgaggtgtcttcctccgtctccaggcctggactgggggcaactgtacatgatgcctggtggtgtaatataacataacggcaatggcatatgcagctgatcctggtctgcctgtatcatcatctcctcccacccgtaaagagaagttctttctgccgccatcgccatggtcagtcagagcttctctgctatagctgctggatgtgttgtgtgttgcgtctgtatcgtctctagtttgttcgacttacgtggaaacctgaga

SEQ ID NO: 632 - DNA, 583 bp, Zea mays
atgcttgtaacgttgttgactgattatcgttttgggttgtttgtagcaagaactttttggacgtggcaaactagttatgctaaggacttgcaaccaacttcttcgcagactatcgaaggttagattcagttgttctgctgtgcccaccctttgaagtttataaattatatttgctgttgttcccacatttcagcttggctaaatggctattttgttggccagctgattaccttagttaatctcgtatgtaaaaaataatcccctaccctaacccccaaaaaagacctaatatgaactatgtggcattgccagtacgaagaaatggacacccaaattgaaagtcaaagaggacatgaacctgcaccttgcacaccaactgagatcggctcagtttctagtaaccttgtctattaaacggattaatcaaaactgaactgcaaagtgtgttaagtattgctgataaccttggctataatctaaatggttgattgtactgtatcaccaaaatcttgaacctcatgaacccatggttcttttaacctaccgaacaccttcaattatcaccctttgaatgtattggagt

SEQ ID NO: 633 - DNA, 1229 bp, Zea mays
  misc_feature (991)..(991): n is a, c, g, or t
  misc_feature (1201)..(1206): n is a, c, g, or t
  misc_feature (1210)..(1219): n is a, c, g, or t
ctaaactatcaccactatacttcagatgttcatcattgaattgaaacactgcgctatccatttcgatccgttattttaattagagttaaatgcataagcagtctctaaagttgttaagaggtatctcttttggatgcatttggttcagctttcgaaaagtctactgattcaatttagaatcaccttatgcctatgttactatgctatcatgtttttatagaatctatagttgatagttgtttaaactaaacataatttacctttcacacgactgtcaactcacaacaactttctagcagctcgtagctagaatctagaaatctacagctgaaccaaatatacttttaggcacctaaacttattaagtggtgcaccacaatggtcggtatggtccagaaaaaaagacctacggtgcaccatttataagtttagggatatgtggtgcaccaaaaaataaatttagtgataaaaaatacatttacaaagttcatgagataagtttagacgcagttgatgcatttaactcttttaattaattgaaattgatatgctcgtgtgtctgacgattgatccttgcgcccatgctacacagaccgacgttctaccgcatctacaagagcaagtcgacggaaggtttccagtcggttccctacgtggttgcactgttcagcgccatgctgtggatcttctacgcactgatcaagtccaacgagaccttcctcatcaccatcaacgccgccggctgcgtcatcgagaccatctacgtcgtcatgtacttcgtctacgcgcccaagaaagccaagctgttcaccgccaagatcatggtcctcctcaatggcggcgtctttggggtcatcctcctgctcacccttctcctcttcaagggtgacaagcgcgttgtgctgcttggctggatctgcgtcggcttctccgtcagtgtcttcgtggcgccactaagcatcatggtaagcagcagcaccatgcatctgtngtcgatgcatgcatgcacatggatagagatatatatatatatactaactagctagctaatggacgtcgcggccgttgctaatgaattatttgcatgcatgcgtctacgtacgtacgtgcagaggcgggtgatccagaccaagagcgtggagtacatgcccttctccctctccctctcgctcaccctcagcgccgtcgtctggttcctctnnnnnntccnnnnnnnnnncaaatacgtc

SEQ ID NO: 634 - DNA, 244 bp, Zea mays
tttggatcagcagagcgttaaaccctatccgttggatgtagcactacaggcgtcgagcactggtaatcctgcaaccttcgtcatggcgcatgcggcggcggccgccgccgtgccgttacgtcgtccgctcctcttcctcaaggaggctcgactcctgtccacactcgcgacccccttacctgggctccgccacccgcgcgccctccgacccacaggccccttgccctccgatgccgaggacacc

SEQ ID NO: 635 - DNA, 799 bp, Zea mays
atcttgttgggcacctctcctcatatgttaagattggtcaaaagcagcgcgacgagcaggtgggcgccttactcttataagcccggcgatgttttgcatgtttttgtggcttggtatcttacacaagtatccttctttttttttctgcagaagaaggctgtagcaacctcgcattgttcccagcccaacacgatcgagtacgacttggccttggactggatgcttcttcgggaaaagcaagaccagagcttcagagtacttcacaaggtatagcctggggtgttgggttttagggactaaagtttagcccatgacatattggatgtttgaatgtctattacttgtaataaatatagtctaattgtaaaactaattacacagctaagactacaaagcgacatgacaaatttgtaagcctaattaatctactgttagaaatatttactgtagcatcacatgattgaatcattgcctaattagacttaaaagactcgtcttaatgtttactccttatctgtgtaattaattttgtaattagactatatttaatacctctaactaatagtcaaacatcccatcaaagcaaacacaggctgctagcgttgaagatttgaatccacgccgttgccttgtgtgtctcattaacttgcgcgtgttgaatcggtttgcagaagcacagagaagccaggaaagggttcgcaagcctggtcggcaaaggatccaaggcagagtagcaggccggttccaacctttcagagcttggcgcggtatgactgccgactggcaggaagagagggtc

SEQ ID NO: 636 - DNA, 532 bp, Zea mays
agtaacgcaaaagaggcggccccggtcactgttgcagaccaaaagttcaacgaggcgccaataccaaatgaggaactgacgatcggggtagtgcaggaacaaaggaaggacgtgaagccacgctcttaccaggcagcaaaaccagagatgtgtgacacaaccgtaacggaggaatcgtcgcccatcagcacgctaaagctggcgcacacggagagcgcgcccgcggagtgggaccacctgaacatagtccagcagagggccgacgcgctggagtcgctcctggagctctgcgcgaagctcctggagcaggagaggctcgacgagctcgcgggcgttctccggccgttcggcgagggcgcggtgtcgtccagagagacggcgatctggctgaccaagagcctgatgaccccacccaagttcggagagtccccgacgaagcttctgtaataacagtgattcgtttgagagtttttttttcgagtgccattttcgagagtgtacatagcttcaacagaatttgagttcaaggttg

SEQ ID NO: 637 - DNA, 348 bp, Zea mays
  misc_feature (227)..(230): n is a, c, g, or t
  misc_feature (246)..(249): n is a, c, g, or t
  misc_feature (262)..(267): n is a, c, g, or t
  misc_feature (283)..(284): n is a, c, g, or t
  misc_feature (288)..(288): n is a, c, g, or t
  misc_feature (292)..(294): n is a, c, g, or t
  misc_feature (297)..(297): n is a, c, g, or t
  misc_feature (300)..(302): n is a, c, g, or t
  misc_feature (308)..(309): n is a, c, g, or t
  misc_feature (320)..(322): n is a, c, g, or t
  misc_feature (333)..(333): n is a, c, g, or t
atgtataaaatgttgtgttgcgcacacggtgctgtggttttatgcgttggactaaattcttgtttcgttctgtttcaggatgctgcatgtatgaaatggctgcgctcaaacctgcttttagagcttttgtgagttctgaaaattctggtgcaactgaatgtttggcaggcctgattatatagaaattgatctgcttatctgacctaatgattagataacattgcggnnnnactaattttcttttgnnnntttctttgacagnnnnnncaaaaccttatcaacnncatnaccnnntcnatnnnatcagnntttgccaacannntattctggtgncattgtgagtttatt

SEQ ID NO: 638 - DNA, 578 bp, Zea mays
ggggcatcgggcagctcttcccgatgatgccggtgagccgcctcaacgaggagccgactctcaagggcacgctggtggacatcacctgcgacagtgacgggaagatcgagaacttcatcagccgcgaaaacacattgccgctgcacctgttcgagccgagcctcggtggctactacgtggccgtactcgtctccggggcgtaccaggaggccattgctggcaagcacaacctgttcagtggcccaaccctcgttcgtgtcaatagtagcactacaaaagatggcggcttcgagattgaacgcgttgacctgggcccagctgcggatgagatcatcggcagcatgaggtacagcgtcgaggaagacattatcaccgtcatcgagaagaaagccaaggggacagaagaagaagaacgtgtgtgggcgtgggagatggtggagccactcatgaccaaagcgctcaccaccatgccctacctcaacgaatacaaggtccctgaacctgaacctgaacctgaacccatcccttgaacttctgcactgcagagtctccggatttggctgcgactgcgatcatat

SEQ ID NO: 639 - DNA, 365 bp, Zea mays
cggtagacatgttaggatgcttacacatgaaatcagaagtactcttgacaggcatacgattttgaagactactcttgttgagctaggaaggaccttgggtctggaggaatgtgcattgtggatgccatctcgaagtggttcaagccttcagctttctcatactttgcaccaccagattactgttggatcatcggtgccaattaatcttcctgtcatcaatcaagtgttcagtagcaaccgggcaattataataccccacacatctcctttggcgcggattcgacctcttacagggcgatatgttccaccagaagtggctgcagtccgtgtacctcttctccacctttcaaacttccaaataaatg

SEQ ID NO: 640 - DNA, 679 bp, Zea mays
ttttgtacccagcagaccagaagagtccaaacgggaaactacggtataacaaaggcaacaatcttttttttacttactattattactattcccggaactgtagtttagcttcctgtcctcacattggttggttctatgtggaattgcagcgttctgtatgaagtcttcccgatgtcattcctgatggaacaagctggaggccaggctttcacaggcaaacaacgggtgtgtttcagtttccctttctcagaccccaatccccaactgaaaaatcttgatgctagagctatcacatttgcctgagatatcagggggatttttcaacacttttacaggttgaaattattgagaaaagggcactattttaacatgccatgtttttttttaccagtggttggcattgcatataactgaaaatgctcctgctaaatttataatgcaggcccttgaacttgctcccgctaaacttcacgacagatccccagtgttcctcgggagctacgatgacgttgaggagatcaaagcactgtacgcttcgatgtcaaacagcggttgacctttctgcctgaggaaacgagcgagatcaaaagcaccgtacgcttcagagtcaactgcttgatctttatagattgtaataaaataataaaagagtttgtaaaaaaaacaacaacactgcttg

SEQ ID NO: 641 - DNA, 513 bp, Zea mays
gcccgttgctgttggcttcggcatatccaagcccgagcacgtaaagcaggtacgtatagtagctgaccaaaaaaaaactgttaacaagttttgtttgacaagccggctactagctagctaacagtgatcagtgacacacacacacacgcagattgcgcagtggggcgctgacggggtgatcatcggcagcgccatggtgaggcagctgggcgaagcggcttctcccaagcaaggcctgaggaggctggaggagtatgccaggggcatgaagaacgcgctgccatgagtccatgacaaagtaaaacgtacagagacacttgataatatctatctatcatctcggagaagacgacgaccgaccgaccaataaaaataagccaagtggaagtgaagcttatagctgtatatacaccgtacgtcgtcgtcgtcgttccggatcgatctcggccggctagctagcagaacgtgtacgtagtagtatgtaatgcacggagtgtggagctactaaaaaaa

SEQ ID NO: 642 - DNA, 512 bp, Zea mays
gcccaacaacaacacccgcttcgcggccagcatgaacaacgtctccttcgtcttcccgcagaccgactccctcctccacgcgcactactacaagatccccggcgtcttcaccaccgacttcccggcatacccgcccgtgcagttcgactacacggggcagaacgtcagccaggccctgtggcagccggtccccgccaccaagctgtacccgctcaggttcggctccgtggtgcagctcgtcctgcaggacaccagcatcgtcacgcccgagaaccaccccatccacatccacggctacgatttcttcatcctcgccgagggcttcggcaacttcgaccccaagaaggacgtcgagaagttcaactacgtcgacccgccccagaggaacaccgtggcggtgcctgtcaacggttgggcggtcatccagttcgtcgccgacaacccaggtgtgtggctcatgcattgccatctggacgtgcacatcacctggggcctggcaatggctttcctag

SEQ ID NO: 643 - DNA, 367 bp, Zea mays
  misc_feature (40)..(41): n is a, c, g, or t
  misc_feature (44)..(44): n is a, c, g, or t
tgccggagcggttcctggccagggacctggacttccgcgnnacncagctggagttcgtcccgttcggctccggccgtaggctgtgcccaggcgtgcccatggcggagcgggtggtgccgctggttctagcgtcgctggtgcacgcgttccagtggcagctgccggccggcatgtcggcggaccaggtcgacgtcagcgacaagttcaccaccaccagtgttttagccttccctcctatcaaagctgtgcctctgctctgatcaccacctagcaacccagcttgagtgtccagtcgattttggccagcaaaatcggaaaagaaatccctgcagccggctgcacacaagcaccacgcaggcttcgttcg

SEQ ID NO: 644 - DNA, 506 bp, Zea mays
  misc_feature (462)..(472): n is a, c, g, or t
  misc_feature (477)..(491): n is a, c, g, or t
  misc_feature (494)..(502): n is a, c, g, or t
atctacagtgtgccctgacccatcaaaatacatctcatgggacggcttacacttcactgaggcgagttacaaagttgtcattcaaggagtacttggggggtatgccaagcctcccctttcaaaaacctgcaagggtgcggaattcaaagtttctcagcttcaccaatgtacagataatccaacaaacactgtgtcatacgatgctttgagctcttttatttgatctgctcgtaaaagaagtgcatttagagttacagggggcagcatagatgatgttgcaggaccgaacatcttggacactttctcaaagccgagaagagatccatcgatgtagggttattcagttctacaatctacaatccacttggctgctgggaggaggagaaaaaatgggaggggagtttgtagtgcagaaatttgcgattgcttagtgcactactttgctctgctatgtttttcttnnnnnnnnnnngctgnnnnnnnnnnnnnnnacnnnnnnnnntgac

SEQ ID NO: 645 - DNA, 596 bp, Zea mays
tcttgcgccatttacaggattagcttatcggatgcggggttagcttacaagaactaaccaggattggaaaataacagcaaatgactgcaaatgtagcatggatggatggatggatggatggatggatggatgagccatgcgtgtgtgtgcgtgttttttacaagctgaggatcccgtacagcgctgcctggtcatggttgagaggttgcggcagcaggaggcggcgaatgtttgcttctttgtcggctgatcaagttgtgccaagcggtagcgacgagggacaggccactgaacctaagccatctggttccctctttaggttgagcaacctgcaaataatcatgtcattagaaatgcttaatgttcggatgccatgaaggatatgaatatcatgtacctcggtagaatcgtgtgccttggtcgccgtgatttcgcacctgttgctcagctgacgcgccgtcgctgcagaggaggagagaagtactgtcagcgtcaatggagctcacgagacgacaaggaacgaaggcaggggaagagctaagctagtcgcggtgtgcgaattaagttgaagtacctctgaccctgacggagtcatc

SEQ ID NO: 646 - DNA, 482 bp, Zea mays
gaagggttcgcgttccagcgcgacgtgtcctacacggcgttccttgaccgggtgcacggcgaggaggtggcgctcaacaagctggggctgtggcgggtgccgcacccgtggctcaacatgttcgtgccgcgctcgcgcatcgccgacttcgaccgcggcgtcttcaagggcatcttgcagggcaccgacatcgtcggcccgctcatcgtctaccccctcaacaaatccatgtacgtgttgaatcgatcggctagctagctagctaggcacgccccggccggcctctgacgactcgaccggtctttctggggtttggtttttcaggtgggacgacggcatgtcggcggcgacgccgtctgaggacgtgttctacgcggtgtcgctgctcttctcgtcggtggcgcccaacgacctggcgaggctgcaggagcagaacaggaggatcctgcgcttctgcgacctcgccgggatccagtacaaga

SEQ ID NO: 647 - DNA, 371 bp, Zea mays
agttctggctctgcagcacatacaccgaacagtatgcatttttcagtcccataccatcagcctagtcctttgccaaagcctaacgggaaggaagcaataaatttggtttcgcattgaataacagcatgccacctatcacaacatctgggcaaagtccacataaacagcgcaagtgtatccgtccctagcgtctgacccttgtactgccagtaatagctaacaattttctgggtcgtgtaaaaataatttccatgtaaagagatcaccgcgatatgatcacagggaaatgctgctaaatgagggagctttgtgaaatctgttgtatcgtttgatttctgggaaactgattggattgcccatgtaacataaaa

SEQ ID NO: 648 - DNA, 446 bp, Zea mays
gacctgtcccacaacctcatccgcggcaccgtgccgctgtcgctggagcgcctgtccacgctgcagaagctggacctcagctacaaccgcctgtgcggcccgctccccaaggggcacggcgtcatcaagcacgggtgcaagccgtacgcgcacaaccagtgcagcaaagggaccccgctcgcgggatgccaggacctggagtgagtgagtgagccggtggccatggttttctatactctgctatgctctccctcgccggcgttcttttcgtgtcccaatcttgaaggacgacggacggtacggtgcctggtttagttatagacaaaaaaaggtacggccgcgtggtggcggtgctaatatgcttagccacgcccacgcgcggttgatctttgagcagttaagcgtgtacgaaatgacagctgtgtacgtgtactgtctggtggagt

SEQ ID NO: 649 - DNA, 694 bp, Zea mays
  misc_feature (671)..(672): n is a, c, g, or t
gagactgtaagcacactgattctccttcctcttcatttttgattgacacttgacagtactggttttatgcgacattaatcatcgcaagtactagaaaatggagaaccgcagcaagactaattacgttcgaaacatcaagtgatgctcctgttgggtcttttgctccagttgttagtcatcaacaaaactagacactttttgctggtcctccttttgggggtgtatttggatcgtgtaccaggactagcatcatttgcagcaacatttgcagcgataagactagagtagtaagattttgaatataaataacttatgtcggtcccttctttcagtattatctatgtcaaatcatcgttcaggtctcttttcctgaggaccagacctgttttttgtttccatgcgctggtccttttctttgggtgatatgtttgcatagtttgaggactgcacctttcgtttctttctcttggttgtatttctttctgagcgtccttttttgatcttgtcgatctgtttttgaaggtatgtgccagataccgtggacgtggtgggtggcaaccgggcccagagatcatccgggtgctgttaaggcacgaggcatcacgaggcgttgtgaccatcatcgtcggtcatgcagtgaccaaacaataccttagcattgctgggtctcnngtggctatctacgtatccgtat

SEQ ID NO: 650 - DNA, 202 bp, Zea mays
acaattcgtgcatcagtgaatataagggacggacattggcatcataatgtgatcagcttcgcatggtgccgtgttcgccccggtcgaacatgttctacatgtgtggcacgagtatcgtacagaaatataccagtttattacttgcacaggcttgttagtctggaaagacaagggagattccagtgttgagatgattcttgtg

SEQ ID NO: 651 - DNA, 318 bp, Zea mays
agtcgatcgatgatgtcattctcctcgctcacgacttcccccgcccgtaggtcgcccgccattgctccacagccaagccccgctcatcacgcgttgctcctgaaggagccgagggccttgatggcgccagcccggaggatgtactggtggtagaaggccgcgatggcagcgcccacgagagggcccacccagaagatccactgcgaaagggtttaaacgatgagatcctaaattgtacatcacgagtgctggctggttgtcctgtaaaccacacaggcgtttacgtacgtggtcgtcccagggcttgtccttgttgta

SEQ ID NO: 652 - DNA, 334 bp, Zea mays
  misc_feature (326)..(326): n is a, c, g, or t
tgcggtccgagttcctgaagaagaggaagaaagggaagctgcccaaggacgcgcggtcggcgctcatggactggtggaacacgcactaccgctggccgtaccctacggtaaccatgcatgcatcctggcaaacacgcagcagcagcatcgctcgctggaatggcagatctgtgaccagcattagccggcggtgcaggaggaggacaaggtgaggctggcggcggcgactgggctggaccctaagcaaatcaacaactggttcatcaaccagcggaagcggcactggaagccgtccgaggacatgcggttcgcgctcatggagggcntcaccggc

SEQ ID NO: 653 - DNA, 338 bp, Zea mays
gcagaaattactagatattgaagagattattaattgggatcaattgtaactttgccaccactttgaacgctgttgcaagcttgccagcaggaaattgcataaatactactaacactgtcattttgttggcattcctgcaataaataataataacaataaaaccagtgaaaaaattgcaaatgcccatattaagttttcatcactttgtcagaattagattaacaaaatactaaacaattcatcgaaaattgctacttttgaggattttaatttccagacaactgagttctgctgatagttgtctgcatgtcattctggtggagaagctgctggtttgc

SEQ ID NO: 654 - DNA, 401 bp, Zea mays
cgactcgccacctaaaattaacgagagccattcggatcaaacgagctactactcctatatctgacagttgccaccctcacacataccgtacgcgtacgatggtgcagttctcacttggaagtttgaaccgtcgtcactgctccctgcagggacccagacggcggccagagggccagacgacccagcatcaccagcactgtcgtggtccgtacgtgcctgcagtttagcgtttgcagggtctcaactcggccacgtagcggcagttctacggagtgaagcgaaccgaccagctgggggcctgggccacgcacgtcgacagcgtgcatttaaatacgccggcggagctcgatcaacgaaagtcgatcgagagaccctgctgctagctagctggacaccgagag

SEQ ID NO: 655 - DNA, 454 bp, Zea mays
accacctgcctttgaatggcattttcaggaggattagccacaggacgcaccatcaaaaccacggccacgttgagaaggacgagtcctggcacccggttcgtttcctgtcgctctctcctttgttggagtttcaaaagttacgctgatggtgcatgtccatgaatggtgcttgatggtttctcggattgtgcagctaccagagaggctgtacaaaagcctggactttatgactaggaaattgcggtttaccatgccgttccccttgctcgcattcccgttatacttggtgaggctaagaacatgtctatcgatgacgcctgaattgggcgaacggacgtttttgtttcatagtgttgtggtcgtgctaaattcctgctctgcgggttcatgtgtgctatgtagttcgcaaggagtccagggaagtcaggatcacacttcaacccaagcagtgatt

SEQ ID NO: 656 - DNA, 402 bp, Zea mays
  misc_feature (389)..(394): n is a, c, g, or t
ttgaatttctttgattccatttcttgacagcataagcatccacctgtggatgtgtcctccaggagaaaacatgtgaacccgccgagcattcatttcaaacttcaaaatagggccatcatggagggagagaaacgttatgacgaagtaaacaaatctgtcgctgtcaccgtcttcattaccattgcctaaagcaaaatcatcttctctgaacatcaattcagtcattgaagcccatgtgtacctccatttccttgacaagagacatgttcttacagcttcttttattggcaaacagcagagaattttatctttaataacatcaggtagattactgatgatgtcaacatttgtaacagatttatgtcttttcttttgagaacctccacgannnnnngggtatac

SEQ ID NO: 657 - DNA, 193 bp, Zea mays
tgtcctcccggggctcctccttggccctcgacgcgtgcatggcgtcgttctgcctctgctgctgctggtgctggctcatgtacgagcccatcgggttgtcgaagccggaagagaacgcgaagccgccgccgccgctctgcgccggcgcgccgctgaggccgaacgagcccagctggtcaccgaacccgtactg

SEQ ID NO: 658 - DNA, 422 bp, Zea mays
aggtgtgtatggggcggatggagctcccccaggcggcctgcttggacttgctctgcgggttgtcgaaccagaaggtccaggagtgctcgagcgggtgcgtggcgggcggggaaggagcgcaggcgaggtcggtgatctcgccctcctccctgtcgtcgtcctcgggcgcggggcggcctcgggagcccgcggaggcaggcctggtgtcggtctcctcggccatggcgtggcggctgtggtgagggaggcttttctttacgccgggcggacggagacggagacggagacggagacggagaacgcggggccgccgcctcgcttgtctaggtttcctttccctttgatcccttcagttctcctcctctcttctcatagaaatgggccaggccaggcccatggtaggtggttgggatagaccagct

SEQ ID NO: 659 - DNA, 561 bp, Zea mays
  misc_feature (332)..(334): n is a, c, g, or t
  misc_feature (538)..(540): n is a, c, g, or t
tccgtgctgctagcgttcgtacacggatgcgacctgtacgtcagacacgttctgattgctaacttgccagtgtttctctttggggaatcctgggatggctctagccgttccgcagacgggatcgatttcatgattttttttgtttcgttgcatagggtttggtttgcccttttcctttatttcaatatatgccgtgcacttgtttgtcgggtcatcttttcatgcttttttttgtcttggttgtgatgatgtggtctggttgggcggtcgttctagatcggagtagaattctgtttcaaactacctggtggatttattaattttggatctgnnngtgtgtgccatacatattcatagttacgaattgaagatgatggatggaaatatcgatctaggataggtatacatgttgatgcgggttttactgatgcatatacagagatgctttttgttcgcttggttgtgatgatgtggtgtggttgggcggtcgttcattcgttctagatcggagtagaatactgtttcaaactacctggtnnntttattaattttggatctgta

SEQ ID NO: 660 - DNA, 405 bp, Zea mays
cggtttctttcttcagctgctgcttatagcttctatatatctgctgaacagtgagctcactatcttgaatcttgatgcctcatgtgcaggacgactcgagaagggataagccaagcagaggtggacggtacaccgtgtaagtcgcacacgaagatggtcgttgttgttcggactggacagaggctgagagtggagttttgtgctgagatcggcaccagctttcatttaatacagcctcagcttacctgaggcaattttcgcacctgttatatgatgttgttttgctctcagataggtttatgtagcacaagaaagatatgttggagacgttgacgattttgtatgcaactaaatttctatcttaatatgccccgattcaacagcacccgatcgagtcattgcgtt

SEQ ID NO: 661 - DNA, 369 bp, Zea mays
aagtttgagaagtttgacttagaacaaagccaaagtgactttataatttggaccagatgaagtacatagaactgaggtttgcaataaataaacaaaaaacgcagtaatttaatcaggttagattgcattaaaaagaaaagatcgattgaatgaacaaagtgtttctatctaaatcaataagtttgcaaagtacctcagctttattcattgggaagatatgtagtctacgaagtctctgaggatacttcatatcggcttcatgtttctcctgaccttttaacatttcagaagatgactgcgagggagtgggtggagggcaacttataggggaaaggcgatgtgatttcccggccaccagctgagcttcaa

SEQ ID NO: 662 - DNA, 441 bp, Zea mays
aacttactgtaaaacttgtttaggattctttgtatgctttaatgtgacgcatgtatgctatttgatagcgtctttttagtctgggagcgcagccacatttcttaatcggaccatgcaagttggtcgatttaaaaggatctgtgacaggagagtttgccagtgtccgaaaaatcagcattatgcaattggagtagattgttttcatcatttgcaatcttgaaagaaatattctataatgatgtagatacactgcaacgtcattgatcgactcgtgatatggtatgcttttctttgtacaaaatactatttagaggtacttccatgcttcgctctttgaaaaatacaaatttgacagaataattgtttaaattgcttgcaccttcaagcattttaaaattgatacagttcctttacaaagcattgaaacaccagttgaccaca

SEQ ID NO: 663 - DNA, 460 bp, Zea mays
tgtttggcggccgcgggttcgtgcccttctcccctggatcgcccactgagcagagcgtccacgacggacggtgaacaaagccgcgtctgacaccaagagacgagcaggacatgcttttggctgctaatcgtcagatgatgatgtttttgtttgttgacagcttctgatggtgcgttagcaatggcaacgaggtgtcagttggtttggattagcaggatgaagaagagcaaccctggtaactagggcggggggattgagtttgtgcatgacaaggctgcaaacttttgtatgtagataaaaaaaacacccatttggccatttgtattgtatgttattgtatgtaagctagcaggcctgtacaactgcttttaggtcttcgtttggatgggcgaaattctggcaaacagcagcacatccactctgtgttctgatctaagcatcttggtttgattttgaaatg

SEQ ID NO: 664 - DNA, 452 bp, Zea mays
gcgacggcaacgacctggtggtgacccagaaggtcccgctggcggaggctctgacggggcacaccgcgcgcctggcgacgttggacgggcgcatcctgacggtgcccatcagctccgtgatccacccggggtacgaggaggtggtgcgcggcgagggcatgcccgtccccaaggacccgtccaggaagggcaacctccggataaagttcgacatcaagttcccggcgaggctctcggcggaccagaagtccggcgtcaagaggctgctcgggcagtagagcgcctcgtgttctggtgtgctgtgtgtcagacattttcgtgttggttgatcttgaactgggggatgctgccatttgcagcgtccgtgacgacgacgacgaggaggcaggccaccgagcgctgagtacagaacaagctagtggtggtatatggttgagaccttgagatgcaca

SEQ ID NO: 665 - DNA, 434 bp, Zea mays
aacgtctttgctttcgactacacaactcaagtcctggtaagcattattaatccaggcttcggggggagcttatgttttagctgtcgatagtactttcatttcatctgatcacgggcctacacttactgtctctgcatgcagttcttcatcgtgctgtcgtgcctgatctcggtctcggtaaacttcagcactttccttgtgatcgggaagacgtcgcctgtaacctaccaagttctcggccacctgaaaacgtgcttggtcctcgccttcggctacgtcctgctccacgacccgtttagctggagaaacatacttggaatcctgatcgcggtgatcgggatggttctgtactcgtacttctgcactagagagactcagcagaagccggcagaggcctccccgcaagccatcctgcaggtatgttctgcaacggt

SEQ ID NO: 666 - DNA, 448 bp, Zea mays
acgtagtaacaactaacaagtatatgccaacctcggtcacttggaaaaacttcatgagtccctctctttaaggagaaaaaggaaaccgatcaaaaaccatctctgcatctactgcctctatactttgcctttgatacggctgagtagcaaccttgtaaccaaagcacccgattcaaacccaacccatacatacaacactatcaataaaaccataccataagagcatgcagccactgcctggttggccggttcacgcggcgtcggtccggccggctttccaggactcgtactccgggtcgtcggtgggcagctcgaagcggcagagcgggcacgagttgcgcacctggagccagggcacgatgcagccgtcgtggtagcggtgcgagcacggcagccgcttgacgcgctggccgaccgcgaccccgtccttgcacacagcgcactcatc

SEQ ID NO: 667 - DNA, 436 bp, Zea mays
gggacagaagtcagcaaaaagatgactgccggaatgagctccatgagtttcaagatgaaggagttgttccaggggcagactccagctgacaagattgttgagggtgccacctcagaggatctggacgggcctgactggaactcaaacttggagatttgcgacatgatcaacacagagaaggttgacagtgtggaactcatccgtgggatcaagaagaggatcatgctgaaggatgccagggtccagtacctctccttggtcctgcttgagaccattgtcaagaactgcgacaaggccttctcggaagttgcggccgagcgggttcttgatgagatggtcaggttgattgatgatcctcaaaccgtggttaataacaggaacaaggcccttatgctcattgaagcatggggggagtctggtgatgaactccgttatc

SEQ ID NO: 668 - DNA, 203 bp, Zea mays
gtccctgttcttacaaatcaccccttaccaacagacgcgtttgggtcaaaaacccaagtacaacactagtagtagcagtacattacatagcaacagtattcacatcaacggagtgcagcttgaggatcataattctacggataaaaagaacacttcgccgtcttcacaggcttggctgaaccgcacttgaagcaccctgtaga

SEQ ID NO: 669 - DNA, 368 bp, Zea mays
cacggcgacgcgacgcgacctccttttctttcctttccattccacctcacttttcagttttcaccttcgccgctccgtgcaggtttgccgcagaagggcagtcctcctacaaacaacaaaagtttgcgtttgttttttggacgtccaagggaggagcgtgcttatggatctggcgttttcgcgggagaacgtcacaggagcgttcggggtccggtagccatgacttgcctgattttctcctcggattccttcgattttttttttacgttttcgcgggctgtaacatgaaatgctctagcagtggttttcacgcttcgagttcgagatcttctgttgcctgctccagtccactgatatgtgatgtcatg

SEQ ID NO: 670 - DNA, 446 bp, Zea mays
tctgcataggaaggaaaagcagacataagaaaagcatgcatgcggatgtacaggcctgcggcaaccgggtgctgcgaggtgcgcacgagtgggagcagcacaggcaagggcgaggccaccggaagcgagtgcagcgcctgaagcagaagagcctgaggccatggccatcgctgctgccccaagaccgcagctgatggtaactttttcacagcagaaccggcgagaagtgggacggggacgttgacgtggacatggtcggctcgtcccacccaaaaaagcgtgccagcatgacagcgacatgctttcccaatcccgaattcccggcacgtcgacggggggaatacctccatgccttttagcagcggaagaagcaggcaccaaagaactgcttatcaaaagtattgtaccacacgtacgacgggtctagaagccacagaaacgtagtg

SEQ ID NO: 671 - DNA, 212 bp, Zea mays
cgatgccgaaaacgatgagcttcatcttcatgttttcccaccacatcttccgtcgtatctttgttccctgttgcctgaaatcttgtgcctacagggggaaactaaagcggtgagcttggtgatagtcagatcgatggaaccaatggattccacatgcatgagatcatatatatatgaggaacctgtgatcggagatcctccgttttatccac

SEQ ID NO: 672 - DNA, 432 bp, Zea mays
cctatggacagactacagttagtcaggggccaccttgtttcgtttccgttggatttcatgtgccaagaggacttgagaccatatttcagtgaaagtgagtactacacatcaccacaggttttccattagcctctctgtctgcctcgtaaagttactcaaccggctgtacatgttgcaaagatcaccttgtagatgctctacacatgttgtcaaataggaaacaaaaaaaatttaatatattatcataccattagagtattagaattgtttcctagaaagaaaatagtatatcagtatagttcattcgttccaacaacttttagtttcgggaaagaaacaatcaaattcattgtttataagtgcaaataataggagtttccttagttcaacacattttctttggaatgaatatacacctcccatagcagttca

SEQ ID NO: 673 - DNA, 394 bp, Zea mays
atatatatatatatatatatattctttatttatttgtcacaggctttggaagaagcattcaacagtttagaaggtattacatgcaataaagccgaaggcgcgatgtatctgttcccacgccttcacttaccccggaaggcgattggagctgcccaagcagccggcactgccccagatgcttactacgctaaacgcctactagaggccactgggatcgtcttcgtccctggttctggttttggacaggtccccggaacatggcacatcagatccacgatactgccgcaggaggacaaaatacctgggatagtatctaggttcaaggagtttcacgacaagttcatggatgaattccgtgattattgagtgtccatctcagttcagtcattgcata

SEQ ID NO: 674 - DNA, 325 bp, Zea mays
ggcggcgagagaagagtcagattcgtcggcgcggcagcggagagtcggagacgacggtaaagccgagccgagcgccgagcgggcgagcgatgcctgccgccaggtccgggggaggagattgtattttacagaagacttaccgtgggtagggggatcccttgatgggcttctggccgtacttcctccacgagtactcgtccggcgggatgtccgcgatcttggcgctgatcgccggcactctgatggtcctcttcacgcggtttttcctgtcaatcgaaaaaaaaaattaaagcagcggccagggttagaagatgagaactgctgt

SEQ ID NO: 675 - DNA, 409 bp, Zea mays
  misc_feature (401)..(406): n is a, c, g, or t
gagcaggctcagatcctaggtttttggtctgcttgtttgatgatgttgctctggataagcagctttttggtctgcttgaggaatttgtacacacttggcaatgaaaagatccttggactgagttgtcattctcgctcatgtttccagttttgtttcgatttgtagtgctcacatttcaaaacctgtgttttaactctacatatgaggctgctgtattactgaattggctaaacggctaaacctactacgttccccacttaaatgactgaacgatcaaggccgagaggttcgaccgcccttcatgtgggcttcagcctatttggataatcctgagagctctaaacggcttgtgtaatatcttgctggtgcctaactttagttgggttttgcctgtgagtgtnnnnnntta

SEQ ID NO: 676 - DNA, 413 bp, Zea mays
  misc_feature (252)..(256): n is a, c, g, or t
  misc_feature (264)..(267): n is a, c, g, or t
  misc_feature (270)..(270): n is a, c, g, or t
  misc_feature (306)..(310): n is a, c, g, or t
  misc_feature (325)..(345): n is a, c, g, or t
  misc_feature (348)..(353): n is a, c, g, or t
  misc_feature (374)..(380): n is a, c, g, or t
  misc_feature (393)..(404): n is a, c, g, or t
ctcgagccctgggacctgcccccgcgctcccgcctccgctcccgcgactcccagtggtacttcttcagccgcctcgaccgcaagcacgccaaccgcgctcgcaccaaccgcgccacgtcgggagggtactggaagaccaccggcaaggacagggaggtgcgccatgggcccagggtcgtcgggatgaagaagacgctcgtattccacgccggacgcgcccccaagggcgagcgcaccaactgggtcatgcannnnnaccgcctnnnnggngacgccgccgtggggataccgcaggtattctatccnnnnnccccttcttgcttgnnnnnnnnnnnnnnnnnnnnncannnnnntgtacttataaatgctggtgnnnnnnntcttaattgctcnnnnnnnnnnnnaataagaaa

SEQ ID NO: 677 - DNA, 1333 bp, Zea mays
  misc_feature (299)..(299): n is a, c, g, or t
  misc_feature (332)..(333): n is a, c, g, or t
  misc_feature (335)..(337): n is a, c, g, or t
  misc_feature (339)..(340): n is a, c, g, or t
  misc_feature (351)..(357): n is a, c, g, or t
  misc_feature (360)..(361): n is a, c, g, or t
  misc_feature (367)..(367): n is a, c, g, or t
  misc_feature (369)..(369): n is a, c, g, or t
  misc_feature (372)..(376): n is a, c, g, or t
  misc_feature (384)..(387): n is a, c, g, or t
  misc_feature (389)..(389): n is a, c, g, or t
  misc_feature (397)..(397): n is a, c, g, or t
  misc_feature (400)..(403): n is a, c, g, or t
  misc_feature (407)..(411): n is a, c, g, or t
  misc_feature (414)..(418): n is a, c, g, or t
  misc_feature (433)..(435): n is a, c, g, or t
  misc_feature (437)..(440): n is a, c, g, or t
  misc_feature (443)..(451): n is a, c, g, or t
  misc_feature (457)..(459): n is a, c, g, or t
  misc_feature (462)..(466): n is a, c, g, or t
  misc_feature (468)..(468): n is a, c, g, or t
  misc_feature (471)..(480): n is a, c, g, or t
  misc_feature (483)..(496): n is a, c, g, or t
  misc_feature (498)..(512): n is a, c, g, or t
  misc_feature (514)..(531): n is a, c, g, or t
  misc_feature (537)..(550): n is a, c, g, or t
  misc_feature (557)..(569): n is a, c, g, or t
  misc_feature (572)..(574): n is a, c, g, or t
  misc_feature (576)..(580): n is a, c, g, or t
  misc_feature (585)..(587): n is a, c, g, or t
  misc_feature (603)..(615): n is a, c, g, or t
  misc_feature (620)..(632): n is a, c, g, or t
  misc_feature (634)..(637): n is a, c, g, or t
  misc_feature (639)..(645): n is a, c, g, or t
  misc_feature (654)..(654): n is a, c, g, or t
  misc_feature (656)..(657): n is a, c, g, or t
  misc_feature (660)..(664): n is a, c, g, or t
  misc_feature (666)..(678): n is a, c, g, or t
  misc_feature (683)..(688): n is a, c, g, or t
  misc_feature (691)..(709): n is a, c, g, or t
  misc_feature (711)..(722): n is a, c, g, or t
  misc_feature (726)..(726): n is a, c, g, or t
  misc_feature (729)..(731): n is a, c, g, or t
  misc_feature (734)..(736): n is a, c, g, or t
  misc_feature (738)..(741): n is a, c, g, or t
  misc_feature (743)..(746): n is a, c, g, or t
  misc_feature (748)..(761): n is a, c, g, or t
  misc_feature (766)..(769): n is a, c, g, or t
  misc_feature (775)..(780): n is a, c, g, or t
  misc_feature (787)..(789): n is a, c, g, or t
  misc_feature (791)..(794): n is a, c, g, or t
  misc_feature (796)..(803): n is a, c, g, or t
  misc_feature (808)..(834): n is a, c, g, or t
  misc_feature (841)..(850): n is a, c, g, or t
  misc_feature (853)..(859): n is a, c, g, or t
  misc_feature (862)..(877): n is a, c, g, or t
  misc_feature (879)..(882): n is a, c, g, or t
  misc_feature (894)..(902): n is a, c, g, or t
  misc_feature (910)..(910): n is a, c, g, or t
  misc_feature (912)..(917): n is a, c, g, or t
  misc_feature (922)..(931): n is a, c, g, or t
  misc_feature (937)..(945): n is a, c, g, or t
  misc_feature (950)..(963): n is a, c, g, or t
  misc_feature (965)..(966): n is a, c, g, or t
  misc_feature (968)..(971): n is a, c, g, or t
  misc_feature (975)..(980): n is a, c, g, or t
  misc_feature (982)..(989): n is a, c, g, or t
  misc_feature (993)..(997): n is a, c, g, or t
  misc_feature (999)..(1001): n is a, c, g, or t
  misc_feature (1005)..(1005): n is a, c, g, or t
  misc_feature (1007)..(1009): n is a, c, g, or t
  misc_feature (1011)..(1012): n is a, c, g, or t
  misc_feature (1017)..(1019): n is a, c, g, or t
  misc_feature (1021)..(1021): n is a, c, g, or t
  misc_feature (1023)..(1028): n is a, c, g, or t
  misc_feature (1044)..(1049): n is a, c, g, or t
  misc_feature (1051)..(1053): n is a, c, g, or t
  misc_feature (1055)..(1055): n is a, c, g, or t
  misc_feature (1057)..(1072): n is a, c, g, or t
  misc_feature (1075)..(1080): n is a, c, g, or t
  misc_feature (1084)..(1084): n is a, c, g, or t
  misc_feature (1089)..(1094): n is a, c, g, or t
  misc_feature (1096)..(1097): n is a, c, g, or t
  misc_feature (1099)..(1104): n is a, c, g, or t
  misc_feature (1107)..(1129): n is a, c, g, or t
  misc_feature (1131)..(1132): n is a, c, g, or t
  misc_feature (1134)..(1146): n is a, c, g, or t
  misc_feature (1151)..(1158): n is a, c, g, or t
  misc_feature (1160)..(1164): n is a, c, g, or t
  misc_feature (1168)..(1176): n is a, c, g, or t
  misc_feature (1178)..(1213): n is a, c, g, or t
  misc_feature (1217)..(1221): n is a, c, g, or t
  misc_feature (1223)..(1224): n is a, c, g, or t
  misc_feature (1232)..(1232): n is a, c, g, or t
  misc_feature (1235)..(1263): n is a, c, g, or t
  misc_feature (1265)..(1270): n is a, c, g, or t
  misc_feature (1276)..(1277): n is a, c, g, or t
  misc_feature (1281)..(1282): n is a, c, g, or t
  misc_feature (1286)..(1291): n is a, c, g, or t
  misc_feature (1296)..(1298): n is a, c, g, or t
  misc_feature (1302)..(1307): n is a, c, g, or t
  misc_feature (1309)..(1314): n is a, c, g, or t
  misc_feature (1316)..(1318): n is a, c, g, or t
  misc_feature (1322)..(1330): n is a, c, g, or t
aatcttacaacaacgatgtagaaatgcagatttctgcacgtaaaaaggaaacaggcagcatacccccttggcatgctatatcgaaagaataaatctcagaaactcaaagaatccaaggatttacaggagagaacaaatacctcctcctctatatgacaaccaacctcctcgtgtcgttgccaaaggaactttggaaaccagtaacaatgtacaggacaatgtacattagatggctgctgagcaccacaaacatctcttcaaaagcctgcgacacaaaaggagattgaaccacaagctanttgatgagtgtgaagacacgctctgcatgttcnntnnngnngagatcacctnnnnnnnganngatgtntnagnnnnnaaataggnnnntnatatttcntgnnnngcannnnncannnnntgaaacggaagatannngnnnngannnnnnnnncgggannngannnnnanacnnnnnnnnnncgnnnnnnnnnnnnnngnnnnnnnnnnnnnnnannnnnnnnnnnnnnnnnnccactnnnnnnnnnnnnnngaaacannnnnnnnnnnnnccnnncnnnnntattnnnttgcccgccaaatcannnnnnnnnnnnnccgcnnnnnnnnnnnnntnnnncnnnnnnnttctgtttncnnctnnnnntnnnnnnnnnnnnntgccnnnnnnatnnnnnnnnnnnnnnnnnnnannnnnnnnnnnngcgnccnnnccnnntnnnntnnnngnnnnnnnnnnnnnncctcnnnnctcctnnnnnnctcaccnnncnnnncnnnnnnnntaaannnnnnnnnnnnnnnnnnnnnnnnnnnttatacnnnnnnnnnnttnnnnnnnccnnnnnnnnnnnnnnnnannnnccatcccttcannnnnnnnnccctctcnannnnnnacaannnnnnnnnnattctnnnnnnnnnccacnnnnnnnnnnnnnncnngnnnnccannnnnncnnnnnnnncccnnnnncnnncctncnnncnnccccnnntnannnnnnttcgtcccgcctctcnnnnnntnnncncnnnnnnnnnnnnnnnnacnnnnnnctcnttccnnnnnntnncnnnnnnacnnnnnnnnnnnnnnnnnnnnnnncnncnnnnnnnnnnnnnatccnnnnnnnncnnnnnatcnnnnnnnnntnnnnnnnnnnnnnnnnnnnnnnnnnnnnnnnnnnnncctnnnnnanntcctacgnacnnnnnnnnnnnnnnnnnnnnnnnnnnnnntnnnnnncttctnncttnntacnnnnnnctttnnnactnnnnnncnnnnnngnnnatannnnnnnnncgt

SEQ ID NO: 678 - DNA, 361 bp, Zea mays
aagacaatcaaattaccatctctcattctcgtctgtgttctttggacaggactacgtgccagaaagcctcgacagcgtagccgagttcgaagcgcccccgtctcccgtgcacagctacgacctgcattgcccgggcgacgaggagttcgccaaggagccgcccacgctcccgccccagcttctcatgtccgtcctcgcgggggacgtcgatagcgctggccatggcaatcaagctttgaagccacagcacgtcgtcctcgaccacctgttcatcgagaaaggctgggggtcgcagtcgctgctcgccctcggcgtcacccaccggtttgagtccaagtacgtgagctttgtgctctacaag

SEQ ID NO: 679 - DNA, 544 bp, Zea mays
acgccggagagcaggatgtagactatgacgccgacgctccatatgtcggcctcgggcccgtagctccgcttcagcacctccggcgcgatgtagtaggcgctgccgacgatgtccctgaacacctcccctgcatcgcattgcaatgcatatgcagcaacagatatgaatgtgatgatgcaatccaaccatggaggagagtgagagcaagcaagcaacaagcaaatcaaccttccttgaagaagacggagagcccaaagtcggtggccttgagcggcgcgtcctcgtccttgctgaggaggaggaagttctcgggcttgaggtcgcggtggatgacgcccatggagtggcaggtgtgcacgatctcgacgatggtgcggagcagcgacgccgcggcgcgctcggtgtagtggcccctggcgatgatgcggtcgaagagctcgccgccggcgcagagctccatgacgaggtgcacggagcccttgtcctcgtacgcgcccttgagctccaccacgcccggctggccggacaggtggtacatgatctg

SEQ ID NO: 680 - DNA, 463 bp, Zea mays
  misc_feature (452)..(454): n is a, c, g, or t
atggagtcgcttgaccttttcaacatctgtcccgttcctgctgctttggtcaccataagaggcttgcctggttccagagatgatgtcattgtgagtggagatggattctgcgagaagttggttccagaagttccagccgagggacaaatcgaagagtccagctgtgtctgccagccatggaaaggatccaggaaagcccccaactgatgatgccccttctagtgcgacgaaacagagggtcgccgccgcaaaacagtacattgagaatcactacaagacccagatgaagtccctgcaagataggaaagagaggtaggcagttcagtggacataaacttatttttacctctgcctgcttcggttatataaaaaattaagcttgtttatttttattaagtatttctaccaatgcaggaagagaaagataagaaaaaacacaaccaaaggatggnnnccctaaaga

SEQ ID NO: 681 - DNA, 499 bp, Zea mays
tcgtctcatcagtagaaactgaatctcttgaacgtccaggagacacgaaactgctgtagggtaccaaggcaggagcacgacttggcacatggacagtggtaggcacaagaacattatgcttctgctctgagctgctgtcatggcgtgatactggtggagctggcttgatggaagccgacttcgcagcagaaccccggatggtgcgagcatttgccaaagatggcttctttaagggtgcacctgaggtagctggattcaacttctgcatgagatttgaatttgaacaaaagggacaagttatttcaaacctctgcctggaacctccactaatcaggtactgcaaagaaacagtggcgacactatagacaagttatttcaaacttctggatgagattctagagcaaacaaagacagaaagattgtcacgttgcgaagaccaaggggggctttcttttgtacgaaggtggtctggggctttgaccatggtgagcagaaatcc

SEQ ID NO: 682 - DNA, 346 bp, Zea mays
  misc_feature (338)..(340): n is a, c, g, or t
ctccagtaacgacgggcacgagggtgaggtaggtgatccacgactcgcgcttgacggtcatgatgtacgcgaagacggcggtaaagaagggcgtggtggcgccgacggcctggttgaaggacacggggaggtagcgcagcgagacgttcccggagacgacggagccgcagaagacgaggctgagcgcggcgatcttggcgagctggacgcgggagcgcacgagctgcatgggcacgacgcgcagccaggcgatggcggcgtaggagagcagggcgcaggcggacatgtggcacatggtgaggaagatggggtacttgaagccgtagttgctgaggagnnncttgtt

SEQ ID NO: 683 - DNA, 390 bp, Zea mays
gggcttcctcggcggtgctggcaaagagaaaattctccggcttgaggtcccggtgcatgacgccgagcgagtgacatccctccacgaccccgacaatggtcttgatgagcttcgcagccgcgcgctcactgtagtggcccttggcgacgatgcggtcgaagagctcgccgccggcgcagagctccatgacgatgtgcacgaagagcgcgtcctcgtaggcgccgcggatgcggacgacgttggggtgctcggagaggtggtgcatgatctggatctcgcgccacacgtcctcgtagtcctcgcggcacagcagcttgcgcttggggatggacttgcacgcgtactcagcgccgtccgccttgcccacgcactggtacgtggtggccgaac

SEQ ID NO: 684 - DNA, 372 bp, Zea mays
tgatcgtaccaatttagaaactagaatagaacatacacttattttgtgtttttatctaagttggtgtaattctgtttcagggagcaagctgcgctcagattaaaagatgagaagatcgaaaaacttcaggaagaggtgtgtatgcttaaagcaatgccttttccagaatgtatagtatattcatgttgttctttgtgccatttcaagtaatggtccgctgtgcagatggtgtgatggcttgcagcttaactgatctgttctcctgtaacagctaagaggtttgatagcccatttcgactgccaaagtgacactgcacaagcttcaaatgcgatctcgagcgatataccagggggcatgattcttccggtagc

SEQ ID NO: 685 - DNA, 411 bp, Zea mays
tgcagtagctgctgcaagctggctgagatcagtaggccaaaactgcgaggtcgatgagttttacttccatttgcatccgaacagaattcacgtaataaaagcttcatagtgtgtatttgcgttagtaaacatatactggtgcgctgcaatttgctcgtgttggtcgtatgtgccggactcccggtctccatccgctgccgttgcggtttatctgaagcaaggcaatggccaactggccacagcagatagatactctggtggtgtggccgtgtgggcggcagctcttgtactaggaagtttcctgtgaccgtgtaccgtccatggaccatgatcttctttgttcatgttggcctcgagacgtcggtgcttgcgtttggtcagcaggtttccatgctcggttcttccatgatg

SEQ ID NO: 686 - DNA, 265 bp, Zea mays
ctctgtattcatatgaatctttctttttctatccgaagaagaagaaaataaaaaagtgatgctagtatccatactctgtagatgatcaaagtggaaaccttccgccacctccttgggaggctcagccagcggcaagcaacgaaatgccaaatggtgaattgggaggcgtgcaacctctccctgggacagctgggcagttcggcggcatgcagcaggcactgcaaccacaagttaaccacatgggagttccacaaaggcagccaat

SEQ ID NO: 687 - DNA, 356 bp, Zea mays
gagttcttaccggaggcggtgtgctgggcggactcgcgcgcggacttgacggtgtggccagccttgcgcgcggtctcctcctcgtcgacgtcggcatggtgcttgagccccaacccctcggagatcttgtccttggcccagcccgtccatgactcctcgtccttgttgctctcctccgcgacgtcgtggacgtccgtcttggccgccacgcccaccgcggccgccgaggccaccgacaagagcagcagcaccagcagcgccgaggggacagcgtggctcctcgaccgcgagagaaacgccattgctgatctttctgagctcgagctttgcagccgcgaatacgagctgtctgtgtg

SEQ ID NO: 688 - DNA, 361 bp, Zea mays
gattttaggaacatggtatgattcgttttccataatgcttatatgtgctgggattgccattaagtttacttccttgctatgcagtatgggccttgacctctctaagggtatcattcgcaacaaccttgagtatggcgtgatagagccatcgatgagcaaagtaaagatcattcaggttaggcctcttgtttctttctcgtcatggtatttgtgatgtctgagttttatcccaattccgatcatctatcctgttcctgttgcagtttgccacggaggctgccattactatcctgaggattgacgacatgatcaagcttaccaaggaagaagagggtaacgaagagtaagcagcccaccagta

SEQ ID NO: 689 - DNA, 398 bp, Zea mays
  misc_feature (389)..(394): n is a, c, g, or t
gaagtcggaggtcgccatgggaatggagatggagagctgggtggccgagaagccgaggctgctgtcctcgcccagctccggccacgagtccctcgacttgggccactcgtcgaagaaagggcgcagcgtctggttctcctgcttggcggcggtcacgaagtcgctgccgaagaaagagaggggctccctctgggtcttcggcagcgacgcgatggtgctctcgtctagcccactcagcgtgccgaacacagggtagcttgtggcttggaatgtgttggtttgggatggcagcaggcgccacgagttgtccatcatcgacggatccatgccgcccgacaagagcgtgctgtgctcgtccgacagagatttcaccccgtatgcagagtacnnnnnntttc

SEQ ID NO: 690 - DNA, 353 bp, Zea mays
gaactgaaaatcgagctattagctcaattttccttctcaggttcgtcgtcgtcgtcgtttggtgacatcattatttattacaactagttacacaagccacgctagcaacttagcaaggtccatgacgtacggcctcacgcatcacaagcactgcccatcctgccatccatcaggattcaggagatgtggcctcggctcttgaggctctcgacggcatccctgatgatcttctccatgggggtgatctgaagccccagcgcgatgagcttcttggaccccacctcctgtctcaccagcccaggctgggtgtccttggggaacctgcaggtaaagcaacacagcacaatgtctct

SEQ ID NO: 691 - DNA, 423 bp, Zea mays
agtatgacgaaggcaacgagatcagtcggagaacttcaactgcggcacagatacgtacacgtctagatgagagatagagagcatgttttatattgtaactatatagatagaactaaaatgaacataaaatattataaaaatcgaacggttctactagttaagattggcctaatatgctacgacttcccgcacatcgggagtctcaacaaacacactaccgtctgatcgtttccacccctccgtctccccttaactttccagcttcacttgcagcggatctgaagccggcttcagatcgtttccagctccgtctccctcttccaccggagctggtgccggtgccggtgcttcttgagtgccttccttctgggaaagcgtctcctccttcagtctagtcacctctaactccttggcttctagctc

SEQ ID NO: 692 - DNA, 461 bp, Zea mays
gggggtggaggtggagctttcatctcttaaattcgcagccaagattaaatggaaacaatggggatatatagccgccagccacatcgtcgaccaaaactacaaatcaacaaacaaagaccactcgggtgtcatcatcataacacgaaagaaatgaaagcatcttcctcttgttgatctgctttgttttgctttgcgttgccgcgcccgcgcgtctccctccgcgcaaccgtactcaccttacttattgttacagagcaaagaagaagagagggtcggatcggtcgtctgctagaccgctactggctgctgctactgagtgtgaggtggcggcgggtactggctcgagtcgggccaggccagcgcgctctcccagttccagtccgccgccgcggacgcctcgctgtgttgcgagtcgtgcggcgacgagtagtagtaccccgaagcagaggaagtagaggacg

SEQ ID NO: 693 - DNA, 470 bp, Zea mays
aggattgcctgaacggaagcactttctggaacaccctcaggccacattggcaccacaacataaacagtgaaccgctccccagcctcaatcttgctgacaatcttcaatgagagctccttcggaatcaagtgaagacaatcgatatcttctggcttgatgccttccggcttccagtcatatgagcttccaaggaagtactgattctcaatgtagatgaagttcttcgccctccgtatggcatttatgtatgcatcctggatactccggtcgatgatttgatcctttccactcacaagcccagctcttgcagcttcatcaggagtctcggggaagccaaaagcagcaccgccgtcaatggatctaaagagctgaacattccaggtgtctctgtcctccgggaacatcacaggagaagggggaataataatgtcagaaagatccctgagacatacaaggaggtccttaccaca

SEQ ID NO: 694 - DNA, 332 bp, Zea mays
  misc_feature (316)..(321): n is a, c, g, or t
taacagcggctaccaatcctggggtccgctctttggaaagctgttcttctcgatctgggtgatcctccatctctaccccttcctcaagggtctcatgggcaggcagaaccgcacgccaacaatcgtcatcgtttggtccatcctccttgcatctatcttctccttgctgtgggtgaagatcgatcctttcatctccccgacacagaaagctgccgccttggggcaatgtggtgtgaactgctgatccagattgtgactcttatctgaagaggctcagccaaagatctgccccctcgtgtaaatacctgagggggcnnnnnnggaattttttg

SEQ ID NO: 695 - DNA, 270 bp, Zea mays
tgagcgagcgacaacccgtcaaacctctcccgctcacgacgggacggccgatcgccgattgctcgcgagctggacgacggaacggaaggcaggcaggcaccttgtagtcggcgttgcgcacgaggttgaggccgcgcacggcgaggatgatctccttgtgcgcctcgtcgacgtagacgaggtacggcgggcacgcgttgccgacctccttgtaggtagcccgcttgaggatgcccttggggtcgatgtcgaagtagccgtgctccggca

SEQ ID NO: 696 - DNA, 272 bp, Zea mays
agctgcgctgctgaagcaaccgcgccggcgatgctgcccaacagggacgtggtcgacgtcttcgtcagccgacacagccccgccgtccacgtggcatagattctcgatcgatcgcgtgcatggcccatgcatgcgcccgccacacgtacgctagcttttatatattcgaaggacgacttgctgctggtcgtgagcatatatatatatatgatggaggaaatgattaagtagtatatatataagtaattaactgccatgcatggaagctagct

SEQ ID NO: 697 - DNA, 429 bp, Zea mays
gatgaagctttggactgtgattgtgtgtcctttgtcttcattgaatagtatctaagtgcaatctccactgtcatttggtatccaggtgacatccatggtcaatacagtgatcttctaaggctttttgaatatggaggctttcctcctgaagccaattatctattcttaggtgattatgttgatcgaggcaaacaaagtttggagactatatgccttcttcttgcttacaaaatcaagtaccctgagaacttttttcttctgaggggcaatcatgaatgcgcctcaataaacagaatatatggattctatgatgaatgcaagcgtcgatttaatgtgcggctatggaaggtcttcacagaatgttttaacactctacctgtggctgctcttatcgatgataaaatattatgtatgcacggtggactctca

SEQ ID NO: 698 - DNA, 347 bp, Zea mays
  misc_feature (339)..(341): n is a, c, g, or t
caagtcctccaggcagcatgaatggagacaccagtcaccatcccatcatcagcgacactgtactgtatagcaatcgggagatacacgatactccaacgcgtaaaaaagcgtaaaagatacgtcaaaacagatgtgatttttgcatccatgcagatgcgaaacaggattttgaatcctagcacctaacggatttaaatgatgaagtttcagttctacgagaggaactgagttgtacgatagggataacttagctgttgtcggactgtgtacattgttggtatcatcacccaaaatattgtacatctagaagccatattgtaattacggcacgtatacagnnncacttt

SEQ ID NO: 699 - DNA, 538 bp, Zea mays
actctgatcccaatcttggcagggttatgcgaataggttagtgccttagtggagattatttgatataaccttcaaagttcaaacatttcttacagtatgcgaataggttagtgccttagtgaagattatttgatataaccttcaaagttcaaacatttcttacagtaataactgatatttgttactcagaaccacatgttcaatcaactaaccaactaccaaaggacttataaattgatacatctagaaccttatgctgttaccacaacatataaacattacatgcttatccagtttccgtgtttgctttgattgctttagctttttatgccccatcttttcaacgccgaacaacaagcaacacattttctagggaaattcaatttccatttcctgttatttttatcatatggcaaaatataagtactgtagttgctaattttgcacaagtcaaggaattatttaatctgaatattgttatgtaatttagttcacttctaatgttatttagtatgctaggttgaaggtggagattgac

SEQ ID NO: 700 - DNA, 183 bp, Zea mays
  misc_feature (157)..(161): n is a, c, g, or t
  misc_feature (169)..(170): n is a, c, g, or t
ccgacacctcggcggtgactgtggagtgggccatgtcagagctcctgaggaacccagaggtcctcgccaaggccaccgaggagctggaccgtgtcgtcggccgcaaccgtcttgtggcagagggggacatcccaagcctcccgtacctcgacgccgnnnnnaaggagannttgcgcctgcacc

SEQ ID NO: 701 - DNA, 364 bp, Zea mays
  misc_feature (270)..(270): n is a, c, g, or t
  misc_feature (296)..(301): n is a, c, g, or t
  misc_feature (314)..(317): n is a, c, g, or t
  misc_feature (342)..(352): n is a, c, g, or t
  misc_feature (354)..(358): n is a, c, g, or t
atcgacaacgaaaatctggcgcaagttacggggaacaggaaagcaagccgggggttccaatcgatcagtcctccaaaggaaaggaaaaagaagaagaacaaaagatcactcctaagacggtgacggcgaggagaaagaaacgaatgatgtaggggctgctatgtccatcaggttgctgttgctgttaaaccagcgcgatgctgctctccccgccaggcggcttgcggatcccgccgaggtagtcccgcgagggggccttcccgtccgcgnagatgtcgctgccggtcatctccctnnnnnncgctgtgctcagnnnnttctccgccgtcccagggggggtcnnnnnnnnnnngnnnnnattgcc

SEQ ID NO: 702 - DNA, 369 bp, Zea mays
atccaggaatcaaaaggagtagtctctctctctctctctcttctttctacaggagaagcatgaatgggccaacaagagatcagcaaggagacgagctgaaagtaaacagaaactaaaccacatatacctgcagcgtgaggaagggtggcatgtggcggaggtggtggttggtgcctgcctctgtctgcggggaggaagccatagttgtagcaagcctctacctccattaattgcttatcgctggcctgttgagctccactgcactactgtcacggtctcacctagctaactgccccgacaaggatgaggaggagaagggggctgcaattgcaagaacgccaagtgcatgaatgaacgactacacagcac

SEQ ID NO: 703 - DNA, 521 bp, Zea mays
gtcctgctgctccccatgtcgcccccactcgacctcgactacataggcctctcgccggcggcggctgccgccgctgcccacgacgacctgaagggtaccgagctccgccttggtctgccggggtccggttcgccggaccgccgtgttgtggctgccaccgcaaccaccctggacctgctcccggctaagggcgccaagcgctggttttctgacgaggcgccgacgccatcgcccggtgcagcttccgggaagggaaagaaggtagcggaagaggaggacgacaagaaggttgcagcgacgccgcagccggtcgcaaagtaggtggattcgggagtggatcttggtgtttgctgcctcaaacaaaaaaaagggaaagcttgggctttgccagtgcgttcatctggcgccactagtgatttgcagattgtgattgttgcccctttgtttgggagcaagttttctactgtttgggaaatcttgctgggtttttttgagttcatgacatttgcaggttctgtgac

SEQ ID NO: 704 - DNA, 387 bp, Zea mays
cacagcacaagggcaagccatgaggaggaggtagctgcagctcgctccggcggccaagacgagccctcgtcatcttggttggcgttgggagctgggagcctgggactgcttggttgggactagtgggacaaaacacatgctgcagattaagttgacaaacgggaatctctctcatctactactagttagtaagtacgtagtaccttgtgcatgctagcttgtaatttctgtcactgcttagtacgtatcgtccgagatccatcatcatccatgactctagtcgtgtatgcgtttgtcagtcacctcgtctgtacattttatctagtatgtctggtacatgtatgtttcttccaagtttttggcttgatatcctctctctctctctca

SEQ ID NO: 705 - DNA, 209 bp, Zea mays
cttctcctgtcccagctcagttggttcaccgaggtacatatatacgtcttcactactcggctctaacctctttggtctttgctgatcgatcgtccttcgtaccagcgttgcgtacaccttagctgctcgtcctaacgtctcgatcttaactggccttgtcgtctgcagaaactggcgtcacggctgccgctgccgctgcatacggcggc

SEQ ID NO: 706 - DNA, 452 bp, Zea mays
  misc_feature (233)..(233): n is a, c, g, or t
  misc_feature (268)..(268): n is a, c, g, or t
  misc_feature (335)..(335): n is a, c, g, or t
  misc_feature (367)..(367): n is a, c, g, or t
  misc_feature (449)..(449): n is a, c, g, or t
atctccctccacaccccttccatatcgaactccagcacctccccggcttccgggggcatgtgcgccccgtctttcagcctgaagggccagtggatctgcgtgcgttcatttgtcaatgcaagcatatagatatcgtggttctattctatcagaaagaacatatatatcacgttttagtagctataagctgtaacctgtccctcagcatacaaaattttgtttttttttccagntaacagtaaggaagttgaagcaatacaaagtcagnggttttggtttcttacaaggtagagatccaggtaatccagctgcaagtccttgagtgttttctcgantgctggccgaaccctatcaggagccagctcgntgcacctgaaaagcagacaaaatatcgatcaaatttcggagactggagcaatatacgtactcaggtattcagcgcaacggtntaa

SEQ ID NO: 707 - DNA, 347 bp, Zea mays
agttatcacattagctttttccggtggcctgtttggtacagcttataagctgttcatggccaaactgtacgcttttctgcaacttattctggctgcgcttagtcccaccatcccatttgtgctaaaaagtagatgggtcaaacctacttattttgactgtgttttactccatttgtgcagcttctctacgaagcgcttcctatatacctcagaagaacgaccgttgtgctagcaagactgcgatgcaagcgagctttctgatcctttaaatcctaatccaactgtaggtcacatttaacacttaaacctcttcaccaccagcttacgcagcttttttcaaaaaaaaa

SEQ ID NO: 708 - DNA, 448 bp, Zea mays
tactactataacatcgagtcaattcttgcactcatcgtgtccttcttcattaacatctgtgtcacaactgtttttgccaaaggattttatgggtctaaacaggctgacagtataggtcttgagaatgctgggcagtacttacaagaaaaatatggaactgcattctttcccatcctctatatctgggctgttggtttgttagcatctgggcagagtagcacaattactggcacatatgcaggacagtttgttatgggaggtttccttaatcttcgattgaagaagtggctacgggcaatgattactcgaagttttgccattattccaactatgattgtggctttatttttcgatactgaagatcctactatggacattctgaatgaagcactcaatgttcttcaatccatacagattccgtttgctctaattcctctcatcaccctcg

SEQ ID NO: 709 - DNA, 378 bp, Zea mays
gtagtgtatataaacaaagttggctgtttaacagatcttgtatttacggtctatgcccacaaagttacagtttcaggttgtggcagtgcgtctgtcaaatatcagaacacaatggtgacttcgcagtcacgcgaaggaactgcaagcggcaaattgattctttggacctattaccccactaggacacgtttttcttcggggtgccatcatggaagcagattgcaattaggatttatatagaatgatgtatagcatgtcgataactcgaacatgacttcctcgatatatgtagtactgtcttccaaaaaatagcattcttgtagcatcaaacggccaaacctatgttcgtggaagcatagttaataccctttattgctc

SEQ ID NO: 710 - DNA, 518 bp, Zea mays
gacctccctcgcctcccctacatcgaggctgtgctcaaggagaccctgcgcctgcaccctgccgcgccgatgctggcaccccacgtggcccgcgaggacacatccgtggacggctacgacgtgctcgctggcacggtcgtgttcatcaacgtgtgggcaatcggccgcgaccctgcgctgtgggacgcgccggaggagttccggccggagcggttcgtcgagactcgagagcaagatcggcgtgaggggccaggacttccagctgctgccgttcggctctggccggcgaatgtgccccgggatcaacctcgcgctaaaggtgatggctttgagccttgccaatctgcttcacggcttcaagtggaggcttccggacggcgtgacggcagaggagctgagcatggaggaggccttccagctcacggtaccgcgtaagttcccgctcgaggccgtggtcgagcccaggttgccagaccgcctgtatacgggcgcttgatcgatgatgcccgtacctgtgt

SEQ ID NO: 711 - DNA, 521 bp, Zea mays
gcggcgtcggcgcacaaggggcggcactcggccgtggactacagcatgaaggcgtcgacgacgacggggcagacattcaacttcctgagcgcgctcggggacgtggcgttcgcgtacgcggggcacaacgtggtgctggagatccaggccaccatcccgtccacgccagacaagccgtccaagaagcccatgtggcagggcgtcgtcctcgcctacctcgtcgttgccatctgctacctccccgtggcgttcgtcggctactacgtcttcggcaacgccgtcgacgacaacatcctcatcaccctcgagaagccacgctggctcatcgccgccgccaacatcttcgtcgtcgtgcacgtcatcggcagctaccaggtggtcccaaataacctcccgcgcgcgtattgctgcgtcgttagtattggtgacggctacgcgcgcacagtacactaacatataattagtgcagatctacgccatgcccgtgttcgacatgctcgagacgttcctggtgaagaaac

SEQ ID NO: 712 - DNA, 438 bp, Zea mays
gcttcgctggttctgctctctagcttttaactcgttcgatcctgctctttcttcagaccgatctgagctgcgggccgtcgtccaaggcgaaaggagggcagccggcggcggcgccgggctccggcggcgacaggcaggggaggggcaagatcgagatcaagcgcatcgagaacacgacgaaccggcaggtcaccttctgcaagcgccgcaacggcctgctcaagaaggcgtacgagctctccgtgctctgcgacgccgaggtcgcgctcgtcgtcttctccagccgcggccgcctctacgagtacgccaacaacaggtgatttgtttttatatatgtgtatgtatgcaaagatgtcatctttggcttctcgaaatctccgcgcatatatacatacagagacgcatatatatattctcgtttcatcgaacacttgagac

SEQ ID NO: 713 - DNA, 337 bp, Zea mays
aggttcggagaaggctcacttcccctcctacgcttttaagaagctggaagaaggtgacctccgcgatatctccgactccaagctaaaatacaagggccaggatagccggattgagatggcaatcaaggtcgccttgtggtgcatccaggaggacttctatcagaggccgtccatgtccaaggttgtccagatgctggaaggcgtctgcgacgtgccccagccaccaatgtcttcgcatattggataccggctgtacgcgaatgccttcaaatctagcagcgaagagggcacgtcgtctgggatgtcagactacaatagtgatgccttgctttctgct

SEQ ID NO: 714 - DNA, 161 bp, Zea mays
attgcgctgctcgcaatcgggaaggcacatgttaagaggcataggacatacctcacaaccctcctctactacctgtccattggattcagcagctccggactgtcgtacgtcgcaggcgtcctcctcacgaaggtcctagcacacttcggtatcattgatca

SEQ ID NO: 715 - DNA, 1562 bp, Zea mays
  misc_feature (352)..(369): n is a, c, g, or t
  misc_feature (374)..(375): n is a, c, g, or t
  misc_feature (380)..(382): n is a, c, g, or t
  misc_feature (390)..(391): n is a, c, g, or t
  misc_feature (393)..(396): n is a, c, g, or t
  misc_feature (400)..(409): n is a, c, g, or t
  misc_feature (411)..(413): n is a, c, g, or t
  misc_feature (430)..(433): n is a, c, g, or t
  misc_feature (437)..(440): n is a, c, g, or t
  misc_feature (444)..(454): n is a, c, g, or t
  misc_feature (456)..(457): n is a, c, g, or t
  misc_feature (460)..(462): n is a, c, g, or t
  misc_feature (470)..(475): n is a, c, g, or t
  misc_feature (478)..(480): n is a, c, g, or t
  misc_feature (482)..(486): n is a, c, g, or t
  misc_feature (491)..(496): n is a, c, g, or t
  misc_feature (501)..(504): n is a, c, g, or t
  misc_feature (506)..(507): n is a, c, g, or t
  misc_feature (509)..(510): n is a, c, g, or t
  misc_feature (525)..(529): n is a, c, g, or t
  misc_feature (532)..(537): n is a, c, g, or t
  misc_feature (541)..(544): n is a, c, g, or t
  misc_feature (551)..(552): n is a, c, g, or t
  misc_feature (558)..(563): n is a, c, g, or t
  misc_feature (566)..(567): n is a, c, g, or t
  misc_feature (570)..(570): n is a, c, g, or t
  misc_feature (578)..(584): n is a, c, g, or t
  misc_feature (589)..(592): n is a, c, g, or t
  misc_feature (600)..(602): n is a, c, g, or t
  misc_feature (607)..(607): n is a, c, g, or t
  misc_feature (613)..(614): n is a, c, g, or t
  misc_feature (617)..(625): n is a, c, g, or t
  misc_feature (631)..(635): n is a, c, g, or t
  misc_feature (637)..(640): n is a, c, g, or t
  misc_feature (649)..(652): n is a, c, g, or t
  misc_feature (656)..(673): n is a, c, g, or t
  misc_feature (675)..(676): n is a, c, g, or t
  misc_feature (680)..(681): n is a, c, g, or t
  misc_feature (685)..(692): n is a, c, g, or t
  misc_feature (702)..(707): n is a, c, g, or t
  misc_feature (711)..(718): n is a, c, g, or t
  misc_feature (724)..(725): n is a, c, g, or t
  misc_feature (731)..(731): n is a, c, g, or t
  misc_feature (733)..(735): n is a, c, g, or t
  misc_feature (738)..(741): n is a, c, g, or t
  misc_feature (743)..(743): n is a, c, g, or t
  misc_feature (750)..(757): n is a, c, g, or t
  misc_feature (759)..(767): n is a, c, g, or t
  misc_feature (771)..(773): n is a, c, g, or t
  misc_feature (775)..(775): n is a, c, g, or t
  misc_feature (777)..(779): n is a, c, g, or t
  misc_feature (781)..(790): n is a, c, g, or t
  misc_feature (794)..(819): n is a, c, g, or t
  misc_feature (821)..(824): n is a, c, g, or t
  misc_feature (827)..(829): n is a, c, g, or t
  misc_feature (832)..(836): n is a, c, g, or t
  misc_feature (838)..(842): n is a, c, g, or t
  misc_feature (845)..(855): n is a, c, g, or t
  misc_feature (858)..(868): n is a, c, g, or t
  misc_feature (872)..(880): n is a, c, g, or t
  misc_feature (883)..(886): n is a, c, g, or t
  misc_feature (889)..(898): n is a, c, g, or t
  misc_feature (901)..(903): n is a, c, g, or t
  misc_feature (907)..(921): n is a, c, g, or t
  misc_feature (923)..(924): n is a, c, g, or t
  misc_feature (926)..(933): n is a, c, g, or t
  misc_feature (936)..(936): n is a, c, g, or t
  misc_feature (939)..(940): n is a, c, g, or t
  misc_feature (944)..(958): n is a, c, g, or t
  misc_feature (960)..(960): n is a, c, g, or t
  misc_feature (964)..(978): n is a, c, g, or t
  misc_feature (981)..(984): n is a, c, g, or t
  misc_feature (986)..(993): n is a, c, g, or t
  misc_feature (995)..(1007): n is a, c, g, or t
  misc_feature (1009)..(1020): n is a, c, g, or t
  misc_feature (1022)..(1041): n is a, c, g, or t
  misc_feature (1043)..(1043): n is a, c, g, or t
  misc_feature (1046)..(1056): n is a, c, g, or t
  misc_feature (1061)..(1062): n is a, c, g, or t
  misc_feature (1065)..(1082): n is a, c, g, or t
  misc_feature (1089)..(1120): n is a, c, g, or t
  misc_feature (1124)..(1152): n is a, c, g, or t
  misc_feature (1154)..(1155): n is a, c, g, or t
  misc_feature (1158)..(1168): n is a, c, g, or t
  misc_feature (1170)..(1178): n is a, c, g, or t
  misc_feature (1182)..(1204): n is a, c, g, or t
  misc_feature (1208)..(1211): n is a, c, g, or t
  misc_feature (1213)..(1222): n is a, c, g, or t
  misc_feature (1227)..(1230): n is a, c, g, or t
  misc_feature (1235)..(1236): n is a, c, g, or t
  misc_feature (1239)..(1241): n is a, c, g, or t
  misc_feature (1247)..(1249): n is a, c, g, or t
  misc_feature (1254)..(1254): n is a, c, g, or t
  misc_feature (1256)..(1261): n is a, c, g, or t
  misc_feature (1263)..(1284): n is a, c, g, or t
  misc_feature (1286)..(1286): n is a, c, g, or t
  misc_feature (1289)..(1291): n is a, c, g, or t
  misc_feature (1294)..(1302): n is a, c, g, or t
  misc_feature (1304)..(1315): n is a, c, g, or t
  misc_feature (1317)..(1320): n is a, c, g, or t
  misc_feature (1322)..(1329): n is a, c, g, or t
  misc_feature (1331)..(1331): n is a, c, g, or t
  misc_feature (1333)..(1340): n is a, c, g, or t
  misc_feature (1342)..(1342): n is a, c, g, or t
  misc_feature (1346)..(1361): n is a, c, g, or t
  misc_feature (1363)..(1365): n is a, c, g, or t
  misc_feature (1367)..(1379): n is a, c, g, or t
  misc_feature (1388)..(1390): n is a, c, g, or t
  misc_feature (1393)..(1400): n is a, c, g, or t
  misc_feature (1405)..(1412): n is a, c, g, or t
  misc_feature (1415)..(1419): n is a, c, g, or t
  misc_feature (1425)..(1425): n is a, c, g, or t
  misc_feature (1429)..(1440): n is a, c, g, or t
  misc_feature (1443)..(1446): n is a, c, g, or t
  misc_feature (1451)..(1460): n is a, c, g, or t
  misc_feature (1462)..(1469): n is a, c, g, or t
  misc_feature (1473)..(1485): n is a, c, g, or t
  misc_feature (1487)..(1490): n is a, c, g, or t
  misc_feature (1492)..(1492): n is a, c, g, or t
  misc_feature (1495)..(1505): n is a, c, g, or t
  misc_feature (1507)..(1509): n is a, c, g, or t
  misc_feature (1513)..(1516): n is a, c, g, or t
  misc_feature (1519)..(1521): n is a, c, g, or t
  misc_feature (1524)..(1529): n is a, c, g, or t
  misc_feature (1533)..(1539): n is a, c, g, or t
  misc_feature (1542)..(1556): n is a, c, g, or t
tggatctgttggtctattacccgagctaactcctcatggccacctggtctgagcagaaatcgtcgttcctagaagactggctgagatcactatccgcatcgttgaacagctccgagcgccagcccttgccaacggaggccacaaacgacgaggacggcttcagcccaaacgtgactcagaaaggcatgctgtcttccgccctgcagtccttgctcggcgtgtacgcgggcaggacccagcaggtcatcacccagagatttgagcaactggctagaagcgtcgcttgaatggtgagcagcgacgagcagtcaggtgtggtctccactccagcctccattaacaagcagcgatnnnnnnnnnnnnnnnnnntgacnntcgannnatgcatanncnnnntgcnnnnnnnnnnannntcttgggggtaggaccnnnntggnnnnccgnnnnnnnnnnngnncannnaaggactnnnnnngcnnnannnnnagcannnnnnttctnnnntnncnntttggggctggaagnnnnnctnnnnnntttnnnnggcctcnntttggnnnnnnggnntgngcgctcgnnnnnnngtttnnnngaattgcnnnatagntgaatnntcnnnnnnnnnttctannnnnannnncaaattttnnnnctcnnnnnnnnnnnnnnnnnngnngggnngttnnnnnnnngggtaaatannnnnnaacnnnnnnnntttagnnctaaantnnnagnnnnangtttggnnnnnnnntnnnnnnnnntaannngntnnnannnnnnnnnncttnnnnnnnnnnnnnnnnnnnnnnnnnncnnnngcnnnccnnnnncnnnnnctnnnnnnnnnnnacnnnnnnnnnnncgtnnnnnnnnnctnnnnaannnnnnnnnncannnccannnnnnnnnnnnnnncnncnnnnnnnnccncannccannnnnnnnnnnnnnncnctannnnnnnnnnnnnnnatnnnnannnnnnnncnnnnnnnnnnnnntnnnnnnnnnnnncnnnnnnnnnnnnnnnnnnnncnctnnnnnnnnnnntcacnnccnnnnnnnnnnnnnnnnnnctccccnnnnnnnnnnnnnnnnnnnnnnnnnnnnnnnncccnnnnnnnnnnnnnnnnnnnnnnnnnnnnngnnccnnnnnnnnnnntnnnnnnnnngcgnnnnnnnnnnnnnnnnnnnnnnntctnnnncnnnnnnnnnntcccnnnnccctnnacnnnccccgnnnccgcncnnnnnntnnnnnnnnnnnnnnnnnnnnnnanttnnntcnnnnnnnnncnnnnnnnnnnnncnnnnannnnnnnncncnnnnnnnncnttcnnnnnnnnnnnnnnnncnnnannnnnnnnnnnnnttccccttnnncannnnnnnnatccnnnnnnnnatnnnnncccctncgannnnnnnnnnnnctnnnngctcnnnnnnnnnnannnnnnnncccnnnnnnnnnnnnncnnnntnctnnnnnnnnnnntnnntctnnnnacnnntcnnnnnnaaannnnnnnccnnnnnnnnnnnnnnnatcata

SEQ ID NO: 716 - DNA, 367 bp, Zea mays
  misc_feature (357)..(363): n is a, c, g, or t
gagctgtatctgtaagcagctgcacagtagcagcagcatcacgaacccgatgatgcagtcggtcttgtactgcatgttgccggcgcaacgcaagtacttcgctcaggctttcccacatgatccaaacaggcgcagcttctctgctacaacagctttcattgcctctttagcagacgccatcacctgaatcaagtccttttctggctttctgagggacgccaggtagctgttccgaacctcggtgttcacattgaattttctcacgcccaagtctatgcactcctgctccagaaattagtgcactgttatagcgcctacacgataagttttatcctaataatacttgagatatggccnnnnnnntagc

SEQ ID NO: 717 - DNA, 492 bp, Zea mays
tcgatgggggactgcatccgcccggcgctgcagttgccccactccgccttgatgctgccccagtgctccggcccgttctcgtcgccgacgacgtagctgaactcctcctcgtgctcggtttcttcctgggctctggcggccgggacggcaacggagagcaggaaggccgccgcgaggagccgcgcggcggtgaggccgcggaggtgacccatacccttctgtagcctctccgcgtgcgggctctgctttgcctttttggaagctgaactggtttgggatgaattgcccccccccgcaccgagtccgagtatataaaaggccgtcgtctcgtcagtgtgttaatgccaaaacacactcatattgtttttaaaaaagaaacttttattcttataaaactccatacttttacgatcgagtctctttccatcatacagtatggtattattatatttaatgtctataacattttgatattaaaatcggtttaataga

SEQ ID NO: 718 - DNA, 458 bp, Zea mays
  misc_feature (349)..(349): n is a, c, g, or t
  misc_feature (438)..(442): n is a, c, g, or t
tttcgtgtttctttgcaccagcagggtggaagggcccataaacaaagtcactccttttcccttgcaccagctgcctctcaaaagtcttcactatgttaccagcaccctgcatgagcttgactttgttctccgctgctgagtctaacttgcctcgcttattgtcaatgtttgtaagatcagtaccaaatgctctcttattgggcattgccttcatcgatggaggtacagaaaccatgacattgttatcttgctttcgctttgcctggcctagccaccggaatgcaggttttcttgtgtctgcttgctgcgtctgaaacaaacgttacaagaaacttcagcagccaccagncagaaatatcattccattcatttgaaatggtatgcagtcgagaacctaccttctcaatgaggttcaaagaagacagcacattggcaatnnnnnacaatcgacgaacttt

SEQ ID NO: 719 - DNA, 360 bp, Zea mays
tgtcagtggaatttcaaaacgctggcagttccatccccattccgaccctgccgccgcacccaccccaaccccaacccaacgggccgggtcccttcagattctcgacagtccgcgttaaataggccgccccgctcgccttccactcctcgttcccacacccctcaccgcgtccgcctcccctaccatctagggtttctagggttttcgaggaggaggaaatggcgtctgatagggtgctcgggactgtgaagtggttcaacggaaccaagggcttcggtttcatcacccccgacgacggtagcgaggacctattcgtccaccagtcctccatcaagtccgacggctaccgcagtcttaacg

SEQ ID NO: 720 - DNA, 660 bp, Zea mays
cgcgtcaaggcgtgggctctgctgtggctgggagctacgcctgcgtcggactctggtagcctggcgcaccgggagcaccacggatggggtcgacgatgcggatctatgtgcctgtttgtttcggcttctggcagcttctggccaccaaaagctgccgcggactgccaaacgctcagcttttcagccagcttctataaaattcgttggggcaaaaccatccaaaatcaacataaacgcataatcggttgagtcgttgtaatagtagaaatccgtcactttctaaatcctgagccctatgaacaactttatcttcctccacacgtaatcgtaatgatactcagattctctccacagccagattctcttcacagccagattttcagaaaagctggtcagaaaaaagctgaaccaaacataccctatatgttcgtggaaattttcagccgcatcaggatcgtcagctcggcttgggcctggcgcggccgcggcggctggcacatctgctggatcgatcgatggctgcgagattccggcacggcacgtgagaggttcacaggcacgggcacgagacacgacaaacgcctattcttggtgggtgcctgtctttgcggaattaactactggagtattacagtgtcgtgcactgccgtaatacacgat

SEQ ID NO: 721 - DNA, 477 bp, Zea mays
actcccacacacacaaacaaacaatattgtagcagacaatacagctgcataattgtactcccacagacaattacaaactgaatagtcatcattactgagcagggaggaagttattgttatcatgtgacaacaacctttccccctaatttcaatacacacaaactctagttgaaaaaaaatctggtacaacactccagatgcacactgcagataaaacaaattcctaagcttgacaatcaagtggccaaccgctgcatcagctagatggccggttattactgacaggacccgcgagtgaactgctcgcatcgtgcggttgcgtcttgcacgcgagcctcacggaagtatggatctgtgaggtttcggccattgcgccattcccgtaatcgccacaggccagccttttggtaactggggggatcaaggctatgcccagttggttgattgtgtaaggctatgcccagttggttgattgtg

SEQ ID NO: 722 - DNA, 213 bp, Zea mays
gctactgttctgcccagaagagtgctgcttgtttctgacaacctatgaaatcggacataggaaacaactctcagaaatgcatgtcttcgataaacaaatagtggtactttgcctttacatgatgtcgtatctcaatcaatagtatttttttttactatcgaagcgcaattatttccttagacaactattccctcctactttgtaatcatgcaa

SEQ ID NO: 723 - DNA, 509 bp, Zea mays
agcaatttgaagtttagattcaaactaaatgagttcccaaaggatttggtatatttggatcacatagccgccacttgttttggaatttgcaatcaaatacatttttctaacttctaagtcaaaaacatttagattttgctattcaaaccaattttaaataattgttttgatcaaataccaaaaactttccctgtttcccataagataaattctccaccataaaagaacaattttataataaaagggctcctctttgccattagcaatagtgcagtactggaacggccgattctagtggtcatgaaacgacctacggctatccactgcatcgcatctcaacggcagccgtgtgttgtggcagcgccatccaccggtatgcggtatccaggtccaggggcatggtgctgggccatccgattccatcacagaaaacagataccttcacagtcagcggcatcgctcagcgtttacccaacaccagcaatgcagggaggtttattcaacacttg

SEQ ID NO: 724 - DNA, 445 bp, Zea mays
acactatgtattggctatttatcggggcaggcttgactgaggggcacaaggattgcaacgtatcattgatcgttgtagttcactgcccactttggccacaggagaggtcatatcatcgagaggttgacggcactaccctcatccctcacctgtatagaaaggcaatcggggccaatagtggtacgatgtgaatattccaggatttgctgccattcagaaagtcaagttgcagcaactgcatgcctccatggtaccatgaagacacgcccgtagagtggctttgtatagaggtgctataggcgaggtggacaaccctttcggatatcgcacatggcaagatatttacattgacattttgtatgcacccgatatggttttgatatttatgccacaaatcatttaggtggtgatgcaagtagtttgttgtgattggaaatttgggagt

SEQ ID NO: 725 - DNA, 388 bp, Zea mays
aagagttgtttgaggctacaatccggtatttatttatttatttattttcattctcagtttatgttcaataataacatataacaacggtccagtgattctctcgagtttgtgttttgagcaggcagccatgcttctgcgatactccatttgttctggttctgaacaagtacgaccttttcgaggagaagatcaaccgcgcgcccctctctagctgcgagtggttcaacgacttctgcccggtgcggacgcaccacaacaaccagtcgctggctcatcaggcatactactacgtggccatgaagttcaaggacctgtactctgcgcagacgaaccggaagcttttcgtgtggcaggcccgtgcccgtgagcgccagactgtggacaaaaa

SEQ ID NO: 726 - DNA, 428 bp, Zea mays
  misc_feature (418)..(423): n is a, c, g, or t
aactacgattttgctgagaaccagtctaattaaactatggctgtgcatagaaccagtctgatcgtcttatactaatttgttcgttgctatttgcttcgacagctacaacgttgactggacttcatttcgcgatgacgaccttgatgacattagtaatgaaatggctgggatatattcagccgtcctatctaccgttacctgaactagtaaaattcgcattttttgcgaacctgtctattgttgggatgaatgtaagcttgatgtggaactctgttggattctatcaggtgcagacagaaacttcgatattctataagtatatcggaatgaaactcgtatactgacgctgtctgtcttgccttttttttcagatcgcaaagctgtgtatcattccagtcttatgcattctggaaatcannnnnnacaaa

SEQ ID NO: 727 - DNA, 347 bp, Zea mays
cgtgggggaagttttggctttcggtagggaattgactcttatttatttgtttattagctgcttcccttttcttggatctgctttaaccccttctaattacctggcttattaaaggtactaggtgtatttgaatggtctggtaacaacccggtgccaccagaagtatggctactgccatatctcctcccatttcacccaggttctgctttctttttcttgatgtacataaagctagtatattataggtgtatattaccagtgttagcctaaatgtttaaacagtttaaacggtcacctaccatttagctatgtattcaggctaaatggctatttagatggactagatg

SEQ ID NO: 728 - DNA, 526 bp, Zea mays
gatgttaccgtggtgattagatcccgtgtttgagtaccgcagcccagaagctcagttctgtgcggacacccttttcagtttccacttgggccttccattgtagcggtgggtgaataagagagtggaagtgctttgcaaagtcatcagatctcttttaggcccttgcgtttctcttccgttactggtatccatcgaaccaggtttctaaatcctgccgattgtgaacttgtgccgtgatacactagtactgcgggaataatgatcttgggatggcattgtcagcaccgtgctagtaaataaagatgcaatttgatttattcctttggcccagcgtcatgattttgttgtgtttcacatctgttggtactgcggcatgctactggttgaaactgtgtttgtgctgcaccatcctgtgcgcaaaataatacagcggccaataggccatgtcgccgcattggatgtgcattgcacttttgtttcaagcaagcaggttcgcaccatggttttaaatctcccgctgtacaat

SEQ ID NO: 729 - DNA, 224 bp, Zea mays
  misc_feature (205)..(211): n is a, c, g, or t
  misc_feature (213)..(214): n is a, c, g, or t
ggacgccccgtcagcttggcgtactcgatcagcgccacgtcctccgcgccgctgaaccacaccacacgacacgagagggatcggtgtcgtcagttaagctaggtttgcccgtattccgatgatcaaactttattaagcttgaataaatttataaaaattactataatatctatatctctaaataatttaactataaaataaaacnnnnnnnannaatctattaa

SEQ ID NO: 730 - DNA, 383 bp, Zea mays
agctcgtctccgggttcagcctaggcgacctattcccgtcatcgccgtttatgaacttcctcagcgggacggcacggcgagcgcatgcgaaccataggaagaactttgagctcatggaatgcgccatcaagcagcacgaggaaaggagagcccaagcggcggtgaacggcgctgctgtccaggaggaggaagcagaggacctagtggacgtgctcttgaggatacaaaaggatggcggcctcgacatgcctctcacaatgggaataatcaaagccgttatacttgtaagtagtacataacaagagtttatcatgtttgttttcattttaatttgttaatcgtgcatgttcttgcatatatatacaggacttgttcagcgctgg

SEQ ID NO: 731 - DNA, 759 bp, Zea mays
  misc_feature (391)..(393): n is a, c, g, or t
  misc_feature (409)..(411): n is a, c, g, or t
  misc_feature (413)..(415): n is a, c, g, or t
  misc_feature (428)..(429): n is a, c, g, or t
  misc_feature (445)..(446): n is a, c, g, or t
  misc_feature (481)..(481): n is a, c, g, or t
  misc_feature (531)..(532): n is a, c, g, or t
  misc_feature (550)..(552): n is a, c, g, or t
  misc_feature (554)..(554): n is a, c, g, or t
  misc_feature (604)..(606): n is a, c, g, or t
  misc_feature (608)..(609): n is a, c, g, or t
  misc_feature (622)..(624): n is a, c, g, or t
  misc_feature (626)..(627): n is a, c, g, or t
  misc_feature (631)..(642): n is a, c, g, or t
  misc_feature (645)..(650): n is a, c, g, or t
  misc_feature (652)..(659): n is a, c, g, or t
  misc_feature (661)..(663): n is a, c, g, or t
  misc_feature (665)..(669): n is a, c, g, or t
  misc_feature (672)..(687): n is a, c, g, or t
  misc_feature (695)..(712): n is a, c, g, or t
  misc_feature (714)..(714): n is a, c, g, or t
  misc_feature (717)..(717): n is a, c, g, or t
  misc_feature (719)..(719): n is a, c, g, or t
  misc_feature (721)..(721): n is a, c, g, or t
  misc_feature (723)..(756): n is a, c, g, or t
gaagaacgctgacggcgactcggccacaaaaaaaaccactagcatttttcgtgcaacgatggccataaacaaatccacaggctcgtacgcatcacagtttatctacacaagaaaataacacagacgagctaattcattccacagcgctacggactcaaccaatgctcacctccgaacagaaacatgccctcccgctccccggtggctccgacaccgccaaaagctgcggagaaggccctgttgcctccacctcccgcggtggcggcatcctccgcctggccggactctgtgagtggctgcgggttcgaggacagcagccagatcccgagacctgagccggcggccaccgaggccgcggcgaaagccctagagtcgctgcacaaaaaaaatnnngcctctgctttctctnnngnnnagtaaccttgctnnatcatcttcgttaggnnttctcagatattcatctccaaaaacctcgacaacngaacaaacaaatcttcgtagactctcaattgtagtactctcacctatacnnacataatcatcagtaacnnnancagctaccccataagataacattcgaaatgctgcaggaattttttgcagnnnannaagccctagagtnnntnnacannnnnnnnnnnnctnnnnnntnnnnnnnnannncnnnnnagnnnnnnnnnnnnnnnncgtcctgnnnnnnnnnnnnnnnnnnanggncntntnnnnnnnnnnnnnnnnnnnnnnnnnnnnnnnnnnaaa

SEQ ID NO: 732 - DNA, 306 bp, Zea mays
aggtgggcagagctaaagcgcaacgaggagtgggcagtgtaaataggcacgtgataaaaaaaatggagataaattgcactggttgattccatggtagcagcatcctggggatgtacgtataagatggcaggtagtcggcctcgtcgttttgttctaggagaagcagttggaagaaaagaagtactatacagaagccaaacttgtctacccctatccagctggtgtgtctgctatgcggcagcgaaacttgagtcattagattgtagcctgaatgaaagcagcgctagcttgcgatgtagcagtacc

SEQ ID NO: 733 - DNA, 358 bp, Zea mays
atggggtggagcgtacccatccgcaggaagttgttgaagaaacttatgaacctgaggttgatggaggttccaatacaggcggtgatacaatgaatgagactaatacacatgaacagcatactgcacagcagccaaatggagcacatgggcgtcatagatggctgtttattgcagcagctccagttgtaagtcttgtcagtttagctctagttttgtgcttcaccaatcctgctggcaatgttaggaggcaattgtgccgtaggtcccagactaccactacggcacatgtagacacaagaagaagttggtggtctatgttctaagtaaccagtgtttacttgctgatgctgaatttctg

SEQ ID NO: 734 - DNA, 412 bp, Zea mays
ataaatgatgtaagtgacactgggaatcctacatatactttctggacaatgtaacaacaaacatagggcctgtttggctgtgtggtagtggctcaagattttacccccaaaagggagagatctagggctaaaagccagtttggagtaccatttatgtttttttaatggaagagaacacttaacacaaataaaagattagtgttccttaattgatgaaaaaccatgagctctagtacttacagatcatctagtcttgagttgttagagtctctgatcaggtttgatgaacggagtgatagatcaactcgaagtgatccttctgatgagcggctcacagacaggaccttgcacttcacaaactggccctcatggaatccagacaagggttcagacacccaagagtcaacaattt

SEQ ID NO: 735 - DNA, 422 bp, Zea mays
ccgggttattacggtcaacgaagggcgtaatccaatccttcatgcaaatgccatcaacttggcaaaagcgtcagaccggtgtgggagcactgggcaatatcatgatgggaaggcgtagttggattttggtggagattaagtcatggattaggccagaaatggtcagacattaattaattgatagagatcacatcggtgttgctaactggctagagacagcatacagaatagcggcataaactagcattgccacgagcattcgtggacagcgcaccagacggatccatcagggctcgctagtcggtgcagcacaacataaaagcaacaacgaagctacaggtgagccgaagcattcaggaatcaggatgctcccaggcagccagttcacccaagctactccgttgggcagagtttcatgtaca

SEQ ID NO: 736 - DNA, 373 bp, Zea mays
catgcgagtgcccctaggagatgccctgtttacattcagaagcctcccactaatgtcctatagaaaataagttggttagtaatctattcatcacaattttgtgacatatatgtggtcttcgtatatatgagggtgtctatagtctacatgctttgaagtggtacacagatgtgccccttttatctaagccacaccataaaatgagatgagcctaacatgactgcctcttctccatgagatgacatgagatgagatgtatggtcatctcaagttctgaacctctcaacgcaattcaatttccatgtataatgacggcatgcgaatccacaacatgaatgaatgcagaggatgggagctttagtggactgcagtt

SEQ ID NO: 737 - DNA, 379 bp, Zea mays
agtttcatcatctgggtacaacatcagaccgatgacactgctacagtggagacgaaatgcaagaatgaattaacatctctggactttggcattctatgatggggggtcctagaagcaccaaactgtacagcggaaactcaacaccgtacccacccatagaatcattactcactttcataatcatcttcatctccgaacgagaacaccgaggcatctgcggcaatcgccttgaattcgctcatgctggaagagtcagcagctggaggaggtggtgctgtggtggagctggccttgctgctgacttcagttttgagagatgtaccatcaggtgcctttgtggttccctgttcgctgcttatagccactttgtccagtaaaa

SEQ ID NO: 738 - DNA, 472 bp, Zea mays
aaatccaccccctagttcagctaattatagagcagcacctaaaattccaataaagtaaacaaagtaattgcattctagagataggtatcaagcaaaaattgccagcaatttctgaatcatcagaaacattcagctggagaggacgccatcattcagtgatagattagccagctgctgctcggtggaggcattgctctgctggagatgctgggctgagcggagaacctccatggcttcagcaaccttagccttgagagcatctggcgactccagcaggtgaagaacctccgtctggtccatctccaaaagcatgccagtgaccttggcagcctgctcacgctccagctgttcaacaagaggatacaggttctcaccaagcatctgcaacacaggacacagtgatgagcacccttgattaagaaataggagcaaccaataaatagcttgtccattctcaccagtctttgctgat

SEQ ID NO: 739 - DNA, 488 bp, Zea mays
gagggggaaagcgaccgtgtcgtcaccggggtaggcggcggcgtgggaggagaggacgaagcggaggaggtcgccgatgcaggacgagaagggtacgccgccgacgcccggagactgcggtgtcggggtggcggcatggtcgtaggtcgccattccccgatgtgtgcacctgccgccggcgaagaaaatggagagaggcttgctgcttgctggtaccgtttgcgttattttagaatttagagcaagggtgaggggtgtttgatacacccactaaactttagtttatatcacattaaaaatgttcgtaggctagttagaaatattaaatattagtttagttatacaactaatacaatatatatatatatatatataaacggtaagacgaatttattaagcatgattagtatatgattcactcgtgtcatactgtaacaaatatttgctaatcataaattaattagacttaatagattttgtctcgccgt

SEQ ID NO: 740 - DNA, 334 bp, Zea mays
ggactctttgctgacgctggcatacttgcaattgagcatgctgactttgagggcattgaacgtctggctcttgttactggtggtgagatcgcatcaacttttgataatccagattctgttaagcttggtcactgcaaggtaattgaagagatcatgattggggaggacaggttaattcatttctctggggtcgcgatggggcaggcttgcaccattgtcttaaggggggctaggtatgtcttgttctacacttctacttatcatgcaggactactatgttccatctatgcatttcaaatttccataaattgagtatttttgctttttttcatcc

SEQ ID NO: 741 - DNA, 400 bp, Zea mays
cggcggcgcgggaggtggacgtggtgggcgtgttccggtacaaggacacctggccgctgtgcatcgacttcctgcgcagcggcaaggtggacgtcaagccgctcatcacccaccgcttcggcttctcgcagcgggacgtggaggaggccttcgaggtcagcgcccgcggccgcgatgccatcaaagtcatgttcaacctctaggcgggcaagccgcctccctctcggtccagccgtctaggcgccgtcgccgttgccgtatgcccctgcccccacccaggccacaactcctggaataaaaatgacagaaaagaaactttatagttcgatgaatgggcagtttgccgtggttttggaataatttggactttgtcttctttcgcttctgttgtcgtaccatt

SEQ ID NO: 742 - DNA, 440 bp, Zea mays
aaaacttaccagatctctatcatcagctgaaaagaaagataaacaggacgaagggaacaatcagagtggacagctggtgcaggaggaagaaagagaaaaaggcaaggttgggttttgggtctactggaaatacctcaccttagcttataagggtgcactcgtaccgctagtgttgcttgcacagctacttttccaagtcctacaaattgggagcaattactggatggcttgggctgctcccgtttcaaaggacgttgagcctccagtgagcatgtcaacactgatatatgtctatatcgcgttggctgttggaagctccttctgcgtcctcctaagagcgttgtttcttgtaacagcctcatataagacagcgactctattattcgacaagatgcacatgtccatattcagagccgctatgtctttctttgattccactc

SEQ ID NO: 743 - DNA, 226 bp, Zea mays
  misc_feature (217)..(218): n is a, c, g, or t
tttgtcttgttagttgttaccacatctgaatctaacaacattaatccattccatggtgcaacaatataatgtaatatcatgtctcttttcctttttcttgtatgtatgttcccaggccttcacaaatgggaaggtgataagcgtccggcacagggtaattgcaagctcgagcagggcgaggctgtcaacgatctacttcgctgcgccgccactgcanncacgaatt

SEQ ID NO: 744 - DNA, 370 bp, Zea mays
tccctcctcccacttgcgccgcctgtccccgcgccctcgaaacctttttctcccaaaacagatttcgtcccggcgctctcctgcaaagggcggctagctgtcgccggtggatacgtttcacctctgtctcactgcttgggggggttctgcttcttcctgctttcccaagagagggccagcagcagacgaagcgagcaaagcgcgcaggaaccgctcggtctggtgattttaaggggcgaggtcgtgttcttgggaggcggagagacacgagctctctctcttcctgtcctctttcccgcggcttctctcttgtcttagctccaagagggcaaaactcgtcggggtagggaaatggcggaggtgaagccgg

SEQ ID NO: 745 - DNA, 356 bp, Zea mays
tttttctggcctgaacaatacaataaataccctactcctgtaataatgttttaatttatgtgtttgttcttgtgcaacgacgactggccggcaacgcttctttcatcaattctcctgtaccttatcttgtcaccatgtacatatcatatgcggcaaggtccgtaaagaacttgctgtgcgtggagtggacgatcgaaattaatgatggtttcagacgaaaccggacggtagatgcatgcatgcgctgctcgttttagttttagttgccgagtcggtctgtgcatgcgcgtgtatgtaggtgtcgcttctcagctgcagccggcggcggcgaacccgatcttgctgttcttgacgtc

SEQ ID NO: 746 - DNA, 709 bp, Zea mays
  misc_feature (670)..(670): n is a, c, g, or t
  misc_feature (679)..(679): n is a, c, g, or t
  misc_feature (681)..(681): n is a, c, g, or t
  misc_feature (683)..(683): n is a, c, g, or t
  misc_feature (685)..(687): n is a, c, g, or t
  misc_feature (689)..(689): n is a, c, g, or t
  misc_feature (696)..(697): n is a, c, g, or t
  misc_feature (699)..(704): n is a, c, g, or t
  misc_feature (706)..(706): n is a, c, g, or t
ttccctcgtcctcgtcaccaagcctttctcatccttgcgcacccggacacccaagccccacatgctctccatatattttgatatggtcggctggtctgcccagtatggtattgccaccattggcacaccattaacaattgcttccaatgtcgagttccatccgcaatgtgtgaagaaacaacctgcatattaagagtatgcaactaaattttacatttcttatcgggttgtcctattttctacggttatatgtagaataataaccatttcccatacctgtagctttatgtgctagaacttcaagctgggggcaccaagaaacaataaggccacgttccttgcacttgtcacgaagttcatcggacaacttgtgttcttcgtttgacctcacaacccaaatgaatggtttgccagaattgtacaatccattgccaagctcttctaactgtgcttcatcataattagagacagtaccgtaggatacaagaataacagaacacggaagctgtttgtcaagccaagccagacatgactcgctgctgttgaagaggttgaaaccataggtcttgttcaacggaaaacggtcatcatcaagataaaatgatggcaaggttgggcctattgtctttgcacgccatgttagtgccatataatctgcctcctgctcagntaacgatgnanangnnncnagaaaannannnnnntnatg

SEQ ID NO: 747 - DNA, 532 bp, Zea mays
ttagccttttcaaagcttaacagtcaacttgttaacaaattatttggaagaacgtagacaggtagtatatgagcaaatattttgttatatggtactgaaattgttggactattgctgtctatcataaagtaaataacttattgtaaacattaccaattagtcataatacatgttcaacaaaaactatcacactcgaaaggtgacatgtatacaattaactccatgcaagatctgacttcagttagtatgtcaacaatgcagaattgatgaatcctgtttaccaaaaaaatgcatgcgcactaaataaaggagaactttcaactcacaactctaatatagccagagcagtattgtaatgatgataattgaaaaacaaaaggcagacccagtgccacaggctcccacatgagcggggtacggggaagagataaactgaggcaggtcttccctctgcaaatgtggagaggctgcttcaaacccgagacctagtgacactgtaagatagctctcaccactacacaggcctgacttt

SEQ ID NO: 748 - DNA, 402 bp, Zea mays
agtagtgagaacaggcaaatgctattcagcaccctctcatcttcattcgtttgttggactttctgtttctgaagatcctaattaccttcaacttgctacaggagtgacgcctgcggagaggctgctgaacctgtacgagaccaagtggcaacgcaacgtcgaccatgttttcgagcatttgttatactgattactgaggatgacgccgccgaacgacgttggactgagcttgtagatgtaccccgtaccctaatacagagtctcgtcttgattcattcaatgcctgagccggaagggctcagtttcaggcacacaggagcagagctttcggttggttgttgacggggggcaaccgctgcacagcccggtgctgtgcctacaaataacttcgcctggaactgg

SEQ ID NO: 749 - DNA, 344 bp, Zea mays
cagggaaagtttctgtgaagcctgagaaatcggcaggaagttcagtgggtaagccaagtgaaatcagtaaggggcagagcaagagctcagccaagaagaatttgagatcagcatctcctaccacagggaatgttcataaaaccagaatccaagatgtgatcagtaacaagtcatcagagggagttgaaggtatttctgtagaagtaactctgccaaagcagagaaaaggtaaatcaatgaaaacatctagcccccgggctgttcctgtaggtggctcacggttggtgaggccaatgtttcggaataaaacctcgacgaaaaagaaggtgaaacctgaacctgct

SEQ ID NO: 750 - DNA, 347 bp, Zea mays
  misc_feature (266)..(266): n is a, c, g, or t
  misc_feature (268)..(270): n is a, c, g, or t
  misc_feature (294)..(297): n is a, c, g, or t
  misc_feature (306)..(308): n is a, c, g, or t
  misc_feature (322)..(323): n is a, c, g, or t
  misc_feature (332)..(332): n is a, c, g, or t
  misc_feature (334)..(337): n is a, c, g, or t
atggagtacgtgaaccccctcaccggcttccgcgtcgacggccgccgccccaacgaggtgatgcatcctcgcccgctttcccctacgcgcggttcacgcgaacagccctatctcacccggtgctggacatcacgcagatgcggcaactcaagggcgaggtcggcgtcgttgcgcgcgcagacgggtgagttaagatctctcccgactctgaaataaccttatgtatttcatttttgcttacttaacattgccatgtaaaccaactntnnntgagggttgcactgaacgtggtgnnnnttttggcannncgtcacgtacacgnntcactaaanannnnttcggcgacc

SEQ ID NO: 751 - DNA, 305 bp, Zea mays
gctcagttcagcctcgatcttgccacgatattccttgataaggttcacatgctcttcgttcttacgggactcctccttttgttcaatggaagaaacaatgcgccatgaagcgcggcgagccccaatcacattcttgtatgcaacagacagaaggttacgctcctcaacagtgagctcttccacatctacagtcttagccaccttctccatatactcaaccatctcctcatacctttcagcctgctcagccaacttggccatgtaaacattctcctccctcgacatattgttaaaagaacaaactt

SEQ ID NO: 752 - DNA, 537 bp, Zea mays
tcttcgcgacatcatttggatgcataacggttttggttctgcgtcgtattatactcggtgctgagcttggaggccctaggctatgggcttgggttacatcagtctacttcatgatcctttgggttgtttttgttgtgttttcctctttaagagtatctggagtaatatagacaggaattaaaacaaaggtagtgggggcttcgattttccataaattttgttgctattggttttcatatccacaaagaaaacacctattgcgggtgaaaattagggcccgtgaattagggattatagatagatacaagtgcttgttctatataatgattactgatgaagccaacaatatattgtgtagtataattgaagttattatatcagaaagaagggagaacagttggatagctcttaaattttgattcaattgtgttgcattatcaatcatacatgtaaatatcgaggcttatattttgctagcattgtactactactattaatgtctttattgattaacagcagtacattggacataggctg

SEQ ID NO: 753 - DNA, 553 bp, Zea mays
ggccgccgctgaccccgccgagccttccccgaccgctgaacccagctcatccactccctgctctcccccctccagggcccctaaccctgtcaccatctccgaccccgagcacccgccacagtccacctccaccgcctcaggccccgccgcgccgcccaatcctaacggcaagcccaagcccaagcccaagcccaaggtgaagcgcgtgcagagcgccggcctcctcgccggctccgtgctgaagcgcgactccgagcggctcaaggacgtctacaccctgggcaagaagctcgggcaggggcagttcggcaccacctaccagtgcgtcgagaaggcaaccgggaagcacttcgcctgcaagtcaatcgccaagcggaagctcgtcaccgatgaggacgtcgaggacgtgcgccgcgagatccagatcatgcaccacctggccggccaccccaacgtcgtatccatcgtgggagcctacgaggacgctgtagccgtgcacctcgtcatggagctgtgcgctggaggggagctgttcgataggatcatacagcgg

SEQ ID NO: 754 - DNA, 389 bp, Zea mays
tatgaggtgtttctttcttgtttctgagcttggtgcaggtgaagtggagaccaagcatgcttgtgaacacctcgcccccgaggagcatcaggagggtcatgaggaggagctgcgcgttagagaaggattccatctcgacggcgatcatgctggagactgtcgtcgccgacacggacgtgaagagtaggtccagagccgagggcctaggcacggagctggacttcatgggcaggactctcagcatcaagaaacccaaaacggagatcaaaaggaagtacaggagttggatccagaacgggtgcacatggaacagcacgaggtgatagaacttacgaggagtactactaccggggacgtgcaaagggggcattatttaacttgttggcgct

SEQ ID NO: 755 - DNA, 391 bp, Zea mays
ctagcatctggatccttgggccctgctggaccttctggcaatgttgcaaattacatgggacaaatggcgatggctatgggaaaacttggcactcttgagaactttctacgacaggtttgtcatgcaaaatcatggacttgctcatttcataacactgtgccatctttattttccttaatttgctggctactctttgaggccttttatatagaccagctacatgatattcttaaatccatatctttaacaataaaattgatgagaagcttatacaagcttaatctgaaatgccaaatgaattattggaaagggttacaattatcaaaaggctgtcgatagatgatgacatataaaatcagtggcacagattttgatttgaagtggtcccttt

SEQ ID NO: 756 - DNA, 313 bp, Zea mays
tttcacacgtaacgcttaattcgatcaatatcaatatatatcttaacgagagatacacacatccgttcgtagcgcatacataccgacaaggacacaccatgtggatcgtcgtcatacatacgtcgacatggaaattgaacaccctcttcgtcatgatcttgtgatgtctctctctctctctatgactagcaggcatatatatgcatgtttcctcaagaaataattcaagcatgcatataaaatttgttgatatattaatcttggtggtcgatcatcgagtcagtgcctcggtgggcactggtagcacctggta

SEQ ID NO: 757 - DNA, 401 bp, Zea mays
  misc_feature (391)..(397): n is a, c, g, or t
cgtgttatcaggggtgaagttacagagacagacagacagatggattgaagctctcatttcatctcgagtcttctgaagtcgagcatggcggtcctgagcccgaggaagttgctgcacttgcagtccgcgctcttggggagccccaggctgcagctgaagcagagcccggcctcctcccgcttcaccggcctcagcagcatggcctcctcctcctcctggcacggcgggctgatgcagaggtccaggttcaggtcggggcacttgagcgccttcccctggccccagtcctcgaacgatatggttatgttggacgtgtgctcgttgatggggcggtgtgtcaccgggtcgatccccctgctcagcagcttccgccggatgtgcgtgttccagnnnnnnncttg

SEQ ID NO: 758 - DNA, 424 bp, Zea mays
aagcctggaggagatcatgtccatcatactggaggcccggaagcccggcgacgggctgaagcatgcgggacagctccccggccttgggagcatggagctggatgacattgatgttgacgacatagacgttgaggacagtggcgactttgtatgtgccttgtgacgcggttcaggctgtccggcaccgttgctgcggtggactctcccccactctcctggtctttgtgtcttgctgttattccatgttgtttgtttcagcgagctccgagctcccattttgttgttgtaatatcacatgttttgtgtaaccaaggtagtgacgctgtggataaataatagacgttatgtgttgtattcttgctgaattgttgttcagctccttctgtttgccctgtatgaactgggcagtttcatgagtaccaca

SEQ ID NO: 759 - DNA, 424 bp, Zea mays
  misc_feature (166)..(167): n is a, c, g, or t
  misc_feature (206)..(206): n is a, c, g, or t
  misc_feature (270)..(270): n is a, c, g, or t
aagcctggaggagatcatgtccatcatactggaggcccggaagcccggcgacgggctgaagcatgcgggacagctccccggccttgggagcatggagctggatgacattgatgttgacgacatagacgttgaggacagtggcgactttgtatgtgccttgtgacgnngttcaggctgtccggcaccgttgctgcggtggactctcncccactctcctggtctttgtgtcttgctgttattccatgttgtttgtttcagcgagctccgagntcccattttgttgttgtaatatcacatgttttgtgtaaccaaggtagtgacgctgtggataaataatagacgttatgtgttgtattcttgctgaattgttgttcagctccttctgtttgccctgtatgaactgggcagtttcatgagtaccaca

SEQ ID NO: 760 - DNA, 437 bp, Zea mays
agttagtgatgataattccaacatgtcctttctaaaaagaatcgctacaagtgacgtgccgctgttgaaagagtatggtgtgaatggagttgttgtcgccctgcttctggctgtagttactcctgtcctgctttccatgatgtttggcaagaagacaaagcaaagggcggtgcgagctgatgtgggtggagaggagggatttgcaatgcggaacaacaggttttcctccttagttgaagtcccatgggagggcgccacgacaatgtcagctctgttcgagatggccagcaaaaagtactctcgacggaggtgtcttggcacgaggaagctaattaagagggaatttatggaatcttctgatggtaggaagtttgagaaactgcaccttggtgaatatgaatgggatacctacactgaggcatttaatcgtgcatgta

SEQ ID NO: 761 - DNA, 256 bp, Zea mays
ctccggcgccaccgcgctgggccacgtgctggtgtgctgggcgctggtgttcaaggccggcatggggagcaaaggcgcggcgctgagcggtgccatctcctactccgtcaacctggccatgctggctgtctacgtcaggctctccagcgcgtgcaagaggacgtggaccggattctccacggaggccttccgagaccttctccggttcaccgagctcgccgtcccgtcggcgatgatggtctggtgagaaactaaa

SEQ ID NO: 762 - DNA, 394 bp, Zea mays
  misc_feature (361)..(361): n is a, c, g, or t
  misc_feature (385)..(386): n is a, c, g, or t
tggaggttatagacagttgaggtcattcatcacagatgcagtcacattccataaaagataaagttaagaaacaaaatcataatagttgttgaagaaaagggaataagacaaaagaagcaatgatttaatttcgttttcatgctaagcaatttccattagatcagtacctcaacaagacagacagcaccaaatgacaatacaggttcaaagattgtataaacttcagaatttcaaataacattggtaaattccaaagatggtaaaactgttggcccaaagactagtaaagtacctttcatgaaaactgagaccatccccggactgattgttgctggagctgtatcaaagatagcaattaatnatgtagcagggatacatcagccanntatcatct

SEQ ID NO: 763 - DNA, 384 bp, Zea mays
agccgtcgtatatgcacctgcaggtgcagaggacgaatagggcacaacagcggttgttggggaagaacttcagagggatgtgctgctggtggactgacaccactgccacgcgcgatgctgccagatgttgccctcgagaccacgtggcaggacgatcagctattcaggtggataggttagcttaccgatgagctctctcgctttcgagtgactggtgaaggaaatggacctcgcacaccgcattttcactatgcaatctgaaaatgtaccgtgtggtttttgtacatatggcatcagtaggcattatatcattcatctcgctgaaccaaccatttacgctatactccgtagtccgtactgcttattgctaccataccaacctcg

SEQ ID NO: 764 - DNA, 360 bp, Zea mays
cagcagcgacacgcaccgccggctcggcacggccttcacgcccagatcgccgcaggcgcgggtgatgatggtctgcatctgggaccggaagaagcggacgcggtcgggcatgggcacgcccagcgcctcggacacggaggccagagcgtcgcggagcgtcacgctgttgatggcgttgttggggaagtagcgcgtgaactggagcgacagcgtggcgtcgcacaccacgagctcccacaccttcttgccccgcgcgtccaggatgggccgcgagcagaagtccagctcccactcccggatcgactcagggtccacgtcagggtccaggtagcacacctccgcctgcgggtccaccttgtt

SEQ ID NO: 765 - DNA, 412 bp, Zea mays
atctcaaatttaccattcatatcatctcaaatgaaagatataaaattcagatacaaatatctagattcaaatttttttttcaccttgttttgtcgtagggagcaaacaatgcacaaaaaatatgtaaaattttatttttgttcgtagtcatgagcttgataatagaaaaagatcaagatcaaatttcatgcatatctattttaaaatattaaatttgtcatactaaacattccaactttaatatcaaatatacaattaattgatcttgttgagagtagagtagacattagtcaatggtttagatagatagtttatcacaaaaaagtgccatccagaccaatttaaggcgcattaaggacatgcttgtctacactctagattttggagccctgggtgacccttttccatcttc

SEQ ID NO: 766 - DNA, 381 bp, Zea mays
ggctgggaaccttaccaatttcctatagtgtgtattatgcttctagagatatatagtgtgtgtgtatatatataactatatacataaggatacaaaatatctcacaatttaatttgaatgatgtagctgatagaatataacacacgcacatatgtcgcctctgtctctagctatatttctgtagtactagctagtacgagcgaggttaattaattcctacatccaaactaacgtggcgctcattaaaaacttgaaacaaagaacacataaagaactgctgaacattgtatgcgtgattcagaagagaggccaacatactcttttcaatctatataaagcacacaaatcatatatatatataagtatgcgtaaataaacccg

SEQ ID NO: 767 - DNA, 537 bp, Zea mays
gcagccattactacactacagaagagtttagcatacacaaggggggagaaatagtacaccatagacatagactagcacactatatacaaattcaatatcccatttcgatgtgcactgcaggaaactgtagcatgcaatctgtgagtttattataaatgatgtagtagtagggccggatttgttgggcactgctctgcctttggaactactgctgtcctgacagacactgcatcattctgcatttcacctaccccagttcccagactaaatggctgtaaagacagattcataaaaatgtctgctttatggaacatgaacatttctttatagacaggaggagtaaagagatatctcacgttcttcgtgttaaccatataagaaaatggcaagcgacacgagttgaactataaagacgaggcagtgaatcatcggatgggcaccggcatagcacagacctctctagctagctacctgcctaccttctagctgcatttcatctgctcgctccggtcctgtggttgatctgaactgtcacag

SEQ ID NO: 768 - DNA, 405 bp, Zea mays
atctcttatttttctctgcctagtagataattgtagctatcttgtactaatttctgtgttttatacaggccattctcttgtttcaaaagatcgaaggtgtggatgtttgcctctttgccatgtatgtacaagagtatggctcagattgcccaccaccaaatcaaagacatgtttatcttgcatatattgattctgtcaaatacttccggcctgagatcaaatctgcaactggagaagctctccgcacctttgtgtatcatgaaattttggtatgagaattccaaatcatcaaacatattctttgcttgtgcaaatgagtttatgattctagaatcaaattgtttcaatgcttattgtagattggttatctggactactgcaagaaacgagggtttgtaagctgta

SEQ ID NO: 769 - DNA, 459 bp, Zea mays
atgctcatggccaggccgtactggaacatcgagttcgtgcctccccgtcccgagagcgcgtgtcgggtgatggcggatggacagccttgtgtcgacacccatgctcaggttctcgcgtactattccctcgctggaaggaggccggactgtccgcggtggctggttactttgcatcccgcgtgactgtagagtgtagatacggcaaggtgtccgagtgtggttactgtgttactaccagctgcttgtgtaccgtaatgaactgtagtgccgacgtactgtagcggaggtgtagtgtagtgcaataataagttgcggtgttgcttgtactggtatctagtcctaggaggatgtatactaagttatgctgtgctttcttctccccggaattgtattctgttgcttccactgtaaatatcagaaatggctttttgctagtttgggttgaaataatggacctca

SEQ ID NO: 770 - DNA, 395 bp, Zea mays
cggtcaatcctacgtatccagcatgcccccttcgctttgttcaggtgaagggcacgttgtataacatctaatgcaacactaattcaagtaaacaatcagaccaatatcattcgatatctggcaaaaccaaagaattactctgatatagatgctcttgaacaaaagacaacaaagagaatcaagtatggcagactgttaaaatagtttcctgtgtcaatatttccagactgcagcctgttttgacgctatctgctccaacggttcacaaaagtgacaaacaaaattgtgtactatttgaaaacatggatgggaagggaaaaaattgggggccatcattcagtgtgtgaattagcgagtagcaagttccttgcaaccaggcattggagcaggatgca

SEQ ID NO: 771 - DNA, 381 bp, Zea mays
agcagctatgagcttcctggatgatgatattgtattgtattgcaaatctcggaccaatgtcatattccattcattcctggaactggaccaatgtcatattgtatttgcttacgccttaccataccatctgcagtgctagttttgtcttgtccatacatacaaacaaccagatacagtcaactacacccggtggtctacacaacacagtaggacaaggatcctaaaaccaccatctcccttgtgcatgctggtggcatgatcaggcgatatattatacagcaaggaggcgatggttatcattggcagcagcgccgcagccagactgttgccctctaccgtttgtagttacaaaatggtgcatcccttctgcaccttcttctt

SEQ ID NO: 772 - DNA, 300 bp, Zea mays
gatccatcctgaccggtttgggttgaacgagctacaacatctgagactgtcgaccaaaagtacagttgtaatacaagtgaaactgaccatgacaaacaggaagatgctggtcgatcaaacgagccagaatcgtgtgatagatagactcactgaaggatggaacaaaacatcaggtcatcagctcttggttacatacactacactactacatagtccggtacttttacagcgacgaatgcagagcatggcccagaacagtgaggaggttgatcggatcagagggtctgcaggatcttgagc

SEQ ID NO: 773 - DNA, 456 bp, Zea mays
atgtaacgacgacagtcctcagaggatgacgagcaaggtgggcgccggaagaagagcatcaaggagaagataaaggagaagctcccgggcacccacaagcacgaggagcagaaggctgggcacgtgacgacgacgacgacggggacgcatgcagcggggacgcacgagaagaagggtttcatggagaagatcaaggagaagctaccgggacaccaccatgctcactgagcgtgtgtacctcagttgaggactcggatttgaggggtccagaatcgtgtgtcgtgcacaggtctctgcagtctctatatatgttgtgtacgacttcggtagcctcgacctcgatcgcttgtacctagtcatgctcatgcgtgcatattgctgtgctccttatatatgtagcattagaagctgcgcgcaagtaggatttgggttctagtctatatatacactgttatc

SEQ ID NO: 774 - DNA, 340 bp, Zea mays
tctcgttgagcctggacgtgcgggcgtactccgggtcgatgtacccgatggtgcccagcacgtaggtggaggcgtgggacttggcggccggcacgcacttggcgatgccgaagtcggacaggtgcgcctcgaagctgccgtccagcaggatgttggaggacttgacgtcccggtggacgatgcgcgggttgcagtcgtggtggaggtacgccagcccctgcgcggcgcctactgcgatcctcagcctcgtgtcccagtccagcttcaccttcttcgacgggcctgggaatggccgtggcccgtgggttatcggaaggacgaagcgacatgaattaagaaa

SEQ ID NO: 775 - DNA, 531 bp, Zea mays
aagttttatatccagcacttgcgcgatacaatcaagtccagagatatattattagtatttaaaagcgctagtagtatgcgtgtactgtattctactgtctgtcagcaaggaacatgtaatgtaagcctgtcgctgttcagtatttttttttcttttccctccccggcccgtttcttgactgtgatgtagttttgtttgctgtcgcggacggaatttcagtgcgaggagggggagaatataccttcctttggacgagcttgcgcaggcaggtctcacggaagaggacatattcagagggaaagtgaccggcaagtggaggaggttcatgaagggccagatccagcgtgccaggctcttctttgatgaggcggagaagggcgtcacccatctcgactctgctagcagatggccggtatgtgagagcctagctacaaaatacaacttttctccttttgtttttgtgcctacacgcaatttaataaattttattacaggttccgaattgcttacgtaccctttgtttggacaatt

SEQ ID NO: 776 - DNA, 422 bp, Zea mays
agactcgaacaaaacggggcagagtcaccctgctgaagaattggatctttcctgagtactattttgctaacatgacgagttaattatcgcagaggaggtacggctgccgcgctatgatgctggaaacggtggcggcggtaccggggatggtgggcggcatgctgcttcacctgcgctcgctccgccgcttcgagcacagcggcggctggatccgggcgctgctggaggaggcggagaatgaacgcatgcacctcatgaccttcatggaggtggccaagcccaagtggtacgagcgcgcgcttgtcctcgccgtgcagggcgtcttcttcaacgcctacttcctcggctacctcatctcccccaagttcgcgcaccgtgtcgttgggtacctcgaggaggaggccatccactcatataccgaa

SEQ ID NO: 777 - DNA, 349 bp, Zea mays
agtaggctgtggagcttgatgatgagctcgtcctcctcctccgtgaagttgccgcgcttgaggtcgggccgcaggtagttgatccaccggaggcggcagctcttgccgcagcgcacaagtccggcggccttgggaagggagcgccagcacccctcgccgtgcgccttgatgtacgccaccagacggtcgtcctcctccttggtccacgcgcccttgttcgtgtgcgccttctcgcagcacggcgatctccccatcgttgctgcgattgcgagcccaagggtgggtgaagccaagcggggctggattttatagggcacttgactggatcgcgggagctcttctagagttg

SEQ ID NO: 778 - DNA, 363 bp, Zea mays
ggttggcgttacagaagatatctaatgtactccgtctgtaccctcagccaccacggaccacaggccagaaaaaggcttcgccttggtccttggatccccccacacaacgcagcacccgcactctccaggcgtctgccaatccgaaacgaaacccacccgtcgcctagaggcaaaccaggactgagattgagcggagagcagcacagtcatggcggggcaggaggtggcgaacaagcgggtggtactgaagcgctacgtgacggggttccccggcgcggacgacatggaggtggtcaccggcaccgcgcgcgtggccgtgccgccggggtcgacggccatggtgctcaagaacctctacgtgtc

SEQ ID NO: 779 - DNA, 433 bp, Zea mays
ggcgctacgcggaggcgctagatgacgccaagcggaccgtggcgctgaagccggactgggccaagggctactcccgcctcggcgccgcgcaccttggcctcggtgacgcgcccaaggccgtcgaggcctacgagaaagggcttgcgctcgagccgtccaatgaggcgctcaaatccggcctcgcacaggcgcgccagtccgcatcggcgccgagacgtccggtgggctccggggctgacgccgttggcaagatgttccagggccctgagctatggagcaaggtcgcggccgatcccaccacgcgtggctacctcgaccagccggacttcgtgcagatgctgcgggaggtgcagcgaaaccccggcagactgaacagctacctttctgaccaacgaatggttcaggtgctcaccctcatgctgaacatcaagtt

SEQ ID NO: 780 - DNA, 312 bp, Zea mays
actcgtcatgttagcaaaatagtactcaggaaagatccaattcttcagcagggtgactctgccccgttttgttggagtcttggagactggatgttccagggaaatggttggggcgagcagggatcacctggaagaatatgtcggtgggcacgcgcagtaatttgacggtccaataggcgatcttgtcgagcagcaccttgggttcgtggtgtctgttgagatcgatcgtggtgtccggcttgtacgcctcccatggctgcaaaattagcacaacagacacgccaattgagacgccgatcagcgaaaaacacg

SEQ ID NO: 781 - DNA, 224 bp, Zea mays
ctcccgactggctgaagcagcacagccccttctacaaggacgactggctgggtaagctcgcgccgcccacgcagccaccacctccctttcctcttctccgcgcctcctcctctcagatctgagcttttccccctccgccggagcgcagtgttctactacacggcggggcaggcggacgtggtgcaggtggacgaggtgggctacaaacagtgcgactccaccaa

SEQ ID NO: 782 - DNA, 536 bp, Zea mays
tccttctcgatgtcgtgcaccgacttcttgggctgctccggcgcctgcttcctgccggcgtgcgcgtccatgtcggccatggtcttgcccaggtccgcgatgaggcgctcggcgagcccgcggctgaagtcctcgcggatgaccacgcgcatgacggccacgtgctccgcgtcggcgggcatggtgtaggccggcacgatccagccgaaccggcgcaggctctcggccacctcgaacaccgtgtacttggaggagtccttgagggagaaggcgaccagcggcacgcccgagtccttggacaccacgtcgaagtagcccatcttgttgatgccctcgcggagcaccgccgcgttgtcgcggcagttctgcatcacgtccttgtagccctgccagcagaccgtggcatcatcgtcatcagttgcaagcccagcgaatgccatccgcagcatgatcatagtgcaagttagttgttacctcgaatccgaggcggatgagctggtaatactgcgcgataatctggctggaacctgtatgta

SEQ ID NO: 783 - DNA, 406 bp, Zea mays
cacgtgcttaggcaggtctggtactggcaatgccgtgcgcccgtgccatcgggattctacagaaaaaaaatgagcaaaagaaaaaaatcatctcccgtgaaaaggagacgagggaaaaaaaatagaaggaaacaaaagcagagagcattatggtcattttatttgtttattgtccaatgcaaagctgttttgccaaataaaatcacgaaaacccctcagcttcatcggaaaagctgttcgtacgtgaagctaaaaacctcggaacaacagctccacttatgaaactgagctggcctaaatgtacccacgaaccaaaatgctgcgcgcctagcgatctggctctcgaccagctacgtgtggggtattatgtacgaaaatgcagcaggcgacggacggagtagtcgtg

SEQ ID NO: 784 - DNA, 391 bp, Zea mays
  misc_feature (367)..(388): n is a, c, g, or t
atttcatagcacgtgacaatgacgttaaagagttatttgtaaaattatgaggtaagacgactgtcgaaattgatgctttaatatggtaaagatagagatgtacaaattaccacaaggacaaaataacatcacacacatgtggtttcataccaagctatactcaatcgagtttagtttgtatttaagaaatatatggagaatcaagttgctagctctaggagatgagatttggcatgttattcttcatatgtatatatattgagtggtctggtcttaattattcagtgcatgatgatgatggtcatcagtagtctgctgccgtggttggcagctgctggtgtgggcgctgcccgatgaagatgatgtnnnnnnnnnnnnnnnnnnnnnngac

SEQ ID NO: 785 - DNA, 556 bp, Zea mays
accagaggcggaactgctgctcccgctgcccctgcccccgcgtgaacacgttggtgtgcagcgtgtagggctcgccggacacgttgcccaggaactcgaagtcgatctcgtcgtgcgcgccgccctgcgacgacaggtagtaggcggtgacggtgccggcggagttgcccggcaccagccgcagctgcatgtcgatcttgccgaacaggtactcgtgccgggactggaacccggagccggacgtgcggtccagcgacagcgtcagcagccgcccgttgtcaaggaccttgccccgcccgtcgccccacgtgatgtccagctcctggtccaagctgcccgccgcgaaggagcaggacaccagcacgcccaggcacagcagcagcaagggcacccgacgagacgacgtcgccatgaccgttgcaaccagccaccaagagagacagacacctaccgacactctacactgatgatcgagcaggtcgctactaggtgctcgacctgatcagctgggacgagcgagctgggttggtggtcgagcttgtgactctgtgagtgg

SEQ ID NO: 786 - DNA, 556 bp, Zea mays
  misc_feature (281)..(281): n is a, c, g, or t
  misc_feature (353)..(353): n is a, c, g, or t
  misc_feature (372)..(373): n is a, c, g, or t
  misc_feature (452)..(452): n is a, c, g, or t
  misc_feature (484)..(487): n is a, c, g, or t
  misc_feature (516)..(516): n is a, c, g, or t
  misc_feature (532)..(532): n is a, c, g, or t
accagaggcggaactgctgctcccgctgcccctgcccccgcgtgaacacgttggtgtgcagcgtgtagggctcgccggacacgttgcccaggaactcgaagtcgatctcgtcgtgcgcgccgccctgcgacgacaggtagtaggcggtgacggtgccggcggagttgcccggcaccagccgcagctgcatgtcgatcttgccgaacaggtactcgtgccgggactggaacccggagccggacgtgcggtccagcgacagcgtcagcagccgcccgttgtcnaggaccttgccccgcccgtcgccccacgtgatgtccagctcctggtccaagctgcccgccgcgaaggagcangacaccagcacgcccaggnncagcagcagcaagggcacccgacgagacgacgtcgccatgaccgttgcaaccagccaccaagagagacagacacctacngacactctacactgatgatcgagcaggtcgcnnnnaggtgctcgacctgatcagctgggacgancgagctgggttggtgntcgagcttgtgactctgtgagtgg

SEQ ID NO: 787 - DNA, 301 bp, Zea mays
cgacgaggagaccgccgtgggccttgttggcttcagcggcaagggcggtggcgcggtcgccatcgcaagcagccgcgtcgaggccatcagcctgccggtgtcgttctccacaactagccccaagcggctgcaacacatccacgggtgaagggtgacgtggccgacgacgtgcgcgcgtgtcactttggacgcgccaagaaatctttcagggagccatggagagagtgagagtgtggtgaaaaaaaaataaggcaaaatagctagtggacggaggcaagacgacggcggcgacgatcggatt

SEQ ID NO: 788 - DNA, 387 bp, Zea mays
  misc_feature (351)..(360): n is a, c, g, or t
  misc_feature (367)..(377): n is a, c, g, or t
ctggtcagcgggccctagcgcaaaataatcaaggtagcatttgaaaactaccgatccgtacagcaaaatactggcaaatactccatagacatcagggactgattaccctgttgttaatcttgctctcaggaacgccaccaaccatacttagcagcgtgagtggctccagagcgacgacagggcccatgccccgtggcagagcgggtcgttgtctccattgccacgcccgctttaaaagggaccacctcgtcgctctccctcctccatgtccacggtcaccgtggcgagggcagccccgccgagcgttagtcacagttgttgcctgcctaccatgcggctctaactcgatcnnnnnnnnnnacgccgnnnnnnnnnnnggagtagcta

SEQ ID NO: 789 - DNA, 364 bp, Zea mays
ccgccggccacgccaaccaacatcgccacctggctggtgacgggcaccatcttcaactacttcgtcttcaggtaccgcaaggggtggtggcagaagtacaactacgtgctctcggccgcgctcgacgccggcaccgccttcatgggggtgctcatcttcttcgccctccagaacgcgcaccacgagctcaagtggtggggcacggaggtggatcattgcccgctcgcctcctgccccaccgcgccgggcatcgccgtcaagggctgcccggtgttctgaatcttccgagacctgagcgtagtaagcagtgtgtgtaacagtgtaaggaaatgtttgctacgggagccatggattcaaccaagca

SEQ ID NO: 790 - DNA, 861 bp, Zea mays
  misc_feature (158)..(158): n is a, c, g, or t
  misc_feature (394)..(396): n is a, c, g, or t
  misc_feature (400)..(410): n is a, c, g, or t
  misc_feature (813)..(819): n is a, c, g, or t
  misc_feature (827)..(835): n is a, c, g, or t
  misc_feature (838)..(841): n is a, c, g, or t
  misc_feature (847)..(848): n is a, c, g, or t
ctgtgcccccaaggccttggcagcagcaaggctatgaaaactcttatgggggtaattgtaatctttttgcatgtttcagaaaatattcttgtgtctcaaaatgttaacgttttgataaaaatgcaggttatggctccaatatgtatagctcttacggnggatatagtggaccctatggaaataacatgtactcaggttatggaggaggttatggcggtatgtatggaggttctggaatgtatggtggatcaatgtatagcggtggaatgggaggaccctatggtggttatggtatgggcatgagtccttataatcagggaccgaattcatttgggccacctaccccaccccctggtttctgggtgtccttcctacgagtggtaatatatgttannntatnnnnnnnnnnnctgtcaggataagtactgcgctctggcctctgcgcaacatgcgacgccggagagcgcagaagatcctctgcaagaagctgctggtaattcacttctgaacaaagatccaaacagaggaagcgtctatccacgcatgctagagacgatgccgatcagtcatcagagcctgaccgaagcgcagcaaactgcggctgcgcgcgtaatttggactggctgtttgttattgatgacgatgaagcccctacccggcaccgcacctgggttttctcgatgcatgcaccaatgttttctgatcaccacgcctggctttcgcatgcaggctataagcaccgcgtgccgcgtcgcgttcaacaacgcatcagcagagagtgtcctaaaaggagccagtctcataggtcgactnnnnnnntggcgtannnnnnnnnatnnnntatagnnactgatgatccag

SEQ ID NO: 791 - DNA, 505 bp, Zea mays
gccaagcaggccgcggctgacatgtccaaggtgctgcaggtggagatctcagccggcgccgccgaggaggatgccgcggctgcgactgcgactgagcctgcgccggcgtcggcgtcggcgtcctttgggctcttctccggggagttcctccgccggcacgggctgcacctcctgggcacgtcctcgacgtggttcctgctggacatcgccttctactcgcagaacctgttccagaaggacatcttcagcgcggtggggtggatccccaaggcggcaacgatgaacgcgctggaggagctgttcagcatcgcgcgggcgcagtccctgatcgcgctgtgcggcacggtgcccggctactggttcacggtggcgctgatcgacgtgttggggcggttcgcgatccaggtgacggggttcctgatgatgacggtgttcatgctgggtctggccgtgccgtacgagcactggacgacgccggggcaccacatcggcttcatcgtcatgt

SEQ ID NO: 792 - DNA, 365 bp, Zea mays
  misc_feature (346)..(350): n is a, c, g, or t
ttgtgtgtgttattactactactcatttggagctgggcaacttgaggtcgtcactactactgatttggagcctgatcttgagaaagatgagccaggtctccgctctctttcatcacagagacggtccaagaagaaaggaacggcacgaggaagaaacggagggcaaggggaacctcgactgccatcatggggagctccggcgctgacccggccgtgtccggtccgctgcattgtttgggtggggcgtgggggcgtcggtcgggtcggggcggggagttgtcgccgtcgccaggcgtgcctccgatccccctgcatgtgccgtgcgtgctcctcggcccggcgctcnnnnnctttccaagattcat

SEQ ID NO: 793 - DNA, 495 bp, Zea mays
agctcagccccaacaacagcacggagcagagcttgctcgatgcgcagctcgagctctggcacaccaccttcgcgttcatgaagtccatggcgctcaagtccgcaatacacctccgaattgccgatgccatccacctccatggcggtgccgccagcctatcccagatactaagcaaggtccatctccacccgtccagagtttccagcctccgtcgcctgatgcgcgtgctaacaaccaccaatgtcttcggcacccagcagccggctggtggcagtgacgacgacagtgagcccgtctacactctcactccagtgtctcgcctcctcatcgcctcacagtcgtcgcagctggcccagactccgttggcggccatggtgctcgatccaaccatcgtctcccccttcttcgagctcgccgcgtggttccagcacgagctcccagacccgtgcatcttcaagcacacgcacggccgaggcatctgggagttgaccaaag

SEQ ID NO: 794 - DNA, 338 bp, Zea mays
gggaagttagcaaaaacagttgcaaaatatttggcatatctttgaccgagaaggttccagcaatgaaagaaaagggctgtggtgacatcaacaccaactatccatcccccttcctgtctttgaagcaacaagtgccgaaatcgctgggcaacagctgtgccaccgtgagtgtcctacaccatgtagcagccttgatgtcattctagagtgaagtaactcttaactataataaaatcctgcaggttcatgagcagaggcctgttgttgctagggtgattgacgtttcaacagtggatatgatgatctgatgtattggaaaactgtcctggaggtgaagt

SEQ ID NO: 795 - DNA, 444 bp, Zea mays
acatcacgggcttgccgggcggcgccgcggcgttcgagctcgtcaccaaattctgctacggcgagaacttcgagctcacggaggacaacgtcgccatgctgcggtgcgccgccgagcacctgcagatgaccgacgacgacagcaggggcgggaacctggccggcaggaccgaggcctacctggaggccgtggcgctgatgagcctcgcgggcgcggtcaccgtgctccggaggtcggaggacctcctcccggtgtccgaggaggtggacctcgtcggcaggtgcgtcgacgccatcgcctacttcacctgcaacgacagtcagttcagcatgtccaacggtaacggcatggacgtgtcgtcgtccaaggtcatcatcgatgattggttggctgacgagctgacgtcgctgcggattgacacgttccagagagtcgtaattgcca

SEQ ID NO: 796 - DNA, 446 bp, Zea mays
actgcgagatgcgcccctcgaggcccctgccaggcagcgagatggcgctgacggtgacggctgtcccgtattggtcgtcgcaggtgatcccttcccacttgcagcagtcggtgcctcgccagagcccggtgaggccggcgtcgtaagagagctccgcgaggaactggagcagggacgccctctccggctccccgcaggcgctggcgcaggacgcccaggagatggagatgagcagcagcgcaagggcgagggcgcgaggccggtggaaggaggtacgtgcagtgtgttccggttccggctccggctccggctcctcttgcatgaaacgtggagtggctgcatggcttcgtgttggaattggaactagcatgggaacgaaccagatgccgcgctgaagctgtgtgtcctgcactgcactactcccgtctagacgaagtatgtgccaa

SEQ ID NO: 797 - DNA, 178 bp, Zea mays
gggttagaaccagcaagaggagtcgtgaatccgtgacaaccggcggcggcgagggaagaatcgaagatcgccgcagccgcaaggaaggaaaccgagaacaactcaatccgctggctatggcgttgctgatggagcccggcgctgagcccctgactgagagcgagcaggccgacctggg

SEQ ID NO: 798 - DNA, 404 bp, Zea mays
  misc_feature (222)..(222): n is a, c, g, or t
  misc_feature (231)..(232): n is a, c, g, or t
  misc_feature (236)..(237): n is a, c, g, or t
  misc_feature (243)..(244): n is a, c, g, or t
  misc_feature (269)..(269): n is a, c, g, or t
  misc_feature (296)..(299): n is a, c, g, or t
  misc_feature (304)..(308): n is a, c, g, or t
  misc_feature (311)..(311): n is a, c, g, or t
  misc_feature (313)..(314): n is a, c, g, or t
  misc_feature (316)..(317): n is a, c, g, or t
  misc_feature (319)..(321): n is a, c, g, or t
  misc_feature (323)..(325): n is a, c, g, or t
  misc_feature (328)..(330): n is a, c, g, or t
  misc_feature (332)..(333): n is a, c, g, or t
  misc_feature (335)..(335): n is a, c, g, or t
  misc_feature (349)..(349): n is a, c, g, or t
  misc_feature (399)..(401): n is a, c, g, or t
cctcagcgacaccttcctcctcgacctcaccaaggagaagcctgcgtggagggagatccctacgtcctggtcgcccccgtcccgcctcggccacaccacgtccgtctacggcgcgaccaagctgttcatgttcggtgggctggcgaagagcggctcgctccggctgcgctccagcgacgcctacacggtggacgtcagcgaggacagcccgcagtggaggangttggcacnnaggnngtagcnngccgctcttggccgatcccatatcngaattgcttgaccgaacataaacagannnnttgtnnnnnggngnntnnannngnnnacnnnanntngggatctctcagcncgcttctcttggggaggtcgaggaggaaggtgtcgcttaggaggacgccnnnctc

SEQ ID NO: 799 - DNA, 442 bp, Zea mays
ttcttccattttccatattttgcataactagctgatgaataagcaaacgatgtatcataacttaggtacgatgtttttgtaccttggcaccatctgtgtgttttgttcattgccttgctaaaggtggcaccagatgttctttgatgggaaaattccttttgtagcactgagctgttttcagtcacaccttattttgtatacaatgaaacagaacgctgtgttcatggcacagtgatttggtgaatgttcacatgcttgtttccgactccgttttaaaacaaaacaaggtttgaactgattagcttgttgtaaatgtcgtttattttgaaaattgaaacaaacggggctggtaccaaaattttgaacttgggacattgcaggatacagttggggtgggctggtctatagtatatatacgtgtctgcctatctatgtccttgca

SEQ ID NO: 800 - DNA, 375 bp, Zea mays
cggctgcccaagcaagatggtggactcgagtccgaaagttctgctgcttcgttagacggtcaaatcatcaagtatcagccttcgatcaacgaagcagccaaagcaatgctaaggaagatcctaaacgtagattcttcgcataggtttgaatctatgggcaattcagataatagtaataataataataataatctgctggaggattatatgccggccggccaagcttttgagagctcttcgtcgacaagaaattctggggtcacccttgcagaggttccagcaaactcaggcttggcgtatgtcggcacgagctcggctatctgttctcctccagcggcccctgaaatgcagtgcccagtggtgctggataacaag

SEQ ID NO: 801 - DNA, 426 bp, Zea mays
tcttgtgccaaaaccctgaggttgagcacgtgccggtgtgttactgccttgcggctatcatctgaaatttttttccctgttgtatccattcttcagaactgtatcgtgagtcgtgacgatgattatgatggtggtcgtcttcttgtctcaggtccatgctatccagaacatactctacacatcagaggaggaccctcagcagcaggctccagccctgagccccatcatggaggcgtccgaggagaggccgaagcaagaggcggcgcacaagagaaagagcatctcggacctggacgagtttggtatgtcgtccagctcaaggcagaggctctccgacatctcggacgtgcagctgtgtggatccccgctgacgagtttcagctgaaggaactgtcatctctacaaaatgggtgtctcgtctttctg

SEQ ID NO: 802 - DNA, 227 bp, Zea mays
tagatggatggggtggaatattcgaaggagcggtttcagtccgttaaatcgcaactcggtgtctttcttcggtcgtgtgggtacaaggactcttcagtcacctgggttcctttgagcgcaatggccaacgaaaatttagtcacagcttcttcagaccctcgacttttatcttggtaagaccgttctaatggtgggcctctttgcgcatcactttcttgccccccccc

SEQ ID NO: 803 - DNA, 203 bp, Zea mays
ctaatcatttctgacgacggttcggtgtcggtatgttaccaactgttcttgttttacataaaaaccaatactatctccgtcgtcaaatcttgaagcagtctcctgcgacacttgaccaagttctctgctacactcgccgtcaaggcatgcaacaacaactcgtcactcctggatgcctggcagggggcaacccacctccattg

SEQ ID NO: 804 - DNA, 537 bp, Zea mays
atttggagatggccaagactgatcagggcggcgatgcgccgagcggagagaatgtcctgaagaagccagacaagatcctgccgtgccctcgctgcaacagcatggacaccaagttctgctactacaacaactacaacatcaagcagccaaggcatttctgcaagagctgtcagaggtactggaccgcaggcggaagcatgagaaacatccccgttggtgctgggaggcgcaagagcaagagctccagcgcgagttgccgcagcgtgttgattcccgttccaggcagcagtagtgtagctaatcctggcggagaggcttccctgtttccgttgtccgtaaaagcaaaccaagcagcagttagcttcgggcctgattcccccctctgcacctccatggcttccgtgctgaagatcggaggaggaggagagcaggttaagagctgcagccctgcctcagcagcagcagcagcagcacagcccaggaacggagaaacccagacccagacgtgcgcaccttcttctgctgctacaacaccat

SEQ ID NO: 805 - DNA, 394 bp, Zea mays
ggcatcctcaagctgcttgagacccatcttgtgccgtcttccactgcccccgagtccaaggtcttctatctcaagatgaagggtgattactacaggtaatatgattgtatggatcccagtaagactttctcatatgctgtgagattacgtttctgtttgactgattcagttgtcatgattagataccttgctgagttcaagactggagctgagagaaaggacgccgctgagaacacgatggtggcatacaaggctgcccaggtcaacaattttttgtttcattcttaatcagtgtgcaattttgttcatgaagcaatatgcttgtagttttttttcacgtcatattttattacaagtttgctgaaaaggggtttgtggtgcattcaggacatta

SEQ ID NO: 806 - DNA, 294 bp, Zea mays
ttgtggacttctgacatgcaggtaaacacttggaattatgctgtcatgtcagtacgtaagtgatgctaatcatgctatgtatcaggaggatggtggcgatgaaatgcgggaccagtacaggatcatttacatgtataggaacattcaatttgtacgataaacacagttagactcatatactctgcctttaaagtagagatgaagtgactcatacaggcaaagattttattatccaaaatctagattctagagatctggattctagaattccgcaggaatcaccctccgcggcga

SEQ ID NO: 807 - DNA, 276 bp, Zea mays
tccgccttcatcgaccaaggcagctgcagcctccagtcccccgacgaggcttctgggtacaacaccaccccgcagcaaccgccgcccatgacgacggaggccgcctacatggacgacgactcggtcaccgactggagagtgctcgacaagttcgtcgcgtctcagctcttcagccacggcgacggcatggcgaaagaggatggttaccccaacccggggcaggcattatttcaggctgagaacaagcagccggaagaagcactggactacgcctca

SEQ ID NO: 808 - DNA, 354 bp, Zea mays
aattccatagcgatgaaagcaacgaaagcactgatggcctgaagttatccaaggaacttattggcttgattagaggaaagaagtctacatatgatattattttatgggttgaggaacaaataattccaaaaaatggtactgaatttgcacttgatgttgttagccagacgcttcttgacatgggttcaaaaagtttcacccatcttgtcactattttggagagatataataagataatctctaagctatgtccaaatgaggaaatgcagctactgttaatgaatggagtcagtgcttattggaagaacagtacccagatgactgctatagctattgacagaatgatgggttatc

SEQ ID NO: 809 - DNA, 202 bp, Zea mays
tccacccgccgtcgccctcattgtagcagtactccttgacaacacacttgatgtgagagatgcagcaagggaccgaggaatgccatggtgggcgcggttcaggacattccgtggcgacagcaggaacgaagagttctacactttgcctttcaacctcaacagattctttccaccgacttaagccaaattgccattgagaaca

SEQ ID NO: 810 - DNA, 542 bp, Zea mays
tgaaacggcagtcgaggccgcaagccaacccaccacgatttttctcactagtcgcaactcgcaagcaaatcgaacgaacccagccgaagcgcgagctgagcaaggcggaggcggcgggaccggcgatggagcggctgcagcggatctttggcgcctccggcatggggcagccgccgacggactcgccgctgctcgactcctccgagcaggtctacatctcctccctcgcgcttctcaagatgctcaagcacggtgcgtggatcctccctctcttccccgtcccttccctgtaaccctaggggtcagggactcagggttcgtctctgctccccccgctttcgttcgcgctcggggcctgacgcgtggtttcggacttcggtcgcagggagggccggcgtgcccatggaggtcatgggtctcatgctcggcgagttcgtcgatgactacaccgtcagggtcgtcgacgtcttcgccatgccgcagagcgggactggggtcagcgtcgaggccgtcgaccacgtcttccagacaaacatgcttga

SEQ ID NO: 811 - DNA, 176 bp, Zea mays
gtcctggctcttgaagtatctactaggattccaagtgttagatgagataatatgagatttaaactaggaggctcctttccttctatccgaggctttcaaatttttttttgtatctttgttctatgtttggtctcaatgccagtatgtagcatcatgtggtaaatggtgagttatcc

SEQ ID NO: 812 - DNA, 386 bp, Zea mays
cagtcctcgccgacgttgaagcgcttgagcaggcggatctggtcctgctgcgtttccggcgtgacggagcgcaggaagttgatgtagtcgtcggcgtggaagcggcagaggtcgcggtcgcgggccgggttggggcggtacacctgcatctggttgaggaggccgtagcgcgccagcagcgagtgcgtcatccggatgcggtgcggcttcatcggatggccctgcccgtagtagtagttgcccacatccgggtcgtagaagtagcacacgcgccgcttctgcccgtcggggccgacggacgggagggagttgccgccggagcccgccgatgacgggtccatcgccgccgcaggggattggggtttgtgtgtgtgtgtgttatctca

SEQ ID NO: 813 - DNA, 527 bp, Zea mays
atattcctcatctccttcttctccagactgatctgagctgcgggccgtcgtccaaggtcaaggagcaggtggcggcggcgccgacgggctccggcgacaggcaggggcaggggagaggcaagatcgagatcaagcgcatcgagaacacgacgaaccggcaggtgaccttctgcaagcgccgcaacggcctgctcaagaaggcgtacgagctctcggtgctctgcgacgccgaggtcgcgctcgtcgtcttctccagccgcggccgcctctacgagtacgccaacaacaggtgatgatgcatataattatctgtacgcgtatcttagttagattagatcctagtcgtacactacgcaccgcgcggtcgggctcgggtcagctgtttgcaccgtccgattggtcccaattggagccagagccagctcgtcgttcccatcttaatttctcgaggcagaagaagcaagaactagctagcgaggacgagggatggggagccgccatctttcttgtggctgacttcattctct

SEQ ID NO: 814 - DNA, 488 bp, Zea mays
  misc_feature (470)..(472): n is a, c, g, or t
tatgtactactatgtttatctttgggcttgaaactgttgtgttgtgatttccaggctttacagcttggacaagatgccaatacgccttttggtttttttaacggtcagagatgccagatgtgcctccggtctgatcctttgctgaaggtgatggagcgactggctaatccgggtgagtccgctctccgctggaacatggaggctgctgctgccccccgaacctgaagagcgatgtcttaacgtttttggtattttgttggccaggggtgcggcgggtgttcatagtagaagctgggagcaaacgtgtggagggtattatatcactgagtgatattttcaagttcttgctgagcttgtgataagagaagaggagcatgacggacatttgtttgtgatcaatagtaagaaaacagcagggtatgtgaagcaagctgccatggatctcgcatttcccctccccctccggcctnnngtcaagtaaggcagga

SEQ ID NO: 815 - DNA, 529 bp, Zea mays
  misc_feature (355)..(355): n is a, c, g, or t
  misc_feature (443)..(444): n is a, c, g, or t
  misc_feature (489)..(491): n is a, c, g, or t
aaatctgattttacttaagcagtgtgaggggaagtgggttggtgtattgttaagctattgaaggaattcaatccctggtattgtattactttctccaacgttaaatgttgtagttcgcctgtaagtgttccacatcgcctgttatcagtccgcaatccttcctgtaaatgttattaatgaaaaaaatacatcttgctatgttaccgatcgactcattccaatcacacattccgtcctgttgcaaacaaattcttgttttcattgtcagtcgtgctgatcgggaattgtttccagcatcttcctgcaaggaagtgttaattctgaatggttgtaccacttccgttgctatgagttnttaacttctttgttatgatctaatcctgagtgaattgtcatcttagatttctgaatggttgttgtaccacttccgttgctatgagttnnttaacttttttgttatgatctaatcctgagtgaattgtcatcttnnntttctgaatggttgttgtaccacttccgttgctatgag

SEQ ID NO: 816 - DNA, 508 bp, Zea mays
gcctcattcatcgcctctgcggttgcctctatattccatgggttaaccctaatagcaccgctcagtgacggtgagcagccaataaactctgacacaaccagcatgctcttctttggcccactcacctctgataccgactgagatcctggtgcaccctgcctacagacaacgtattcatacggtgtcaagttcatcccatccctcacagcagtgaccaccacacattccgctatcgtataataggcgatcttctcaacacttgacacatcacggccgatgaaaacaacagggctataccctgactggccaaagtctccattgatccgctggcagctctcctcaatctcagcctggatggcttccagatctttaccccttccacgggctgggttagcaatctgcactaacactgctctcccctgccacttgggatgtgtcctcaacatgttctcaaaggcgagaagcttcaaattgatccccttaaagatatccatatcatccacaccaa

SEQ ID NO: 817 - DNA, 456 bp, Zea mays
cctgcgttggctgttgtttgattgctcttgtccagccacttcgtggaggaatgggtcagggtcggcgccccggcgaagtccaaggtgctggccgaccacgcctcggcgcctttcgaagaccaatgctccatcctggagaaggtacgcactgcacacgctttgtctttgaccgcactgtacacacgcttgtagttgtattgtatgctgtgtgtgtcggatggatctctgtctgaagaacacgacgtttcgatctctgaatacttacctgctttcgtctttgcaggaggccgtcaacgtgtcccttgagaacctcaagtcctacccgttcgtcaaggaagggctggagaaagggaccctcaagctggtcggcggccattacgacttcgtcaatggaaagttcgagacatgggaaccctaagtggccatatacgtacaaatacgccccaccggacttat

SEQ ID NO: 818 - DNA, 428 bp, Zea mays
agtccagtactgtggttcttagatttctgtcataaaattataataactttctttgggggtctatgaacttattcttacacaaaattacaaaagaatatacttgaacaacaatgaaaatggcatgttattatagtcagacatgtgccagccaaactgtacatagtgatagtatttaacactattaaattattagaaagggataatgtgttcctttttgctaggaaaaaaaaactggactgagagcaacaccggtcgccgtagctactaaaactgtggtaagcaaaaggttcatccgccgcacatatcagcggcagtcgacctcagttggtagtaggacccaagttggaagccgcaaccttctcgacgtcaaccttcccgatgggaaggcgagccatctaaaagtcgcgttgctctttcatgttccttct

SEQ ID NO: 819 - DNA, 532 bp, Zea mays
agcgtccgttggttgtcggtagacgcgcatctgttgaattttgtgactcaccgtcgtcgatccgcagggtatcccctccctagggaccgtggatgcggctgttgcggctgtacgcattagattcttcggagtatgttgcggcttagattctccagagaaagatggagatctgttgtgcattgcggttttcggtggttgatccgtcgatttttttcgtttcatgttatgtctaggttagacctaattgtttaggtaacctcgtatcactggatgcgtatctccccagatggttcacgtttgcgtagaagcttgtgaatcctgggcttggtcatcttttttcttcagtggcgcgacgctgccaagaagccaagttcctggggcgaagagattgaggaacgggaactcgggtcgaggatcactattttttggaggcatggaacaaaggggctatagctccttgtatgctctatttgataaccagaacgccaaccgtaaaattttggaacgataatgtggaacgaggttcctgaaa

SEQ ID NO: 820 - DNA, 392 bp, Zea mays
agccttttcatcaagtatcacaccatcttctagcctggtaacacaaatacaaatgtcctaatccacccaaacgatggaaacaacggatacaaaatatattgtaacttagaacccccaaaaaatgcattcctcaagagacaagatttgtacctcacaagatggaaagttattttctcaattaatggcaccccatgtattgcaccctcagtggcagttgattcgttactttgtgcagtagatgttgcaaataaaccaaatcgatggcattccatgtacaggaaaaagtccttgcaaatatactcattgccagatgcaagaggaattgaataaagctgcttaaagaagctgtcaaacttctttgcctttggcggaagctcatgaggatcacattc

SEQ ID NO: 821 - DNA, 493 bp, Zea mays
ctggtggtaccaccttgaagagaagttcgttgaggaataacagtgcctctaatgttcacaatttcagtaaagctgatgtagtgcctgtcattgttcccagaactagctccggaggggagttggctactgattctagaagcgatgctgctgatgtggcacccgttcttccgaaggtaaccagaagggttgaacctgctaccgattctagaaaagaaagtaatgatgtggaacctgttgttcctagagcaagctcaagaatggaaatagccgatttagcacccatttctagttccaagtcaggcagaaggttggagtctgcccctgattcgaaagaagaaagtgctgatacagcacctgttgttgtttccaatcccagggctaatgtaagaatggaaataatctctgattctgcgcccgctctttcaaagtcaaacagaaagctagattctggcactaattcaaagaaagaaagtgctgatgcagtcattgtacc

SEQ ID NO: 822 - DNA, 398 bp, Zea mays
taactaccccttcagcatcatcaatggccttcgcacgactgttagccaaaagtggaaacttgcccacacgatagggaattcctagagccgtcacctgctcctcagtcttgccaacagatgcaacttctggatgcgtataaaccacaccaggaactgtgtcatagtcaacatggccttcctttccagcaatgaactctacgcaagcgacaccatcctcttcagctttatgggcaagcatgggaccagggatcgcatccccaattgcatagactcccttcacattggtcatgaagcgcttatcaacaaggatcctgccagctttatctgtctcaacgccaagagtttcaagcccaatcccagaagtaaatggggttctgccagcagagacaaggacaaca

SEQ ID NO: 823 - DNA, 549 bp, Zea mays
atagagtttttgaacattactccgaacaatacacataaaaggatcgagtctccgttacacgaaatcctggaggacgaatgcagctatgcacgcaggcccatggatcttttattttatgagctaaaatggcttcgagccgagccaaggttaccatggagactctacttgttctgcagcaaggacaccgctgccttatcagtgaaccaggtgaattctccatcttgtagcacagccatctcaacaggcagcaggtctgacgaggtttgcttgtctgagagcgccttctgcaccgctgccgcctttccagctccagtcaccaccatcgcaacgtatgcggatgagttgattactggaaacgtgaatgtaattctctctggaggtggctttggagaatccttaatgtatgtgacccacctctctttctcgttaacaagagggtggccagggaagagagacgcaatgtggccatcaggtcccattcccagaagctggagatcaaacctgggaaatccagtcgccgctgacatagaaatcacaccgttcttgaca

SEQ ID NO: 824 - DNA, 428 bp, Zea mays
  misc_feature (407)..(407): n is a, c, g, or t
  misc_feature (413)..(416): n is a, c, g, or t
cctgtgtttgcatcccatttgcttccccccctcttgcccatcccctgtgctgtgctgtgaactgcggccgggggcatccttgttggggggtggcgtaggaggctgctgacactactgcacagactgcagagcagggcagccatgaggcttcctctccctctgctggccctggtgtgctgcgccctgatggcgcgccagcattgcgctgcggcggcgggcaagggcaagacccggcacttgaggtgggagatcagcaacatgttctggtctcccgactgcgaggagaaggtggtgatcggcatcaacgggcagttcccgggcccgacgatccgcgcccgggccggcgacaccgtccacgtccagctcaggaacaagaatgcccccggccgcagttcacagcacagcanaagggnnnngggggggggggg

SEQ ID NO: 825 - DNA, 536 bp, Zea mays
gtggaaggcaggagccattccattggtgtaagctggcatcccgttgccatagccgccgtagggggcagcagggtagctcatgggcggggtggagtaggccatgggaatgccgacgttgacggtggctacctcctcagctgggtaaacatatggctccctgatcaccggcgggctccgggtgcagtacacgccgtgtccaaccggcctgtcgtaagggtaaggggaggctgtggcgtatgatgcgtggggaggggagggtgtggcgtatgatgcatgggatggggagactgtggcgtatgaggcgtgggatggggaggtattggcgtatgaggtgcgggacggggaggtgttggcgtatgacgcgtgggagggagactgggtcaatgtggtgggagctgggagagaagacacgcaagcattgttagtgagacgacctgccttggcaggaggcattgggcctccagtgctcgcacggatgcgcttggttgcagggccgccgctgccgccactggtagcgcttgatgctgccttcttct

SEQ ID NO: 826 - DNA, 408 bp, Zea mays
accctcacctgcaagagctggccgcttcggcggtggcggcttctgaaccaccaccgcgggcgcgcgtggtgcggatcctagtgcacgatgctgacgccaccgattcgtcctccagcgaggatgaggcaccgccacttcttcctcggcggaggtcgaggggtggtagcagcagcctgagcgtgaggcgccgtgttatggaaccggctggggcaagctcggccgttcggttccgtggcgtccgtcgtaggccgtgggggcgctgggctgcggagatccgcgacccgcacaaccgccgcagactgtggctcggcaccttcgacaccgctgaggaggctgccaacgcctacgacgctgcgaacatccgcttccgcggtgtcagcgccactaccaacttccctgcgacccgct

SEQ ID NO: 827 - DNA, 759 bp, Zea mays
  misc_feature (389)..(715): n is a, c, g, or t
  misc_feature (719)..(755): n is a, c, g, or t
acatcccttgcaggattgttgttcagtagattttacttgtaccgcggctttggagttccccaaaggactttacttgttcaagaacttcttctctgacaggaaataacatgtgagtgcagtccgtgcttttatctcttctggcgttccctcttaattaatgggaaaatgtgcttagtttgggtcgtgaaattcttacccgcttgagattttatattgaaaatttgaaatacaaacattagattaagggtttccttcaaatattccactcaaattttgcaaaattagatggctagttcatttggatgtcataagctaactatcaaatgttgcaaaatttctgattgtccctagattaattggtagctcgaatacctaaggcggaagatagnnnnnnnnnnnnnnnnnnnnnnnnnnnnnnnnnnnnnnnnnnnnnnnnnnnnnnnnnnnnnnnnnnnnnnnnnnnnnnnnnnnnnnnnnnnnnnnnnnnnnnnnnnnnnnnnnnnnnnnnnnnnnnnnnnnnnnnnnnnnnnnnnnnnnnnnnnnnnnnnnnnnnnnnnnnnnnnnnnnnnnnnnnnnnnnnnnnnnnnnnnnnnnnnnnnnnnnnnnnnnnnnnnnnnnnnnnnnnnnnnnnnnnnnnnnnnnnnnnnnnnnnnnnnnnnnnnnnnnnnnnnnnnnnnnnnnnnnnnnnnnnnnnnnnnnnnnnnnnnnnnnnnnntttnnnnnnnnnnnnnnnnnnnnnnnnnnnnnnnnnnnnntttt

SEQ ID NO: 828 - DNA, 360 bp, Zea mays
gccgacaccttgtacctgcttagaatcaaatttcctctagtgagtcaattccagaataataatatattcaatgcggtcttttgcaaactaagtcacaggtctgtttgaacagagtgttgcgtccatcacctctccagaataaactttccttccttgtatctctggctcttctcatgagcagcctcctagagaagagcatcataaaaacatagatgcaaggcaatatacgaagaacactacgaaataaccgttgcaaatcttacatatttccatccaacgatggatccacagccaacacagaagatatcagaaacagtatgcattcctgtcatcatcatgcgatcttcttttactccagaa

SEQ ID NO: 829 - DNA, 506 bp, Zea mays
  misc_feature (495)..(501): n is a, c, g, or t
actatatatatgttatgagtctatcagacatacatatgttaaatttgtcgctgatttaatcaaacaaatcctgttaactaaacgtgaaagtgtgagcttgtacacagtagctatacatattttgaggtctttgttttaccgatgtttaattttgctgatttttcaaatttctattttacttgtgttttgatgatgatcaccccaagatggctccatcctcattacaaacaataatattgcttcgtgagatcatcccattatagaaaatagagaaaatcgttccaaaactagatgcaacctaaatatttatggtgtcacgacggtgtcttgctaataataataataataataagcctatttcaacattggtatctaacaaaacagtagtatttgcttataaatggggaaggacgtaggcgtcacgccacagaatatataaatgcgtacgcgtcaaccacccactagcatgccgcctctttccgcaggataccagannnnnnntccga

SEQ ID NO: 830 - DNA, 511 bp, Zea mays
ttcataattggcaggtagagaaagacaagtaggtctgcaattgacgcatcatgcatgttttcaatgaactatcaactatcatgccagtaaatgctcacaacaattatgaagttgcttatgtcatagcagaaaagctatatgtgaacatttatccaatctttctttaattgacaaccaataggtaaataccaatgcaaaacaacatactacaattttagggcacttaatacattaacttccctaaaaattaatacacaaaggcacaactacaggtatcttgaggtaaatgcacattcgtgtcttacaagaaagtaaatagtggagaaaacagcaatagtcctgtactttccccagtacgaatctgctaaggttgctccaataagtggtgtaagataacaagttccttgccaggttgtgaagttcctggcagcagaaacgtttccttcatgtagtcttgttgaaaggtaagtgaccaaactttttgagattccatagtaggccaaacgttcac

SEQ ID NO: 831 - DNA, 426 bp, Zea mays
atttaggctggtggttctcctcatgcttgtcctggaaaaatagatcacagataattctgaattaaatttatatcttgatgcgtacaagcaaaatgttaggcaattcttaccatatagttgggatgtaaagcatgtgccatgtcagcagacaccaggaagctcctctgaatagctttttctagcaactgaaaattaaaaaatggtttgacattttctattacaacttggaatctaactgatacgaaaaactgcaaataatatggtaagatgaaaaaaatatataacaattctaaaagggtgagcacacgctactaagtaccttggaacctgaagagttaaaagacccagtaattcttgataaagcatccaacatggcaggggaaccagctccctgagcagaatcagacccaacttcttcatggtcaa

SEQ ID NO: 832 - DNA, 415 bp, Zea mays
  misc_feature (398)..(406): n is a, c, g, or t
gacctgcgtgctgtccaccaggtggaggcacctctggcgctctgtgccatgccttgacattgaccaggacgagttcaaggccgccggctcgaaccgcatcacagagaaggaacgggacgacttcgaggacttcaccgaccacctgcttatacctaataatatttccattgcgctcctggatacacttcgtctgcatgttagcgatgatgaatattatcatcgtggagcatcagttagatggatccgtcatggcataaagtacagtgcccagaatcctggcattatgcacaaggaatcgaacttagccttttggcgcctcaaaaaactacacctctccggtgtatatctggatggcagtttcatgaagcatgtcagttcagggtgcccgtatttggagnnnnnnnnnctcaaagat

SEQ ID NO: 833 - DNA, 347 bp, Zea mays
tgtcctgattcatatattcagttcccagctttctttctgagtatatatatacagtgtgtgagctctaaacaacattttttacatatcacattctactgattacagaaggatgataagcccttctttctgatcactatgacagttgacaataatacatctgtgttctggagagaaatcaatcaaatgtacaatctggtctcttaccagaatagatcatctatacccgcagacgtcgatggtgggggcacttcctcctcctcctccatctctggttcaggttccatgccaaactccggggactcaatatcagcaaggttcttcaagtcaacgacggatagctcgtctag

SEQ ID NO: 834 - DNA, 432 bp, Zea mays
agtaggctgtggagcttgatgatgagctcgtcctcctcctccgtgaagttgccgcgcttgaggtcgggccgcaggtagttgatccaccggaggcggcagctcttgccgcagcgcacaagtccggcggccttgggaagggagcgccagcacccctcgccgtgcgccttgatgtacgccaccagacggtcgtcctcctccttggtccacgcgcccttgttcgtgtgcgccttctcgcagcacggcgacctccccatcgttgctgcgactgcgagcccaagggtgggtgaagccaagcggggctggattttatagggcacttgactggatcgcgggagctcttctagagttggtggaaaagggttaggcctgctcccagctcatcacttccactgctttaaattaatacccaaacctgtgcctgatttggttaca

SEQ ID NO: 835 - DNA, 530 bp, Zea mays
tcttgccgagaagaacacgcgggacctgctggctcaaagagagcaagcagagaaacatgtaagacatttacacacaaagaacattctctctgtacctgcatttattcatagcattggtgtttatgtatttcagaggctgtctgaattcctggatcctgagatcaagagatggtcaaatggaaaggaaggaaatctgagggccctgctatccacattgcaatatgtaagcagctaaatttcatgcatccttaaacccgtaacatagaacatggaaaaggttatcacgtgtcgctctgtttcccctggcagattcttggtgccgatagtggctggcaaccggtgccactaacagatctcattacagcggttgctgtgaagaaagcttacaggaaggcaaccctatgtgtccatccagataaactacagcagaggggcgctacgatcagacagaaatacatatgtgagaaggtttttgatcttcttaaggtatgtgctctgtccacattgaatgctctggttatttggaagtt

SEQ ID NO: 836 - DNA, 276 bp, Zea mays
  misc_feature (256)..(260): n is a, c, g, or t
  misc_feature (265)..(271): n is a, c, g, or t
gggatgcacaacagcaaaggggggctactacgctcgtttcagagcacagagatttgtaaaaacgcgagctccgcaaaactccaacctactgccggggggcttagcgggcaccatgacaaaaacgtagcaaagcttctcaaagacggcgagtctagacggccgcgaagtactctttgcttcccttggggtcgggcttcatggacctctcccctggcttccaaccggccgggcagacctcgtctgggttctcctggannnnntgcannnnnnnatgaa

SEQ ID NO: 837 - DNA, 305 bp, Zea mays
acacacccgaggtggtgatggggttgcatacttggactagccattcccattcatctgtctgtactctgttcgactgttcctttgtgtggctcacacctgttgtgtttctgatggtggtcatttctccagccaggggcaaagaacacactgcgtttcgctgatcctttaattcagacccatagtccttttttttcttcagcacattctgatgtggctctttgtattgcagactgtatcatggtatcagattggtttcgacttgaaacccctctctcttcattacgcgtgtttctgatcttcttgtt

SEQ ID NO: 838 - DNA, 335 bp, Zea mays
  misc_feature (152)..(154): n is a, c, g, or t
ttttgactttttaagatgtataacttatgatacgcatctgtcatctagatatattttattaatatatgtcttataatttcgacacgaaggaagtatctaagctagctccataagtcaagttaacgatgctgcaagtcgcgcggagcatgtannngtgtagacttatctcagtagctagctggctataaattcgctccaggttcctcatccttttctccattcaacccgcttccgagaaagcaattaatagcactcgatcgatcgggctcaccacgtccagctctcggtcctcgtctttgctgctagcagctagctagcttcgcgatcgtgctcaa

SEQ ID NO: 839 - DNA, 497 bp, Zea mays
attttgttgcaatctgagactaacgaaggcaaaaatggagccatacacttgtatgtcattggcccaatattctttttacagaattccttgctattagtatttgctgttgaattcgtgcttaaacttgtttatgtatatgaatttctctgcaggctggcacttgatttgtcgtctctctcaggcggtgcgcctggacgaacaaggggccttaagataggctcagttaactccttttgacaagggcttatattggcgttttagatgacccaaagcattcttcaaaatgatacagcagaagcactgacttgaattttggatcaattcccatgagctgatatcttcaaaaacatcttagttaggaaaaagaaggaaacgaaaatggaatttatttccatttgttatttgtttgggtgccacaaggaggcaaaatcatagcaaggaattgtaccttattttttttagggattgtgtacttttctgctgttgagaggtatttg

SEQ ID NO: 840 - DNA, 402 bp, Zea mays
aggagcgacagcgctggcggcctgaggaagacgccgtcctgcgcgcctacgtccggcagtacggcccccgcgagtggcacctggtgtcgcagcgcatgaacgtggccctcgaccgcgacgccaagtcgtgcctggagcgctggaagaactacctccgccccgggatcaagaagggctcgctcaccgaggaggagcagcgcctggtgatccgcctgcaggccaagcacggcaacaagtggaagaagatcgccgccgaggtgcccgggcgcacggccaagcgcctcggcaagtggtgggaggtgttcaaggagaagcagcagcgggagctgagggacagccgccgcccgccgccggagcctagccccgacgagcggggcaggtacgagtggctgctcgagaact

SEQ ID NO: 841 - DNA, 399 bp, Zea mays
ctctccgcctccaggcgctacccggcggggacgtcaagctcctatgcgacacagtcgtggagcatgttcgcgagctcactggttacgaccgtgtcatggtgtacaagttccatgaagacgagcacggggaagttgtcgcagagagccggcgcgataaccttgagccttacctcggattgcattatcccgccacagatatcccccaggcgtcgcggttcctgttccagcagaaccgcgtgcgaatgatcgcagactgccatgccatcccggtgagagtcatacaagatcctgggctgtcgcagcatctgtgtttggtaggctccacgctacgcgctccgcacgggtgccatgcacagtacatggcgaacatggggtcaattgcgtcgcttgttatggcag

SEQ ID NO: 842 - DNA, 391 bp, Zea mays
tatgcaccaagttaaaaccaggaatttgcatcagttatagaaccagcccaccaggtaatgcacgttaaaaccagcaatttacatcacttataaaatcagaaggcaacgcaagcgtattagcccgataatgcaccaataccagcaacttgcatcactaataaaatctcgacttgcaccctacagtttggtggactcgaattgcaggacttaagcacagccttttaaagcacacaacctgtgaaccgaaccaacggagaccagataaaaggtaagtgacaagaacatgctgcagccacaagatcatagatctactagtttcagctggatacagcaccagaaattaagaatctaggcaaacggaaaatgggttccgattcaaccatagacaaag

SEQ ID NO: 843 - DNA, 384 bp, Zea mays
cagcatggctacacactgttccacaccggcaacccatgcacacttgttcttggttgccagattggaacagctgaaatcacacgactcatacggtcccaaatgcaacaggactacgccgctgtgctccaattgacagacgactaaacgatcatcacgccagcatggccggggctgcttcttcatctttcgccgaagcttctccgccgagcaggtgccgcgtcacgtctgctccctgcgccagctgatcctgcagcaggttcctggcgcccttcttctcggcgctcttgccccacagcacgaagtagaggccgatgacgatcagcacagctccaatgatcctgcagccaaaattagatatatagacgccaaattaaagcacatgtc

SEQ ID NO: 844 - DNA, 480 bp, Zea mays
  misc_feature (353)..(362): n is a, c, g, or t
attatggtgttggtgaagctcactttccgtccttgagagtcggtaaccctaccgtcgtccagtatttgaaggaagacattgaacacatccgaatgagctttctcgatctcatcaaacaagacgacggaatatggcctacgacgaacagcttctgttagttgaccaccctcttcatacccaacataacctggtggagcaccaatcaatcttgagactgaatgcttctccatgtactcgctcatgtcaatcctgacaacagcttcctcagtgttgaacataaaagctgcaagggctttcgctaactctgttttgccaactcctgtaggtcccatgaacatgaaactagcaatggnnnnnnnnnnaggagttggcaaaacagagttagcgaaagcccttgcagcttttatgttcaacactgaggaagctgttgtcaggattgacatgagcgagtacatgggagaagcattcagtctcaagatt

SEQ ID NO: 845 - DNA, 732 bp, Zea mays
ccaggattccgccctatccatcccatcaacctcagctaaggtccccagcggcggcgaggcgatggcggcgcctgtgacggtgtacgggccgatgctctcaccagctgtggcccgcgtggcggcctgcctcctggagaaggacgtgccgttccagatcgagccggtggacatgtccaagggcgagcacaagtcgccgtccttcctcaagctccagcccttcggacaggtccctgccttcaaggaccacctcacaaccgtctttggtacctccacctctcagttcttctactactattgttacatatcaagtaatatcttttgggttttaagcattagtattgcaagagcacatgcaaatctcactttttttttcacttctaagcttctttcgtcagcaaagatgcaataagaatacagatctgcagttacgtgttcaagcagaaatgcatacttttgcaaaagggcaaattaattgctgaagcattaggatatattctaggagttaccagtgcatatgcatgcctagccggtaaaagaaaacctaagagatcttactatcttagacggccaatctctttactctctgtgtatggtgttcatctttgacagagtcaagggctatttgccgttacatatgcgaccagtatgcggactctggtaaccaggccctcttcggcaagaaagaagacggcgcggttggccgcgctgccattgaacagtggatagagtctg

SEQ ID NO: 846 - DNA, 392 bp, Zea mays
catcaatccgatgttgtacaggcacctgtacgtttcactgttttcttctattctttgaaatggaaaacaacctaggcgccaagtcattcggcctcaaacccccccgcccaagcattacccggaaggaaacattagagccatcaccaaacataataatgtatgtggatgccgcaaagaacagtctatgagcctactgttgttaacccccacatatatgctacgtgtttgtttctagtaaattttacatcacgaattcacgattgacgcatatattttggacgggagttcattatgggcggtgtagatatggccgccatttacgctttgtttcgaaaaaaggaattttgcctgcttctgggcttttgggcaggcatagttgcgggtataattaa

SEQ ID NO: 847 - DNA, 416 bp, Zea mays
atcgcttccttttacggagtaccgcgcggtcatttgctagttgtcagtgtaacagtcgatatgctctgtcaagacaagacagtgtcctgaaggcaaaccctgccatggctttttgtgtctgtttcagctggtggagaagatgatggagcaggcaagggagaatgtgagcgccaagaaggtcggtcccggactgcgccggtggggcagcgccatgtggtgaacttgtgacgagtgagactcgcgttgtgcagttccagttcgattggcgcttgcttgcttgcttccatggaaagtgctgtacctgtcggtaccagaaccattggtaacagtacgcgatgtgattgacgcatacgtctctgagggactaatagatatatgggcaagagcttccgcgttggcctgctattgttcataag

SEQ ID NO: 848 - DNA, 459 bp, Zea mays
gccgagcttctccagccacagcttcgaagctagttcatccttcctccagaccgcgccttcataccatgcacaccttcatctcaaagtcgaagcctcctaagacagtatgttatactgtaaaatatgttagttaagtttttgaggaccttcggtagaagaaagcccccaacagtagccccttgcagtattaatttgtttttgtatttaacaaattcagactgcgatgtgaacgaatgcctttagccaaaggtccaaaaaaacaccttcccttcgctagaatagcgaaagtcaatgacatgtggggcccgccaagttgcaatgcactgggcatataaataggaacccgcaacgacagcatttgttgcgccatctcaatcgtttgtgctatttttcaagcttggattttcttgttagatttcgcttgatttgtgagcttcggtatttgaataagcgctcacc

SEQ ID NO: 849 - DNA, 454 bp, Zea mays
cagattctctgcggtcagctcatgatcttttgagatcagagacactcagattagaggtattttcaggatgcacacaagttatcttccaacatatcaactgtttaagactggagaagtgagatcagagacactcagattagaggtattttcaggatgcacacaagttatcttccaacatgttttagattttaatatcaactgtttaagactggagaagttcatcttcctcatttgcagaaatattgtttatacaatttaagttaacatttattgctacttacaagtaggtttgtttttggaaccagctccaaagttcagtagattatttaatagtctttattaatccatatgaatcttagaatggtcaaaaatattgtagcaatttggatattaggttggatttttttgactggcgattaggttggatttggataaggggtttctgatattgctg

SEQ ID NO: 850 - DNA, 387 bp, Zea mays
tattttcgtttttattgcacgcgtgcaataaattggatgccatgattcacgtagagtataaattcttatacaaaatcgtataaatacttacaccgtgtaccataattgataaaaaatatatcatcggttcaactaacagccccgcaagaattcgggacaattttatggcaaacgtagaaatcgtattcatcatagtaaaaataatcacttgaatgcataaatagtctaagtagtagacataaaacataatcatcgatgacataagcattgatcggatagctcgctggaagaccattccgaggccgccagatgaaaaggacgcctcagaggccattagatcgaagatggtcgtcggaggaggacgctcgagatgtgccgcatcggagg

SEQ ID NO: 851 - DNA, 496 bp, Zea mays
  misc_feature (491)..(491): n is a, c, g, or t
ggcatcctccagcggtgcatatccatcgccgaaggccaggagctcttacaagaaatacactcgggggcttgcggtcatcacgcagcgcctcgagcccttgttggaaatgccttccgacaaggtttctactggccgaccacggtggccgacgccactaggattgtccgcgcctgccaagggtgtcaattctacgcaaggcagacccacctacccgctcaggctctgcaaacaatacccatcacctgggcgtttgctgtgtggggtctggacctcgtcggtcccttgcagaaggcacccgggggctacacgcacctgctggtcgccatcgacaaattctccaagtggatcgaggtcctacccctaaacagcatcaggtccgaacaggcggtggcattcttcaccaacatcatccatcgctttggggtcccgaactccatcatcaccgacaacggcacccggttcaccggcagaaagttcctggacttctacgnggatc

SEQ ID NO: 852 - DNA, 382 bp, Zea mays
cgctgctggcgatggagtagagcctgaccttgtgtggcttgccgttcttgtcaacgtcgttggcgatgacgccgatggactggccctcttgtatggggtcttgcctgtgtttagaccatgctgaagaaattggttcctctcttccctgtccctgtcagagcggcagtgaccaatgggggcgcgagcacttggcgatgaagaatctgaaccgaaggtcgcggagcaggcgtgagtcgttgaggaggtggagtgcgtggtggaattggcgacgtgggaagagacggtaccgttggttggtgctcatcgggacgtgtgagtcgcgggcgtcgcacttggggtcgatgacagagaagacggtgtagaagagcatgaaggtgtcgaa

SEQ ID NO: 853 - DNA, 409 bp, Zea mays
  misc_feature (400)..(405): n is a, c, g, or t
aactctaataattgtattgtatctatcgaaaactagcatcgtgaagcttacaagcacagaaggctggatttccaaaaaaaggacataatcatacttaccaagctttgtccctacgagaattattggcacaccaggtgcataatgcttcagttcaggtatccactgaaaataaaaggggttcagagtcagcaaacaagaagtttggaagccatctatggattaatcctattcaaaaatttgattttggacatcagtttccactacagtttagtagattttattttaccaagaaaaaagtagtcactcagaatttggtcaagccagaagcaatgaattttatcaaataagaagctaaatgaagactgtctggtaaatgaactaaaacaagatgcccagagannnnnnaaat

SEQ ID NO: 854 - DNA, 447 bp, Zea mays
  misc_feature (398)..(400): n is a, c, g, or t
aagttaaattcttttgaaatgcttgctaatgaaaatgccaatgctatgtactcacgtctcaatattcttgtagaggaagtaaatggattggggcttactcaaatctcacaaccggatgttgtgaggaagattctcagtgtcctcccaatagacaaatatggacacattgtcactgtgctacatcaaatggatctttcagttaccacacctacacagatattgggaaagatcaatgctcatgagatgtacatgcacatcaatgacaaagaagagtcatcttccaaaagaaaggatttggctctcaaagcaaatcaagaaagaaaaggaaaagctaaaatacaaattgaggaagaatcctcaagtgatgatgaccttgatgctaacattgccttgatggnnnggaagaccaccaagatgttaaagaagctcaacagagaaggcatcaaa

SEQ ID NO: 855 - DNA, 400 bp, Zea mays
agttagttagtacaaatatgagaaataaagtcacactaccaaatttaaggtacgatcctatgatatatcatttcattttggattgagtgattttttaaaccaaacaaacgtgtgccaagagatttattgcgagcagaaaacacgtgcgaaaccgcttggtatctgccagtatcttaactccagtgtaatttttgagtttcatttcccgctttccttctctttacaggagctgaacgctcatttaggtgagctgcattgaagctcgagggagatgccgatataaggcagcgggacgcttcaactgaagggcaacacgtccacaatgctggccaccacaagcatcagctcccacttgcatacagaattcccaattgatcgaggatcagtgaggtttagacga

SEQ ID NO: 856 - DNA, 501 bp, Zea mays
aagcggcggcagcggcagcggcacgactgatccgaaagggcaagagaacaacgttcaggactccacaggctcgcctccgcagcaggaggtcgcggacaccgaagactcgtcggcagacaaacagcagggcgaggcgggcaacccaaaggagaagctcaagaagcccgacaagatcctgccgtgcccgcggtgcaacagcatggacaccaagttctgctactacaacaactacaacatcaaccagccgcgccacttctgcaagaactgccagaggtactggactgccggcggtgccatgcgcaacgtgcccgtgggcgcaggccggcgcaagagcaagagcgcgtcggccacttcccacttcctccagagggtcagggccggtctgcccgtcgacccgctcgtctgcgcggcagccaagactaacggcacggtgctcagcttcggctctgccatgtccagcttagacctcacggagcagatgaaacagctcaaggagaagca

SEQ ID NO: 857 - DNA, 357 bp, Zea mays
ggcagatcaagcagctgacatgggtgcctgcctcccagtcatggatcttgttctggtcccagccaaggacacagtgtgaggtgtacgcactgtgtggggcctatggtagctgcaacctcaatgcactgccattctgcaactgcatcagggggttcagccagaaggttcagagtgattgggacctccaggattacagtagcgggtgcaaaaggagagtaccattgcagtgccagaccaattcgagctcttcacaggctcagcctgataagttctataccatggcaaatgtgaggctacctgataatgctcagactgctgtggctgcgagctctcaagactgtcaagtggcttgtctga

SEQ ID NO: 858 - DNA, 421 bp, Zea mays
cgtctgagggttcctgccgcccggagctagccctgccgaggatgcatgcgtacacgtacgtgtgatcgatccggttagtttccacccatcttccaggtctgaaatggaacgcctgaaggcgaccgcgttccgtgatcccaaacccaaacaggtggcggtctcgctcgggtgcgtgtggctcggtccacctccgagccccggagcagccacttggcgtgcgcgtcatgccccgcacgtaacccgccgtaaatcgtcaaagcttgccataattgggggttcggttttcctcgaggaagcgcgtggagatcactggagttctcggtactacaagactctctgggccggcaataatgcagatgtttcggcgcgctctctgttgctttcatggattcaagtggaaactaaggcttggacttggagt

SEQ ID NO: 859 - DNA, 535 bp, Zea mays
gcttgctacgcacgctgacgactgctccacaaatttcatcaccatagtcgaattgttcgccgatcatagccaacagctacaagaaacagtgtgtaagggtggaggactggaggctataagcctataataaggacagatgtcaagaacaaaactcccttttctgataaaataaaactgcttacggtgtgcagccacagcgtgtcagattttcctcttccacagctgatggtccatttaccgccattagcacaaatagggtcttcccattttggctcaatcttgttcttgaagcaatggaagtcagctccgccaatcaacttgctagggtgatggatattattgtagaggctgcgaaatcacagatccattagatggaatatatttatagacgaaagccaaagttggatggggacacaaaaggaccaaaccaaagatagatcagcacatgtctgacacgggattagaccaagagcacttatcacaaggaagagaggaagggttattaaatatcagaccttccaactttcgatcacac

SEQ ID NO: 860 - DNA, 217 bp, Zea mays
cagtcaccgggttgacgacaaccacgtctaccccgttctcctccgcaaacctccaagccgccttctctgccagcgtcttggaaacagggtaccagacctgtatttgttcttattattattattactgttgctattattactacagtccatcacctgacctgagcaaggccaggcgccacccatgtcgacgtcggtcggtatgtccttgcaattatta

SEQ ID NO: 861 - DNA, 378 bp, Zea mays
gatcgattccgtggagacgagtagagagataaaaggagtgggggcaggatgcttatatatacacacacgcacaccacgagcgaagctacggcgagagaaagaagagagctattgtacagtagtggctggcacacacacactggaagtctggaacacagtttgaccccgggagaatgctgagctaataatcaacggacaacggcgacgtgacatatgttacatccacatgcccttatgggcacagcacagatagatgggtagatgtgcacagcgcggcaactcaaaagggacgggagaaacagggccgggagaggccaacccgcaatggcgtgtctcacgtctgaacccgatcgacgggtttggtagctagtctggatt

SEQ ID NO: 862 - DNA, 480 bp, Zea mays
  misc_feature (223)..(224): n is a, c, g, or t
  misc_feature (233)..(237): n is a, c, g, or t
  misc_feature (239)..(239): n is a, c, g, or t
ggtttgctgacgcagtggatctaaacaacgacgcgctatctcctgcttctgcatatgacatctgcatcaagttgaaggagagaggcattttagcgaaacccacacatgacactataatccgacttgctcctcccctcacaatcaggtatgatccttcacctaagtactttacagtcgagtcacacccttgtgattatatgtttggaaccaggaactgttcacnnactgatacnnnnngnatataatcacaagggtgtgactcgactgtaaagtacttaggtgaaggatcatactacctgattgtgaggggaggagcaagtcggattatagtgtcatgtgtgggtttcgctaaaatgcctctctccttcaacttgatgcagatgtcatatgcagaagcaggagatagcgcgtcgttgtttagatccactgcgttcagcaaacccctcccgcgcacttctcttaggatttgagggaatttct

SEQ ID NO: 863 - DNA, 456 bp, Zea mays
  misc_feature (374)..(376): n is a, c, g, or t
  misc_feature (445)..(447): n is a, c, g, or t
ctgccatgggatgggagaggaacgacgacgacaagcggacatgtaaaaattgtaaggacgccttgtctctctgtaaacaaaccagaaggccaacatcatgatagcgcagcatgtacagctaacaaccagactaccagaggttctgcaagcagggcacggaaaaaaaatactcctgaacctcaaccactttcacaagcatgtacaacctcggcgctgttcatcgctgctcccgcagtgagttgtcaagcattgaacttccgctcttcatgcgcgggctattgctatcgttcgatgggtttgtacaggacgagggttacatatttggactcgaacctgtgggttaggccgagagccaccagggggtgggcgccccnnnccttctctatgaagaggtgattgaggactatgtgctgcggccgcgcgcagctttcttccgagttctgtnnnttaaggacg

SEQ ID NO: 864 - DNA, 240 bp, Zea mays
tataggactgttgtcccttagtcaacagggactatgaagcaatggctcgtgattattatgcactagatttcttggaacccgatgtagatgtttccccgattgtgcctgctctcaagaatttttttgatgatgcactaaatgcaacagtgagtgagctgaacttcaagacaatagttgatggcctaggtgctgttctctatcagtacccattcaatggtaagcttggcattgtacaaatat

SEQ ID NO: 865 - DNA, 543 bp, Zea mays
acgaggttggcgtgcttgatcaccccgagcgtctgcacctcggctctgaactgcttgtccgcctgcccgctgcgtttgagcctcttcacggcgacggcggttggtcctgccattgttcccctgaaaacgcttccaaaccctccctcgccgagtttgtcggagaagttccttgtagccttcttcatctgcgcgtaagagtagaacgcgagagaacctcctgcttcaaactctctgcgactgcaagtaaatacacctctccaggtccgggatcgccataggagcgccagtatcactatcacggcagccaacgctactgacccgaccaccatggatacaatcagccctgtgcgcagaccactcttgggcctgagcttggagccccaacgaacataaaccttgctgtatggaggaggtcctctggaagcgaagctcaggttgtacaggttgtagtaccacagcttgcatccggagtgatacgcatacgcatacgcgacgcagtagcatctgctgagacaggcttgtttgcagtcttcatcagttgct

SEQ ID NO: 866 - DNA, 366 bp, Zea mays
atacgaatctacagatgaatgcttctggacgctaaaaagaattcttccagtactaattagctccctgtttttaggctgctattatatagaacgtatgaacacttcaacagggcatgaaaggccgaacttaaaatactgctcaacaatggcagaaagtcgctgctcaggtttctgcatctcctgaatttcttcagaagttgtgctgcaagtacaggttctcttgtggtgaagccggagcgatttcttcctccagtgaccgcagtccgtcacctatgctgctcccgacgttcctgccgtctgtggcccttcgaccaacgatgtcagcttcggatgcagatgatttcctcctctgtgatgaggtcacag

SEQ ID NO: 867 - DNA, 362 bp, Zea mays
tatgagccgcacaggtgctgggaggatatctttgatgctataagcaaggctcagcatttgatttacatcactggctggtccgtgtacacagagatcaccttggtcagggacaccaacaggccaaaacctggtggtgatgttactcttggggagttgctcaagaggaaggccagtgaaggtgtccgggtgcttatgctggtgtgggatgacaggacttctgtcggcctgcttaagaaggatggcttgatggctacccatgatgaggagactgcaaattacttccatggcacggatgtcaactgtgttctgtgccctcgcaaccctgatgattctggcagctttgtccaggatctgcaggcatg

SEQ ID NO: 868 - DNA, 351 bp, Zea mays
tacagtgccatcggttcgtgaagccgtgacaaaaatcctcaagcccaatcctgagctcgctgactcgatctataagaagtgtacgggcctgagcaactggtacggtgtaatcccagcactctggccaaacgcaaagtatgtgtacggtatcatgacagggtccatggaaccgtatttaaagaaactgaggcactatgctgggcacttgcctctgataagcgcagattacggcgcatctgaaggatgggttggtgctaatataaaccccacacttccacctgaacaggtgacatacgctgttctccctcagaccggttattttgagttcattcctttggaggtggagaatag

SEQ ID NO: 869 - DNA, 356 bp, Zea mays
  misc_feature (293)..(296): n is a, c, g, or t
  misc_feature (332)..(353): n is a, c, g, or t
attgatcttaatgacatgatttgtggtactttagtagctgcaatgcaacagttcaattcatccataagcaaaaaaaggactccagttctttctctttttatcttactactttgtatatttctgctaaatgaaaattgccaatgccatcaaatgtattggagagaatgagttggatataaacagcccacggggcaagatacataagcccaatgggcaaaatacataaaactctaacaaaatgttctaatttgtttatttctgtttgcatgatatattttcctgtgtcatgaagnnnnacctgcttctggatgtaagtacattttgctttcttnnnnnnnnnnnnnnnnnnnnnngga

SEQ ID NO: 870 - DNA, 454 bp, Zea mays
ggagtcctcggcttcaaacctgcaccgatcacacttgcattcgaacccccaagctctcgatgcctccctgcgcttgctcaccggcacaagcacatcaaagtatggaaatgtgatctcctccccggctttgatgtccctggacgcgtggacgatggcatggtccccgatgtgagtgcgccgagcattagggtggcaggaatggttgatgaacgacggcaagacccagagccccacgccgcaattgacgacgccattgttaccaagcacatcggcggctggcgcgtcctcagtcaagcaggtcacatcgagcaccttcaagatcctgtccatttgaacagcctcctgtgtcctcgtcgtcttccccgcggtagtaccatcactgagactgtcatcctctgtttctttcctgaacattgccatgtcagggacggcaagctcgtcctgcctctcctgg

SEQ ID NO: 871 - DNA, 340 bp, Zea mays
ggttcgagaagacgatccggtacgcgtcccgcaaggcgtacgcggagacgcggccgcgcatcaagggccggttcgccaagcgcacgcccggggctggggaggacacgctggaggagcacgaggagatgtactcctccgccgctgccgccgtggctgcgctcatggcccccggcggagccgatgcggactacggcgtcgtgcccacatattgatctatgcaattgcaacgccgacatgtacactagttagcctcgtgctctggggctgtaatttttgctgcatgcattgcatgcaaagctcttattgattgcctgtatgattaacggaagccattacaagc

SEQ ID NO: 872 - DNA, 354 bp, Zea mays
gaagctgtggttcgaatggagcgagcactgtactacggaagacttcaaacttggtcaaattgatattgatgactctggggacgaactgttggatactaaagcaatccgcaaggatatcaaagcgctgtatagaaggtgagcttccctccttcccttactcacaattgttttgcatgctagttgcctcatctagtgcctttgtaggtaggtaacaagctttgtggccactggacaccatgtacatattgcagtgctgaccgtcgagctgatccttaaactgaagaaagaggtgacggtgggtggctctacgatcatgaaaacgatgtttcctgttccatttcattgtatggcagc

SEQ ID NO: 873 - DNA, 502 bp, Zea mays
ctaaatactggtcgagtcaaacaccgtacgatcacacagcgagcgtgcttcgatttgcagtctagccacagggcgtgagcttcttgttgccagcgccgcgagggttgtcgtccttccagtcgtcccacgctcgtgccttggcctcctcggcatcctcgtccccgccctccccttgcggcatcgagctgctgctgctgtcgccgcccttgtgccacgcggagtttgcttctctcatcatctcggcggtcctctcttgccacctctccatcatcttcatctcgcgcaagccagcctcttctatgctcattgttggcatcctgtgattcaggcgaggacataacatgaaaaggaaaacgaatcagatggcactctcgtaagctcgctgttcatgaccctcaaaagcgtcaagaatacaggggtaggaattgtgacaactagtgctcattcaacattcagaaacaacattatcattagcacaaacacatgccatagaaaacggtaa

SEQ ID NO: 874 - DNA, 352 bp, Zea mays
caagttcaccttttacgatgtcgacgggaaggcgctgtacagttacacacggtcgagcctgatggaaacaggccaccacctccaagcctccggctacgtcaacgaggaatgaagcaggggcgagtcagcatgcagcgctggagaactgagatcgatatatgcagttcaagcgtacgtataaattctcgagtgcttgatgtggttcatctgtcaagggcaacaacagttaggtttatatgtgtgcccttgcatctctcgacatctgtcactgccgtccggtactatttggggtcatgccatcgattcgaaaacatgacatggtaggggcagccatgatgtagcaaaaaaaaaa

SEQ ID NO: 875 - DNA, 299 bp, Zea mays
ggagacggcgaagatccagtcggccacccggccctgcgtggtggcatcgatgatgatgccgatgccgacgccgacggggctggagatggcgaacgcgaaggcgtaggcgaagcaggagaggaggggccggttgggcagcatccggagcagcgcgatgcccatggcgatggccgcgaagatcttgtgcaggcttatggtccacagcgccttccatgcgtcggccttggtctctgcaggttcgataattagtagtagttaggtaataaggccagacagagtctcagagagctgctagcgct

SEQ ID NO: 876 - DNA, 526 bp, Zea mays
tacaagctcttgccggtgtctgtggtttactaagatcatggttcatcactgttcactaaacttgggaatgttaaacacttaaaacaaatctacccatattgacatcatgtcttgtgcatgtatcaatttgtgtgtcaccctagttaatttccttcagtagtatccaagactataagaaagtacatagcataccatcatcatcttcatcaacccatttgtcccaatcaactttcacaaagtgaggtgccctttgatcatctcgaacgagtttcttccaccatttggcttcagctttttctacgatacagaatatggacctgacccccacacttattttgctagcctgttatattaagaagcattgaggggcagacaactttaaacatcaaaggtttaaactaaaccaatacacattaatattacatgaaattgcattacctcaacgtttactttgtcattcagatctagtttcaattcatacaagtttgtaccagcgctgccagagaatgtgaagacaccatctgga

SEQ ID NO: 877 - DNA, 359 bp, Zea mays
gcagctcaaagcattcgtcaagcaggatcaacaagggaccttgttattcttgttgatgacaccattagtgaccaccaccgcaaggggctggaatctgctgggtggaaggttagaataatacagaggatccggaatcccaaagcggaacgtgatgcctacaatgaatggaactacagcaaattccggctgtggcagcttacagattacgacaaggtcattttcattgatgctgatctgctcatcctgaggaacattgatttcttgtttgcaatgccggaaatcaccgcaactgggaacaatgctacactcttcaactctggggtgatggtcattgagccttcaaactgcacgttccagtt

SEQ ID NO: 878 - DNA, 281 bp, Zea mays
acacactacaaagaagcttgaattggtgcttgctgagtccacttcctacactgtcccttagataaattgaagccttggcaagagatgacatctcatcaaatgaaacatagcatttaacaaaataagcatacacatccaggagcagataagcaacagcaggggccttcaaaaccagcgtaattctgttgtaatatccatcaataattgttaaactcttcagcgtgggtgatgtaatcccagaaagcccattacatttgcaattttccagaatcaagttcttc

SEQ ID NO: 879 - DNA, 516 bp, Zea mays
tctgtgtgtacccagtcccggccttgtgctagtaagtagcaagcagtgttaccttttggtattttaaccagcagctaagttcgcggcattttagtccctgtaagcggtaagcagctctgtagcgtgagatagatggccaagcgccggtacgtacgtgtagtgtctggtcttctcactgagtgtactataaagagttaatataggagctgaccctgtgaacccgcgtgatggatgcatatgcttagtgcaaacctgcattttgtctctatttgaccatctgtacacgcatgatcgccttgcttgcctggtgtctggtctgctgatggcagcgcaaagcgaaaggcaaatgcattgaagggaaggcaagtggaggttggagttgatgctgcggggtgcgggcgcgatttgctgtccctttccggtgtgcggtgttgactgacgcgcgcgagcacgaaactgggggaagtggtggtgccgctgagctattttctgcagtggaaggctagagaggaaggg

SEQ ID NO: 880 - DNA, 372 bp, Zea mays
gctccgggtcgacgacctccttgccggtaccctccctgaccttcatcttgacccagccgacgaggttggtatccccgaagtcctccttgtccgtcggcctcctcccggtcaggagctccaggaacaccacacccagggagtagacgtcgcccttggcggtgcaccggaagctctggtagtactccggcggcacgtacccaggagtccccgccagcgtgctcacgctcaggtgcgtgtccagcgcgctgatcagccgagccatgccgaagtcggcgacgcgggcctccatgtcgccgtcaaggaggacgttgctggacttcatgtcccggtggatgatgtgcgggatgcagttgtgatgaaggaagcagagac

SEQ ID NO: 881 - DNA, 359 bp, Zea mays
cgaccttggcggcgacagggaggctggcaggagcgtgatgaggactctgagcaggctgcatgatcccatcatacgggagaggatccatgagtgggacggccttcgcgaacgcggcgagaagagagaggtcagggatttccttgacgcgctcgtctctcttgtggattcgcaggggcggcctttcttgtcgttcgacgagataaaagcgcagacagcggtacgtaagatatactcctacgactatacgattattcatgcatctaaaagaattaagttgtatgtgttttgcattattcatcatcatctaacgttgtgccattcatgcatgcattgttatttcaagagatgatgtttgcaac

SEQ ID NO: 882 - DNA, 1039 bp, Zea mays
tttaatatatttatttatttatgtaatgtatttgtatgttatcttaaatcatatcagatagatagttatacactacatttatgttatagagaaacaagtagaagagcgtgctataaattgtacattagaaaagtaacatgtaaatctatagaattaatttctatctctcgccccatgaattagagataggcttatatatacactttggaaagttgtggaatgtcatattctaaaaaaaatagcctattgcattagttaaattccaattacttaaaatgaagagaaacaaacgggccctaagagtaaaatgacacctattcagaagctgaaagtaacggtaaagggaaaaaaaataattggtaactgcacatctgcaccaatcaagtaggggggataacacttgttagcaaaatgagggtgacattctgatgaaattgtattgaagaactaaagtaccttttgcttctttagcttctcatttgcctcttctaatcgagataccttgttttccagctcattagtgtaggcctgttgatgatgcttaggttaagaacagcatcatcatttctaaaattttactcacaggtcaaaagaaaaattagcttaatcaataagctaaaacatacaaaggcagaaacatatattgcaacctgcttcctagcccttgaacgagcagttgactccctattcttgaccgttaggactgggcaaaaaacccgaaacccgaacacggaatacccgaacccgaacccgaaatacccggaacccgaatttttttcgggaatttcgggtagcaacttacaaaacccgaatttatttcgggtaattcgggtatcacaatcgggtacccgaaatacccgaattacccaaactttcatgtgtcatgtactcatgtcatgtttaattattagtttgtacatctataattatttgtaaatgtgcataacttttaattgtagattgcttgtgttttatatgtccacgtatatcattattcaaactatatttgtatactatattaatagggtgtatgtgtttt

SEQ ID NO: 883 - DNA, 371 bp, Zea mays
tttgatcgggcgccgtttgcccgtagtgtacggtactaaggacagtgtttggcaccacaaaaagggtcggaaaccaaattcattttcagcagcgactgggtccagacggaacatttctggaacccaaaaacggacacgtacgtcttctagcagcgttggcagacgtttacaccgtatcgcgtaaaaaaggttgaagcttgcaacacggccccctttggcgcttttagaaaattacaaaactacaaggttacagcaacaacctgtcatgtctgcctcttaaaaacgctgccaatctgcgctgcgacagatgaggctcaaatatgaatcgattcgaggcatgcgtcaaaactaccgaatgagaacagccagta

SEQ ID NO: 884 - DNA, 448 bp, Zea mays
gatggccaatgcaagcatggtggttctgtggagcgaagtatcccaaaggtgtccagggaagtttcagaagaaccttggcctttaaacgatcttaattccttcaccgctatggatgtaaaggatgatcctgtgcaaacggctccagatacttctcctcgggcaaggcacatcacagatcattgttctattactcaagtcgttgatccaccatacctgtcccgaccagcggcaaagattggtgctttcagaccatattatctaggacacacggaacctacccaacaagaaatgccaggtgctgtcgtcatgtttgactcaactcataaagtctcgactcctgaaagcgaggtattcaagtttgttgatcctatatgctttgctgctgaggtgccagacaaatgtgggtatggttgctgcggcgctcatgagcagcatcgtaagaactcat

SEQ ID NO: 885 - DNA, 368 bp, Zea mays
acttctcagtgcgtgtaaagtacacaagaacatcgaaattggggagcttgcagccaaacatctcctggagttagagccccatgattcggcatcatatgtcctcctatcaaatgcatatgctgttactgggaagtgggccaacagggatcaggtcagaaagatgatgaaagacagaggaattagaaaagaaccaggtcgaagctggattgaagtaaagaatgcagtccatgcattctttgttggtgatcggtcgcaccccttgtccgatcagatatacaagtttttgtctgagctaaatgataggttatccaaaataggatacaagcaagagaaccctaatttgtttcatgaaaaagagcaagagcaga

SEQ ID NO: 886 - DNA, 366 bp, Zea mays
gctcttaccagtgacttgcttcagtcggttgtatgtgatgaatagtggtttgggggtttacttggcaaaaacaaacagtagctatggcgcctgttgtgcccttaaccgcgtcgagacgtgactgaattactcaggtcatcagcttgtgggacgtgattgcgaacgagattattcatgtaagatgtttgtcataaaaggttgtcgttggctgattgtgcttgtgctgcttgtattgttgagcttgtaaagaatatccaaaatttgtttggacttcatcgagctctccaggtttattttctcgtaatctctatggaaattaccgttactagagataaatggcatccttgcaatgtcccaaattctcac

SEQ ID NO: 887 - DNA, 392 bp, Zea mays
gttgggtacactggacactggttatccttttctttgctaagtatattcatggagattgcaactagctgtaaagcggttataaaaccatcagtctgttggttttacgggatggactttgtataatatgtaacagcggattaggagcttattatttcacttctagctttgctaatggcagttttacctttcccttaaaatattacagtgcagaacaactggtggacatcggttgtcaatgggttattcttggacactctgagcgtagacatattattggtgaaaatgacgaggtgattattttatgtgcatatgctactggtttgatgcttgcagaaacatagtttgtgattgcaatataacaagttgctcaaatgcagtttattgggaagaag

SEQ ID NO: 888 - DNA, 382 bp, Zea mays
agtcgtcctcgtcagctcagctcgaaaaacaccagccgacggagtggccgccgactgagagggagaaggacccaggtcggccgcgggcccgatggacctagaggaccaagaagcgcagaagcctctcctggtcaccgcgcccgggagaatcggtgatggcagtcacttagctgagtccgacgctgcctcgtcctcctcttcgattgcggtggtggtcgccagcaccgcagtcgccgtcgccggatccttcgagttcggcatctcggtaaccactaaccaaggccttccgctgtagtttctgctacatcgtgcattaaattccgtgcctccgtggagttggagtagatagataaccaaaactagctagaagacaactaaacaa

SEQ ID NO: 889 - DNA, 354 bp, Zea mays
atttggctcatcctaccatgaaagtagccaccctgcagtatgttttgggccttttggcatattgatatgtttcataacatgttctttttccttaacagaaactgtacaggcgttatgttgtgaagaggaatcaacgcaaacgccagagagaggaagatctaaagaaagaagagaagaaatcctcagagaagcgatccaagaccatgcatgagactataattgaaagtgttgataaccttggaggcagtgttgaagtgacaaaagaggatgaagaaaagatgagcaaagatcaatcagcaaatgttcatgctgaactgccaaaagagggtcagataaaacttggcacagatcatc

SEQ ID NO: 890 - DNA, 496 bp, Zea mays
cacaccaaccaacccctccatcagctgcccagccatgagctcaggttttcttcaaccttctctctctctctcttcccgctttactctgggtcctactgtatgagtggccattaagtggatcccaagcatgatgcactgattcttcagttggtagaaagaggatcagatacacgagttttataatccgcaagggcttgttcggttgcatctggatagatctaagtgggttgagggatttgatctccttggatccagacgcaaccgaacaagaagggaatgaacattgtgtggtactactgataccatccacctatatctatctataagaagggaatgaacattgtgtggtactactgataccatccacctatatctatctatttgatgaatttgatcaccaatgatttgttctaggaaagatgtgtgggcaggacctgggcttggctaggtgctccaccgagatgtgcaaccggcagcgaggtgatgatttgctgta

SEQ ID NO: 891 - DNA, 209 bp, Zea mays
ctacccgttcacgtccatcttcctgatcgtctactgcttcctgccggcgctgtcgctgttctcggggcagttcatcgtgaagacgctgaacgtgacgttcctgacgtacctgctggtgatcacgctgacgctgtgcctgctggcggtgctggagatcaagtggtcggggatcagtctggaggagtggtggcgcaacgagcagttctggc

SEQ ID NO: 892 - DNA, 433 bp, Zea mays
  misc_feature (126)..(126): n is a, c, g, or t
  misc_feature (147)..(147): n is a, c, g, or t
  misc_feature (172)..(172): n is a, c, g, or t
  misc_feature (240)..(240): n is a, c, g, or t
  misc_feature (324)..(324): n is a, c, g, or t
  misc_feature (340)..(340): n is a, c, g, or t
  misc_feature (350)..(350): n is a, c, g, or t
  misc_feature (382)..(397): n is a, c, g, or t
  misc_feature (400)..(403): n is a, c, g, or t
  misc_feature (414)..(417): n is a, c, g, or t
gcgagtgacaactcagggtcctagtagcactaggcagcaagtgccaacattccatctcccgcgtacctcctggtgtccgttgtggttcttgatgatatgctccctgtaccagtcgatggacagtancttcctgattgctgacccggntgcctgcaaatctttcacggtctcnaacaagggaacaactcttaacctgtcacacagaatgaattgagagagtaatcacaagcagcatattgnaaaaaacaagatgatgtatcatcatagtaggaaaaagcatacaaaaccatttttattttgttactgaagttctgcgaagtttanttacttctcaaaaggnataactttanctctcccgccggttccgtttcaaaaaaacaannnnnnnnnnnnnnnnatnnnnatatatacagnnnnttattgatggttctgt

SEQ ID NO: 893 - DNA, 406 bp, Zea mays
tagaactcgccgttaaccagtcggtgccactgcctcaggggcggttaattctaaataaacaacaacaacaacaacaaagtaacagcaacatgctagtaccaaaacgggtgaaatgaccacaggcaccctgtgttactttgccacatcgacaagctcacggaggacgcagcaggtgacagaacttctgaagcaacccagagctgacagtggacgcaacgagttgcttaaatgtttagtacgcttcaatagtttcaacagacagtggacgcaacgagttgcttttgatgcaagacatgccagattattatgtacacggattcttgagacgcctatttttttttaagtatttacaggaggaggggcattgtccgacgtcgatccacggcggcgtggcgccactcataca

SEQ ID NO: 894 - DNA, 435 bp, Zea mays
  misc_feature (378)..(379): n is a, c, g, or t
  misc_feature (385)..(389): n is a, c, g, or t
  misc_feature (391)..(392): n is a, c, g, or t
ggccagttaatttgttaatctaacaaaagtagcgcaacacgtaacctaaatgggtggaaccaccgcagacgccttcatgttacttcgtcacgtcgacaggcacacggaggatacagaaggtaacataatttctgaagcatcccaaagcagagtagtatatattattacttaaatgtgtttagcattgcacgtcaagttgcgtaatgacagacagacagacagacagacagaccagattacgttatggacacagattcttgtgatgcatgtttagtatttacaggaggcattgcccaatgtggatccatagcggcgcccactcagaacagcccgaaggtgttctcgccgctgtacgtcatgtagaggaagacgattctnncagacnnnnngnngcgtcctgcactgtacgtcggaggaggtgcttgggctgttcta

SEQ ID NO: 895 - DNA, 348 bp, Zea mays
  misc_feature (291)..(294): n is a, c, g, or t
acatatgccttctgaagcagtatgttcctgtgcatagattcctggaggtcataagtccaacagcacagttgaaatttctcaaaacgttcagtctgttgacagtagtaagatgggatcaagtatcaaacatgcaaattttgttgaagatggttcttccaccgaggacttaaatgaggcattgccatgtaactctcattcttcttcaccaaacattaatggtcatagcagttttgtaaacaaagaattctgcaatcattccaaggaataccaaagagctaaggatgccactgnnnntgaggattgttctcagacaagcagtaccagggagcttgaagacagtagcattcc

SEQ ID NO: 896 - DNA, 538 bp, Zea mays
ctctcatggccaatggactgccagaggcatcggtggttgttatgaccgccatccttccttcattagagacatcataacttgctgaagaagatgcatcctcagcttccatcataataaactttgcaatgttcataactaacatgttctcaaaattgtcatcgtcccgctgcacatctttgtaaccatatctaacgatgcaacggtacatccgatattctttaggtccaatcctacccacaaggtatcgctcgtccggtgaaacatacggcactggcactgatttcacacaaaggaagaccaggacttcatggaaggcagggagattagtgacaaaatgtgagaaaatggagggtacaccagtgaccagctccgtgtaaatcaatccaataccaggaacccgaactataccaaggcttggaccgagagataagatggacctcattgatactttgttctgtaggtcaaactggtacttcctccttaacccatagtgccaaatgtacatgactgacatgaatatgaaagcaagcacaagagg

SEQ ID NO: 897 - DNA, 263 bp, Zea mays
gagatgctcaagctgcacaccacgcggtcctgggacttcatggacctggagcgcgacggtcacgtcctccctggctccatctggaaccacgctaggttcggacaggacgtcatcatcgccagtctcgacagcggagtgtggcccgagtcccacagcttccaagacgacggcggccaagtgccagctcgctggaagggctcctgtcaagacaccgttaagtacggtgtcgcctgcaaccgcaaactcatcggcgctaggttctt

SEQ ID NO: 898 - DNA, 328 bp, Zea mays
actctgaggaagaggtacctgctgggatcagtgcaggaaccgatgtctgttttgtagcggagtttgcagaccacatcctgaatatgaaggagctctatgcaaaaggctatgatgaatctgattctgtagacaaagatgcagaagatttacctgatttctctgatgatgaaaaggaggctgagtacaaacggtcattacgtcaagcaaaaaggcagactgatagacagcacgagcctatgaagacttcttgttacatgaagggatcacagcctagaggtagcggaatacggaagcccatgccgccaaggaacctggatacatcaacacg

SEQ ID NO: 899 - DNA, 322 bp, Zea mays
  misc_feature (289)..(289): n is a, c, g, or t
  misc_feature (297)..(298): n is a, c, g, or t
  misc_feature (309)..(314): n is a, c, g, or t
taggtcgagcaggggccgatgggggaagaggcggagagcaactgcaagcgcaaggcgccggactcgagcgtggaagagcagccgagcctcgcgccggcgccggcgcagtcgcaggcggacccggcggccaagcgcccgaacatctcccgctcttgcgtccacgaggtagccgtcccgaatgggtacgagtctgttaaggacgaggcggtgcacgggacgcttgccagcccggccttcaatggggagatggccaagcagtacccgttcaagcttgaccccttccagagcntctccatnncttgcctggannnnnncgagtccg

SEQ ID NO: 900 - DNA, 395 bp, Zea mays
  misc_feature (314)..(323): n is a, c, g, or t
  misc_feature (333)..(346): n is a, c, g, or t
  misc_feature (354)..(357): n is a, c, g, or t
  misc_feature (362)..(390): n is a, c, g, or t
tttttgttctttgaatctaactcgtcgggttttcttggactattgtatgcaagcaagaggggggtatggtttaaatcagatgagtgattaacaacgtacgacgtaccctcatggaggcgttgcggaacttcatggggcggtaggcgtgcgctgcctgcgcgtcggcggcgaggcggtactcgtgcatgatccagttggtcttggtgcccttgggcggccggccctcgtagaagacgagcgccttcttgacgccgacgctctcgccggcggtggtgctgctgtggatgggcttgtcggttccggtggccttccannnnnnnnnncccgccgcgnnnnnnnnnnnnnncccgttcnnnnacttnnnnnnnnnnnnnnnnnnnnnnnnnnnnnccttg

SEQ ID NO: 901 - DNA, 428 bp, Zea mays
attttcatttagtctttacatattggcactgtagtattatgccaagacatgaaatgatcggcttactttatcaatacaaaaggatgtcaaattcccagtggagatgttctgttttgtgttcacgtgcagaacgttgttgaattcatgatcagagattgataaggttggaagttcttaaggtggcaggaactatgttggctgatggcaaaatgtgtctaaatttttatctacaagttatttgtaaaccctacagtttgctatttgcagtctgaatctgtttcatgttgatttatcctggctttcttcatttgatcttttaggtaaacaatgtaggaacaaacataaggaaaccaactactgagtttactgcagaggaatactcgtttctgatggctactaatcttgaatctgcatatcacttgtgccaa

SEQ ID NO: 902 - DNA, 456 bp, Zea mays
aagaaacgtgtgacaactggtatgcatgcaaagcctgcaaaccatgtgcccttacaaagacctctgatcaaatcatcagtttatagttggaaccccaattcattgcatattatctcaggatttgtctattgttttttttctgttttgtgtaggggagatgctaacagggccagcaacggctttatttatggacgaaatatccactggtttggatagctcgagcacatttcagattgtaaagtttatgaggcatttggtccatataatgaatgaaactgtcatgatctctctgctccagccaccgccagagacctacaatctttttgatgacataatcctgctatcagaaggatacatagtgtaccatgggccacgcgagaatatcctggaattctttgagtctgtcggtttccggtgccctgacaggaaaggtgtcgcagactttcttcaagaggt

SEQ ID NO: 903 - DNA, 350 bp, Zea mays
tctctctgtctctctccctctccctcccgtatggtctatgccctcgccccctctttcgtagcgcttcttcctatgcctctcgccggaacggaacagcagatagcatctcaatctccagtggctgtgggcatctttccttttcctgccataggctctaggccgtgacgggagctagcttctcgcttgcgtgcgtgcttgctccggctatcatattgcctgcctgcctgcctgcctatgaaacctctccggccaatggaggagctacctcttcttcttcttctctagcctttctcgtctctgatccacccattgaccttcggtgcccccggccactctgcgccggcctctcg

SEQ ID NO: 904 - DNA, 351 bp, Zea mays
tggagcacccacttcttctgttccagatcagaatacaatacattttgcaatttgcagaagtggaagctagtgaaaaccaaagcaattacagtgatctatctatgccttctctattagctgcaagacctcagtttcagtgggcaaagacgggatcgcacccttcttcgtggcggtgattgctccacacgcattagcgaatttaatagactctacaagcttcttctcgtcctgtgcggtcacaccagataccaaatttcaatgtcacatggtaaaactgaaaaccgaaggaccaccttggcatgtaggacccaacaatttcagatcaatgaacaaatttcaggcgacttactt

SEQ ID NO: 905 - DNA, 518 bp, Zea mays
gtcgcgagagggtagccacgggtcagggagtcgtcgctgccgtttctcgggagcgcggcggggacgggagtcggggcgagggaaggtgccggcgcaggcgctggcgcaggaggaggtggttggtgggcggcgttgtcggcgacctgcagcttctcgagccccgggatctggcgctggtactccgcaggggagacagccacgttgtcgcccgcggggttgggaatgggatggcggtcctcgtttttggctggtaactccacgggcacgctctccctgaccgcaggaggatcgcccgccgggtccttgaccttcaccgcggggggatggacgaagccattgtcgaggccgaacaggtagtcggggctcgccgccgcgagcaccacgtgctgcggcggcggcatctgcatctgcaccaccgtctgcggctgaggcggggactgctggacgaacaccgcctcgtgcttggcctgcggcggtggcgactgctgcgcgaagaccgactcctgctcctgcttctg

SEQ ID NO: 906 - DNA, 240 bp, Zea mays
ggtgagggcatggatgagatggagttcaccgaagctgagagcaacatgaacgatctggtgtctgagtaccagcagtaccaggatgccactgccgatgaggaggagtacgaggacgaggaggaggtccatgacgagtaaggtgatcttggaccctgctgcatattgtaccgtctctggacctggctttctttcaagctggagcttaggtttggttgttgtattcgaacatgctatgatggg

SEQ ID NO: 907 - DNA, 458 bp, Zea mays
tgtgagcagcaggcagatgcagaactctatctgttaagaagacaagaaagcgtaccgtcagtatgttccagggatagtaaaatgtcatcaacagagttaccacgacaaaaacagacaaattgtatatgtcactgctccatcccacgctgagttccattcatggttcagattagtcaaattagctgtctgatttttacccactccttcccatcaggagaaaaaattgtggttgcgaaatggatgctgctggcttgtcctataacagagcatcactgtcacatcacatcaacgtaatgggcttctgagggctacggaaacatcaaacatgaatttatggacctagtcctcgatacaatccttcctttgcggggaaccaaacaggagccaacccagcaacaaatggccaacacgggaacgaagcagatcaggaggtactacagtttatgcagggatctacg

SEQ ID NO: 908 - DNA, 379 bp, Zea mays
aaattttcattttgatctccctaatccctccggctagctgctttccagtgaccaaaagatatcaaagaccacttcccgtcttcctcccgtggcctgtctgtcatctggctctgaaacgatggcagtcctgcaagttgctgctgctgcccctccccctgtctctgtgattgggttcgagggatttgagaagcgccttgagatcagcttctctgaggcacctgtcttggctgaccccagcggaaggggactgcgtgcgctctcgcgtgcccagatcgactctgttcttgaccttgctcggtgcaccattgtgtccgagctctcaaatgacgacttcgactcttatgtcttatctgagtcgagcctgtttgtctacccatac

SEQ ID NO: 909 - DNA, 464 bp, Zea mays
tatgtatattttacacaggtgatgttttacaagagcaaaaattaaggcgagaatcagataatcgtgtgagtagagtacaacgtcagacaatggctatctccctcctccttccgtccctgccacatatctcaagcgaaatcttggagcgaaattcgaattcacgactcctgtgtgctcctgacggatgaatgctggccatggtgacgctacgatgctagtccaggccatcttgatctggatggagcgcatgtattggatgcgaatgggatgctcctgtctgtgttcgtttacgttgaactttgacggctggctggctggctggcgttggttggttggtccggcggtggtgccacggttcctgcctgtatgccgaccaccagatgccctgtgctggctgggcggagacggaatggatttcccttctttcgtgctcgtctcaactctcatctcttgtgccaagattg

SEQ ID NO: 910 - DNA, 1603 bp, Zea mays
  misc_feature (232)..(235): n is a, c, g, or t
  misc_feature (240)..(240): n is a, c, g, or t
  misc_feature (283)..(285): n is a, c, g, or t
  misc_feature (292)..(295): n is a, c, g, or t
  misc_feature (305)..(307): n is a, c, g, or t
  misc_feature (313)..(322): n is a, c, g, or t
  misc_feature (327)..(330): n is a, c, g, or t
  misc_feature (332)..(333): n is a, c, g, or t
  misc_feature (338)..(339): n is a, c, g, or t
  misc_feature (341)..(341): n is a, c, g, or t
  misc_feature (343)..(346): n is a, c, g, or t
  misc_feature (351)..(353): n is a, c, g, or t
  misc_feature (356)..(361): n is a, c, g, or t
  misc_feature (366)..(367): n is a, c, g, or t
  misc_feature (369)..(377): n is a, c, g, or t
  misc_feature (391)..(391): n is a, c, g, or t
  misc_feature (403)..(405): n is a, c, g, or t
  misc_feature (407)..(407): n is a, c, g, or t
  misc_feature (410)..(410): n is a, c, g, or t
  misc_feature (425)..(429): n is a, c, g, or t
  misc_feature (446)..(451): n is a, c, g, or t
  misc_feature (455)..(455): n is a, c, g, or t
  misc_feature (458)..(458): n is a, c, g, or t
  misc_feature (460)..(464): n is a, c, g, or t
  misc_feature (466)..(467): n is a, c, g, or t
  misc_feature (503)..(504): n is a, c, g, or t
  misc_feature (507)..(508): n is a, c, g, or t
  misc_feature (518)..(519): n is a, c, g, or t
  misc_feature (521)..(526): n is a, c, g, or t
  misc_feature (533)..(534): n is a, c, g, or t
  misc_feature (569)..(573): n is a, c, g, or t
  misc_feature (578)..(580): n is a, c, g, or t
  misc_feature (582)..(586): n is a, c, g, or t
  misc_feature (591)..(598): n is a, c, g, or t
  misc_feature (605)..(607): n is a, c, g, or t
  misc_feature (612)..(615): n is a, c, g, or t
  misc_feature (623)..(623): n is a, c, g, or t
  misc_feature (628)..(630): n is a, c, g, or t
  misc_feature (632)..(637): n is a, c, g, or t
  misc_feature (642)..(645): n is a, c, g, or t
  misc_feature (649)..(652): n is a, c, g, or t
  misc_feature (654)..(660): n is a, c, g, or t
  misc_feature (662)..(668): n is a, c, g, or t
  misc_feature (673)..(675): n is a, c, g, or t
  misc_feature (677)..(681): n is a, c, g, or t
  misc_feature (685)..(685): n is a, c, g, or t
  misc_feature (691)..(691): n is a, c, g, or t
  misc_feature (694)..(694): n is a, c, g, or t
  misc_feature (699)..(704): n is a, c, g, or t
  misc_feature (715)..(722): n is a, c, g, or t
  misc_feature (725)..(726): n is a, c, g, or t
  misc_feature (729)..(729): n is a, c, g, or t
  misc_feature (731)..(737): n is a, c, g, or t
  misc_feature (739)..(740): n is a, c, g, or t
  misc_feature (742)..(744): n is a, c, g, or t
  misc_feature (748)..(755): n is a, c, g, or t
  misc_feature (767)..(780): n is a, c, g, or t
  misc_feature (786)..(795): n is a, c, g, or t
  misc_feature (797)..(797): n is a, c, g, or t
  misc_feature (801)..(803): n is a, c, g, or t
  misc_feature (806)..(806): n is a, c, g, or t
  misc_feature (808)..(820): n is a, c, g, or t
  misc_feature (822)..(825): n is a, c, g, or t
  misc_feature (827)..(832): n is a, c, g, or t
  misc_feature (835)..(836): n is a, c, g, or t
  misc_feature (838)..(849): n is a, c, g, or t
  misc_feature (855)..(872): n is a, c, g, or t
  misc_feature (874)..(877): n is a, c, g, or t
  misc_feature (882)..(882): n is a, c, g, or t
  misc_feature (884)..(890): n is a, c, g, or t
  misc_feature (899)..(902): n is a, c, g, or t
  misc_feature (913)..(918): n is a, c, g, or t
  misc_feature (920)..(922): n is a, c, g, or t
  misc_feature (929)..(934): n is a, c, g, or t
  misc_feature (936)..(936): n is a, c, g, or t
  misc_feature (944)..(944): n is a, c, g, or t
  misc_feature (950)..(958): n is a, c, g, or t
  misc_feature (960)..(961): n is a, c, g, or t
  misc_feature (965)..(977): n is a, c, g, or t
  misc_feature (979)..(1000): n is a, c, g, or t
  misc_feature (1003)..(1014): n is a, c, g, or t
  misc_feature (1017)..(1020): n is a, c, g, or t
  misc_feature (1023)..(1025): n is a, c, g, or t
  misc_feature (1027)..(1060): n is a, c, g, or t
  misc_feature (1064)..(1066): n is a, c, g, or t
  misc_feature (1068)..(1070): n is a, c, g, or t
  misc_feature (1072)..(1072): n is a, c, g, or t
  misc_feature (1074)..(1081): n is a, c, g, or t
  misc_feature (1088)..(1093): n is a, c, g, or t
  misc_feature (1095)..(1103): n is a, c, g, or t
  misc_feature (1107)..(1112): n is a, c, g, or t
  misc_feature (1117)..(1137): n is a, c, g, or t
  misc_feature (1140)..(1145): n is a, c, g, or t
  misc_feature (1151)..(1151): n is a, c, g, or t
  misc_feature (1153)..(1155): n is a, c, g, or t
  misc_feature (1160)..(1161): n is a, c, g, or t
  misc_feature (1167)..(1181): n is a, c, g, or t
  misc_feature (1183)..(1184): n is a, c, g, or t
  misc_feature (1186)..(1187): n is a, c, g, or t
  misc_feature (1189)..(1196): n is a, c, g, or t
  misc_feature (1201)..(1206): n is a, c, g, or t
  misc_feature (1208)..(1212): n is a, c, g, or t
  misc_feature (1215)..(1217): n is a, c, g, or t
  misc_feature (1222)..(1226): n is a, c, g, or t
  misc_feature (1229)..(1232): n is a, c, g, or t
  misc_feature (1234)..(1240): n is a, c, g, or t
  misc_feature (1243)..(1244): n is a, c, g, or t
  misc_feature (1248)..(1252): n is a, c, g, or t
  misc_feature (1254)..(1256): n is a, c, g, or t
  misc_feature (1258)..(1259): n is a, c, g, or t
  misc_feature (1261)..(1270): n is a, c, g, or t
  misc_feature (1273)..(1273): n is a, c, g, or t
  misc_feature (1275)..(1295): n is a, c, g, or t
  misc_feature (1300)..(1310): n is a, c, g, or t
  misc_feature (1312)..(1313): n is a, c, g, or t
  misc_feature (1317)..(1328): n is a, c, g, or t
  misc_feature (1331)..(1333): n is a, c, g, or t
  misc_feature (1336)..(1336): n is a, c, g, or t
  misc_feature (1340)..(1342): n is a, c, g, or t
  misc_feature (1347)..(1348): n is a, c, g, or t
  misc_feature (1350)..(1354): n is a, c, g, or t
  misc_feature (1357)..(1358): n is a, c, g, or t
  misc_feature (1361)..(1368): n is a, c, g, or t
  misc_feature (1371)..(1390): n is a, c, g, or t
  misc_feature (1392)..(1410): n is a, c, g, or t
  misc_feature (1412)..(1414): n is a, c, g, or t
  misc_feature (1416)..(1417): n is a, c, g, or t
  misc_feature (1422)..(1433): n is a, c, g, or t
  misc_feature (1438)..(1447): n is a, c, g, or t
  misc_feature (1449)..(1452): n is a, c, g, or t
  misc_feature (1454)..(1454): n is a, c, g, or t
  misc_feature (1456)..(1457): n is a, c, g, or t
  misc_feature (1463)..(1468): n is a, c, g, or t
  misc_feature (1470)..(1480): n is a, c, g, or t
  misc_feature (1483)..(1492): n is a, c, g, or t
  misc_feature (1494)..(1513): n is a, c, g, or t
  misc_feature (1515)..(1523): n is a, c, g, or t
  misc_feature (1525)..(1537): n is a, c, g, or t
  misc_feature (1541)..(1553): n is a, c, g, or t
  misc_feature (1555)..(1562): n is a, c, g, or t
  misc_feature (1564)..(1568): n is a, c, g, or t
  misc_feature (1571)..(1573): n is a, c, g, or t
  misc_feature (1575)..(1578): n is a, c, g, or t
  misc_feature (1581)..(1581): n is a, c, g, or t
  misc_feature (1584)..(1591): n is a, c, g, or t
  misc_feature (1594)..(1599): n is a, c, g, or t
ctggctgaataccgcccattcccattgaatttccaaagaccaataattaatacactagtgctagcatcatgatctctaagaaacgagaccaaataatcatcaaacctaatcctaatagtggagttgcctagagtcacaattaaaccgagcttgctgctgatgacttgtactaccatctgcttccattctgctccctgatgatcgtcagagcttcatgacccagctgttcacnnnntaatnggctaatgatgtctatccaggacgtagttccattacgcgatcnnnaccgtgnnnntatatatcgnnnccagcnnnnnnnnnncatgnnnnanngttcnnangnnnncgtcnnnggnnnnnnaggcnnannnnnnnnncgagggctcagatncaccttctcccnnntnttnaacaccgacatcggnnnnngcgcaccactaggggtnnnnnnccgngantnnnnntnnacatgccgggttgtgtgatgaagctatgtacatcgnnaannatctgatcanncnnnnnngtctctnnctctctactgtgcgggcgaccgacgatgagcatannnnnatccnnngnnnnntcacnnnnnnnngcccttnnntaccnnnngttccgancttannncnnnnnnctgcnnnngcannnntnnnnnnntnnnnnnnccgannnannnnncatntaaaangcntaagnnnnnnacttaaaacannnnnnnncgnnttncnnnnnnntnnannngacnnnnnnnntgctaactgctnnnnnnnnnnnnnngcccgnnnnnnnnnntnaaannnccnannnnnnnnnnnnntnnnntnnnnnnctnntnnnnnnnnnnnnggggcnnnnnnnnnnnnnnnnnnannnnaatcntnnnnnnnccaccctannnntatattatatnnnnnnannnatttgtnnnnnntncataatgntcctcnnnnnnnnnanncctnnnnnnnnnnnnnannnnnnnnnnnnnnnnnnnnnntgnnnnnnnnnnnntcnnnntcnnncnnnnnnnnnnnnnnnnnnnnnnnnnnnnnnnnnntcannntnnntntnnnnnnnnactttcnnnnnntnnnnnnnnntcannnnnnaattnnnnnnnnnnnnnnnnnnnnnatnnnnnntctctntnnntttcnnctcttnnnnnnnnnnnnnnntnntnntnnnnnnnnctccnnnnnncnnnnnccnnnccccnnnnnctnnnncnnnnnnntcnncccnnnnntnnncnncnnnnnnnnnnctncnnnnnnnnnnnnnnnnnnnnnctctnnnnnnnnnnncnncccnnnnnnnnnnnnaannnttntcannntcccnnannnnncannctnnnnnnnngannnnnnnnnnnnnnnnnnnncnnnnnnnnnnnnnnnnnnnannncnntactnnnnnnnnnnnnacttnnnnnnnnnnannnncncnnttttcnnnnnncnnnnnnnnnnncgnnnnnnnnnntnnnnnnnnnnnnnnnnnnnnannnnnnnnncnnnnnnnnnnnnntacnnnnnnnnnnnnncnnnnnnnnannnnnaannntnnnnacngcnnnnnnnnccnnnnnnccac

SEQ ID NO: 911 - DNA, 380 bp, Zea mays
gccgccaagcacggcgggaaggtggccacgcccgccaactggaagcccggggagtgcgccgtcatcgcgcccggcgtctccgacgaggaggccaggaagatgttcccgcaggggttcgagaccgccgacctgccctccaagaagggctacctccgcttcaccaaggtctagctagccgacgtacggcacggacgtctagctcgatcagtccgcgtcgaccggggtgcgcggatcttttgtgcctgctggtggtttctctgactagtactagtatatatataggctctatgtatgtgcgtactatgccgtgccgtgttgtctcgtgtagtggtggcaaccggttcgtggcactaccgcgctagtattgtccacccatatca

SEQ ID NO: 912 - DNA, 356 bp, Zea mays
ggaagcctgagtggttccatgacagtcacacccaataagagtaaccctcgagatatcgacattaagctcaagtactccataaatgggcataggtgtcaggtatcaagaacacagttctacaagatgcggtgacaatggaacaaacaagagttgcttcaaagctcattaaattttgtttaacgagtatcttgtttgacagaaattgtgctatttttattgttcatgtactattatgcatcaaatattagattctttggaatctagcaaaagtagggagtagattaaactggcctgctgatatgagattgatgtagtgcaaaactgtcatattgccacaaggtcgttggtggttgtat

SEQ ID NO: 913 - DNA, 460 bp, Zea mays
aacagcagcatatgccatatcagccatccaaccgctctcggttcagcctttcatttcatttctagggttaatcccgaacccgccagtttcagcagggctcgctcagtcgaaggatacataagaccacagtgaaaattagagggccttacaaaagcagcagcagcagcaatgcagcacgcagatcaaatttacacatcaaaacgccggccaaaacccgagaagaaaccgaaaccccgccgccgccaagcacacacatgcacccacacacacacaccaccgcccacggccgcaatatacacaacggaacctaccccggcaactccaaccgaaacacagcacccatcaccgcactcggcaagccgtggccgggacggcaggggagcacttggggttcgggatggccctgaagtggacgctgttcccggttatcctgcggcgacccctatagtcaggaaggcca

SEQ ID NO: 914 - DNA, 518 bp, Zea mays
gacatgcatgcatatgcaactcatccttagcttcttcattcattgaatgacatgtatatatatacatatactcatctcaagaggaaggaccggaccggaccggacgcaataatcaaaatcgatcaccttggccctgccgagcgccatggtgattgcgctgtaggagacgtggaagacggcgaggaagaagatgaagatgtgcagctggtgcagggcgttgatggagatgagcggcactttcccctcggggcacttggtcgccatgctcgcctccgccagcatcctggcgttgtgcgcgtagtagggcggcggccagtccaccacaccgccaagatgatcgacggcggcggcggccttcttcttcttctttccagggacggcgacggcgaccttcttcttgccagagaccacggcggcggcctccttgccgtggccgtccttgccctcgacggcggcggcctcgagcttgcaggggagcatggtgttggcggcgtggttgctgatgcagaccttgatga

SEQ ID NO: 915 - DNA, 378 bp, Zea mays
gcggggtcgatgtcgaggccgaggtggtggagccggtggtggtggtgcggttgtgggaagagggaggaagacggcgaaggatccaggccgggatggtggtggtgtgggtgtgcaggatgcggcggagggtggtgggaagaggaggaggaggagaggtggaagggtaatggcggcggcggcggcgggcccgggttgtgatggctgtcgaagaggagcgggtggtggtggctgccgaggctcatgtccagatcccatgagctgctgctgctcgagttgtgcgtgatgttgtccatgccggctcgccgcccacggacacggacagcgccgcccccggagaccccctctcgcagctttgtctgtggtatgtacagcctccat

SEQ ID NO: 916 - DNA, 364 bp, Zea mays
ggctgcttaacggtgagtactcgttgttttagttcagatctcgtcagaattcagactgctcgatcgcaatacagtgcaaatttcacatatataattatataaatataacagcgttacaaatatgacattacaaaaccacataataaacaaataaacgaatcacaacattgtgcatcccgtccccccacatagttctataatactcgacgcttgatttcccttccaaaaactcatggtccccttcagacctggaagggccagggccaggtgccggcgccgtcctcgccgccgaccttggcgctgcggcgcatggggttgccgccgcactccctgtcgacgtagacgtagtacctgagcacgaagg

SEQ ID NO: 917 - DNA, 347 bp, Zea mays
ggaggaaatcgaaaggcttaagtgtgacaatgcagctctgacctcagagcttgaaaagaatgcacagaagaaacttgttacagagaaacgaatgcaggagctagaagataagttgatctttttggaggatcggcagaaaaatctgatggcgtatgtcagggatattgtacaggcaccaggatctttctctagctttgtgcagcaacctgatcatcacggaaagaaaaggagactaccagtacctatctctctctaccaagattctaatgctgaggggaaccaggttgtgcatgggagcttcatcaccaacccaccagcttgcagggaatcattcgacaagacggaat

SEQ ID NO: 918 - DNA, 371 bp, Zea mays
atcgaatatgaagcatggagtcaattctaaccttgtgctggcgtattcatagagacgaccggtgctggagaagatgaccaacccgacctctgcgtcgcagagtatggcgagctcccttgccttcttgaagatcccgttccgccgcttggagaacgtcacctgccggctcgtggagttgtcgatccggcggatcactatcttgccgcgccccatcgtgaagctgcgcccggtcgatcttgcacgcgcacacacgggggcaggcacactcacggatagtaaccgagaaggaaagagggagatgggaactccggccagcaggagcccggcctggaaggagaagggttacgaattattggaggcgagagaagaat

SEQ ID NO: 919 - DNA, 505 bp, Zea mays
cgcagagctttgcgcgaaactagcaggctgcttggagagcactgggtcttctcaggttgccattgacaagttggttagctacattctgtctctgtgaatcttctgttctatggcgtatgtgtgttccgctgggttagcattggcagcagcttaacagctggtactcttatatggacaattattcctgtcaattatatgtagtgttctctttctctagctattttttaatttctctacacaccagcttctgatttcgttttaccgccttccatatcggagatattataaacctgactccctttcaagctctccccgcgcttcacgggacctctgccctctgccggctgacgcgtgtcctctccccctacagcgttttctctaccgcgtcctgctccacggccaagtcgacctcgtgtagatggaagatccagtgatcgaaaagaatgttgtaggcagaattaacatttcctgttgctactgggtacagaagtactattcaccactc

SEQ ID NO: 920 - DNA, 398 bp, Zea mays
  misc_feature (47)..(48): n is a, c, g, or t
  misc_feature (73)..(73): n is a, c, g, or t
  misc_feature (173)..(173): n is a, c, g, or t
  misc_feature (358)..(358): n is a, c, g, or t
  misc_feature (364)..(364): n is a, c, g, or t
gagaccggtaccgtacctttttcttctccctgtgatggaacgtctgnntgtgtctctccaccaccctgcgtcnatttttgagttgagtcaacggtagtagcacgaggagggagggacacggtaacaactaacaagttacaataacgcacttgaccgcctgagtgatggtgtcnaaagggttggtcccggcgtgcacgtacagcatgcaggtcccctgcgcagtctgcaccgccttgtcccctgctcccggtcccggccacggaaaatatcgccggcgccggccacggccacccaacggtatcagtcacgcgtcaccacgtgaagcagcacaagaaaagcaaagagagccgaaagcggntgctanctagtggcagcaaccagcaggcagacaggtcata

SEQ ID NO: 921 - DNA, 414 bp, Zea mays
ctgtctcggcgtcatagaaggacccttctttgtgttcgttgtggtttacagcctgcatcagtccgatgtcttgaggacaacacatcactttgccaaaactgtgattggaatgggcatgatgcagcatcaggggcttctgggcataaaaggcaggccataaactgttactcagggtgcccatcatcagcagagctttcgagaatctggtcatttattatcgatatcccgactgtagctgctgagcccaactgtgaggatgggctaagcatgatgacaattgatgacagtgatgtgactaatcatcacggtgcttcagatgataaacgattgttggaaatagctaacacagcactcatgagtgatccaccttcacctgacaagcttaaacctctgataggctcttcttctggagat

SEQ ID NO: 922 - DNA, 431 bp, Zea mays
cagattgctcttgtatcttcggtgccgaatacagctcttacgaaaggccatgaaaggtctaggcactgatgacaagacacttataagggttgtggtgacgaggactgaaattgatatgcaatatatcaaggcagagtacttcaagaagtataagaagccattagctgaggctatccactccgaaacatcaggaaactatcggacattccttctttcacttgttggtcctggacattaggtttgttccctggagatacagtgattaaagcattttcaaactgatctcatatttacttgtattttcctttcgtcaggttatgtttcgaccatgggacatgatattccacccatccaccctaaatgcagcgacctacctggaaaacttatgatgttgccatttgtcagtggtgactcgtggattcgtctaactt

SEQ ID NO: 923 - DNA, 377 bp, Zea mays
tggcgcatacggtgttggcatctgcggtgttggaacggagtatccccaggagatggctgtggctgatgcacaaggcctgcgtgagcctcctgctacggacggagaacggctgcgggacgcccagaatgacgcccatttcccctgccatgccatgcggccctatcttcatcacaagctgaaagagggcagcaaacacagctgatcaaaaaagaatcaagaacgccactgcaatttcacgttattgtgtggtgtttgaatggcttgccttctctgttccatcgtcagctgttgtcaacacgtcctgaagcaacaagcaagcagcaggatcgggatgaagagtgttggagcaaggatatataaggttgtagagagaagac

SEQ ID NO: 924 - DNA, 333 bp, Zea mays
  misc_feature (327)..(330): n is a, c, g, or t
attgattatctctgtgaatccattgatacgtgggcagacatttacagaagaagatttggatctccctgcctttgaaatatatagaccaaggaagatattcgaagccattgacgttccgagaactggagtgccccagcaatcttgtacgccttcaagaacaaaatgttttcaaatccaaatgaagccgtaatgtggatgctcatgcttctttggtactgcaccatcatttttttatttgtgtaaggcttttctggtaaggtagatactgttaaatccatttcgagatttgtgacgcagaatgtgtccggtttcaacatcaatgcgggnnnntgt

SEQ ID NO: 925 - DNA, 425 bp, Zea mays
ttcaggtacttgctgcaagatgccagtatgatctctgatgcacctttgcagtgtgctcgcagtgcaccctctgggagctggattaccactcccattctcttcttggcagagttgaacggctccacctttacaagagtgcttgctttgcgcaccgccaaaaagtctccaccaagtgacagcccgaactctagaatcgctgtctcagtaggtgtccccagtatttcacgtttgccatcctggttcaagacaacgtctcccccagtgttgttgaatatggactgggagagaatcgccatgacagagtctgggagttcagagaacaggttcttgatatccgaaacaccatccacttctttgatcttaccacagatgcaggctttgacaacggtcatgtggttcgttgtgagagtgcctgtcttgtcaca

SEQ ID NO: 926 - DNA, 315 bp, Zea mays
tcctcggctctctgcgttgctaccaccgccgccgccgttcgtttgatcttcaacaatgctaggatctaccacttcttcgccgacatgtagcgagcgagtagtagtgggattgacatgtgtatcgtcaccacgaggtgatagtatggccacttcgttctcaattttttgtttgcttcaagagtggaagggtacggtggtcacttattagctcatgtttgataatggcactaccgcactacatgattaataagcatgcatcatgtacgtagtcatcctatcaaaatttagaaaaatgagcttattgtgatcgatgga

SEQ ID NO: 927 - DNA, 405 bp, Zea mays
gcatgtttggccccgccctcggttatggatgactgttccccttatccctgcggagtgcatataccaccatggtctccattcttggtttaccttggcacgaatcactgtgttggagatggggaaggctgctgttatgtttttacctggctaacttttgttgcgttaccacaggtcacggacaagcccattctgatatatcccaacagtggcgaaagatacgatggtgaaaaaaaggagtgggtggtaggttcattgagcaaacttaagcctattcgtataatagaagctatcttctttagaacatgaaaaaaacaacaggggaaacacccagttttatctcttccatagtttttgtgcatgctgacctacttccctaggttctagtgttaaatgcaagccatcctt

SEQ ID NO: 928 - DNA, 533 bp, Zea mays
gattcaggtagtggtagaggagatagaggtccctcctcttctcaaaccctggctgtttcggcatcacctgtatcagagtaatagtataaaagtactgctgatgtctccatcaaaaacagtgaagaattgagcaatccaccgaccacacgtcttcaaattctatagtagggctagagaaaggcaagcaagcacccaggaagcaaagctggaggtggtaactttattttgtgaaagtggtccatggtccatggacattccctaccctacagaacaagtaagcaatttccacgccgacacttggaccaccctattcgactgtgtgatacaataactatcttgcgtcctttaccaaaggagccttcagccttcctgcctgctagagttttcaggtctgggactttagaggccaacaaaagctaactccgcaaaaactaatccgacccgccaccaataacctcggacggtggtggtttgttaagtatgtcacctcggacggtggaggtttgttaagtatgtctattgtccatttgcac

SEQ ID NO: 929 - DNA, 356 bp, Zea mays
tggtaattgttcttacagcgatattgactggtgactgctgctgatgtagagaagaagggaccggatcaatgaaaagatgcgcgcattgcaagagctcatcccgcactgcaacaaggtatattattaatacatattatgcatcttttcttgtcaggtgcaagtcccttgaataatgacattctgttgggtgagtgtatttaacatgctgtgtcctttatcattgtcagtatgcttattttgtttttcgccgatcttttgtcttactttatcagctccaattgttttcagactgacaaagcgtcgatattagacgagacgattgagtatctgaagtcactccaaatgcaagttcaggt

SEQ ID NO: 930 - DNA, 216 bp, Zea mays
tttcaaggtcgcgactctggtagctttcttcagatgacaagcctgcatagggtgccaatttttcccttgactctccatcaaccgtgctgcttgatacggacgggaaatcttttagttgagccagttgtcgattttgaaaagtgaatcaaatagtttatcgtttgatgcattgcaagcaaagatgctaatgtaggagtaaacgacaaacaaacctgc

SEQ ID NO: 931 - DNA, 507 bp, Zea mays
ctgcagttgacgacgaggatgtcgatgtccttgggcttgagccccgtgcggcggacgaggtcgtcgatggcggagaagatgacgagctgcgcctcggcgcgcgaggcctccatgctggggttgggcgggatgtagtggttggcgggcgggaggcacgtgtcctcgccgagccccgagcgctccaggatcctggtctggaagcgcacgctcttgtcgtcgtcgctgatgaggcgcgtgtgctccatgaaggtggcgaagggcacgcggcagctggcggggggcttgtagcaggcgtagtccaccaggtacaccgccctggggcgcgacatcacgtacacggtgccgacgaagacgaccaggaacgcggagcagaggatgtggaccaggtccagctccagcgagcgccacagcgagagcagctcgccggggccgaggcgcgccagctccagcgccgtggcggccatcaccggcaccagcagcagcgtcaggaagtggttcaccaggtac

SEQ ID NO: 932 - DNA, 218 bp, Zea mays
  misc_feature (206)..(207): n is a, c, g, or t
aaggagctgggtctgctgtcgagcttgcagatcgccctgaatttgagttacaacaacctctctggcgatattccatcagagcttggtaaccttgcactgttggaaagtttatttcttaataacaacaagctgatgggtgaaatcccaaccacatttgctaatctgtccagtttgcttgagctcaacgtctcctacaattatctctnntggtgcccaaa

SEQ ID NO: 933 - DNA, 474 bp, Zea mays
  misc_feature (265)..(269): n is a, c, g, or t
  misc_feature (334)..(334): n is a, c, g, or t
  misc_feature (344)..(349): n is a, c, g, or t
  misc_feature (363)..(366): n is a, c, g, or t
agcagcaacagatgatgtctttcctggctaaagcaatgcaaagtcctggtttcctagcgcagtttgtacagcaaaatgagaagagcagaagaagaatagtagcggcgaacaagaaaaggcggctgcccaggcaagatggtggcctagactccgaaagtgctgctgcttcgttggacggtcaaatcatcaagtatcagcctctgatcaacgaagcagccaaagcaatgctaaggaagatactaaagctagattcttcgcataggtnnnnnatgtctgttgcgttgtctgtctcaggtgatctgtccgggccatcaggttttcagatgtgccactnatctcagcgnnnnnncggagactggtatnnnnaccctgctcatttctaagattaaagaggagtacccggatcgaatgatgatgacgttctccgacttcccatcccccaaggtgtcggacacggtggtcgaaccctataac

SEQ ID NO: 934 - DNA, 463 bp, Zea mays
gatgagatacgagagtcaggtgccagcaacgatttggaaagggggagggaaaatcctgacatacatggaacaattaatatatcaagaacataccaggcatcagaacgatttgctggtgtaaggaatgtgccctctccataggctgcacacttaatgggcggcttatgaacttgtaaagaactattcagcatcatttcatgcacagtgcttttggagcaaggaagccatgcataacggacatttgcgtttccacgatgacatctggtaacctgtacatgcttttcgtgattatggtaacggacttgtccatggtcatccaataatggagtcctgtagattccaataatatccttggattcaataactgaacccatcccctgcaacaacagcttctccacggcttcaatagtgcgctgggcacgtgatacctcacccagattagcttggcgtggtagtaggttac

SEQ ID NO: 935 - DNA, 527 bp, Zea mays
ttgcttgagaggtcaagatagtttaaataactgacatcagaaagtaaaaagggcaaacttccagtgaggccgttgttgtggatatcaagaaaagacagttgtgtgaagttcgaaatagactcgtctaggttccctgagaaatggttactgctcccattgaacaatatcagggagctcgatgactcttcttctttagaacaagagaatgggatttgtccagagaggctgttattactgatatccagataggttaagtaattgatgcagagtaaagactcgggtagtgttccagtaagtgcgttactggataagtctagcttttcgattttgggaagtatttggcctatctcagcaggaatggagccacctaagtggttatcagagagaaaaaggccttgcagttgtactaatgtgtgcagaccaaggaagcatggggccaaccaatgtgttataagaaaggtagatggctgtaacatttggcagttctgcaagctctggtggaatggtgccacttagcatatttcctt

SEQ ID NO: 936 - DNA, 450 bp, Zea mays
gttcgcgagcgacaccgccgattccgcgaggaggagggctgcgagacggagctctctggggagcgagaggaccgtgacgttctgcaagccatcccccgagcgcaactccgtcagctccacgcggagcatcaaggagtacacgacgacgacccagagtgccagggagctctctgtcggcagcagcctgcaggtcgacgacgaggtcacgagtaaggccgttgtgacgaagacggcaggcgttctacggactcccagcaagagccgtgctccggcatctaagacgttggcggcggctagaagccggctggatcctccgaagacgtcctatgccagaacgaaccgtgccgaggtatagtagtagggatctttgtctgcatcgctggtttgcgttgacatggccatatatgttacctttttttggggttatatgttgtgtagttggactcaagg

SEQ ID NO: 937 - DNA, 449 bp, Zea mays
aaggaaactgacggcatagaacacgtcgtcgtcgtcgtccggggctggggtcatcgctgtcatccggtcgtcccacctgtccttgttcatggggtacatgaggatgatcccagctgggttggcgtccttgagtagagccttgaacatgccgtcgtcgaagtcgaggatgcgcgaccgcgggatgaagaggtttagccatgggtgcggcacctcccacgcgccggctgaccggagcaccctctcctcctcgcgcacccggtcgaggaactgcacgaacgtcacgtccttggtgaacgcaaaccctggctcgaagctcagctgatccaggagtgccttcattttctgcaacgattcatatagcaacaacgaatgagtttcctttcgtccaaagcattgaaagcaataataaagttcgcttttttgtgtgtgttcaagctgatctgtacctt

SEQ ID NO: 938 - DNA, 351 bp, Zea mays
cataagggggaagtttggacctgaagtgtgggggcatacattgccacataactatggaaagaacagagattgatcatcatattcctgctttcaagaaaactttgaaatatttgaatggtacgatactatttttctgcttttgagaaaacaaacagaagcctgtttggaaagaagagactggatggtacaaaacaaggcagaactgatcatcatggaactgaagtagagctttcacgaactcccctggagaggtcaaaagcttattaaagcaagcattcttgaactgccagtttagcatccatagacgaaagcaatactgattctggtaacgcgtccacaccctatcataac

SEQ ID NO: 939 - DNA, 543 bp, Zea mays
gcaggtcatacttttgtccaatatccaattgaaatgtttccattcaatatacataccttttgcatttcagctcattataattccttgcatatgcctctgcagacttatgagcgggggtacatagagatgtggctggaggctggccatgatacctgtccgaagacacaacagaagcttgccaataaatccctgaccccaaattatgtcttacgtagcctcataactcaatggtgcgaggcaaatggtattgagcctccaaaacgccctgctcaacttagggatgcaccactgtcatgtagtgctgctgagcatagcaatgttcttgagcttcttcagaaattgtcttcccaaaaccttgaagatcaacgtggctctgctggtatgcttcgtcaacttgccaagcgcagtgctgaaaatcgtgcttgtattggagatgctggtgctattcctattcttgttagtctgctatcaaccactgatgttagcacccaggaacatgtggttactgctctcttgaatctttccatctacgaagagaacaag

SEQ ID NO: 940 - DNA, 531 bp, Zea mays
gcgtggcgcaagtacgggcagaagccgatcaaggggtcgccgtacccgcgcggctactaccggtgcagcaccgacaaggactgcagggcgcggaagcaggtggagcgctgccggaccgacccctccaccgttatcgtcagctacactggcgagcacagccacccagtaccactgcatcgcaacgccctcgctggcaccacgcgcaacaagccgcagccgacgtcgtccatctgcaactccccaggcagagctgcgtcgccaataggagatgatgacttaggggcggctccggcggccatcaacgtcgtcactgacgagaagtgccctttctctcaagcctaacgccacgggacactgctgcgagcctgcgaccaactggggctgacttgtgctgtatacatcgatctccaagcacacactgcacaggatgctgttagtcttgacatattgcggcagcaggatgcacaatcatgatcgactctcgtctcgtcatcaacggaactgtgattttttttagtagcggcgtaggta

SEQ ID NO: 941 - DNA, 551 bp, Zea mays
  misc_feature (474)..(513): n is a, c, g, or t
  misc_feature (521)..(525): n is a, c, g, or t
  misc_feature (527)..(531): n is a, c, g, or t
atttttttctgatgcccatgggcaaaagtggtgcagaagcatatcctccccgttttaaaactatatttgcatctaggcatatattatgtcgtctaggtacataatggaatttatgaacgcgtagaaatgccgaaacattttataatttaagacagggaaagcattatctactactattcaccggcagaaagctcagcttgatattcttcaaggtagtgggaataatcagagtgacaacagccggtctttttacggagagaatggaataacttggcctcattttcctgtttcacacacatatatatatttctgtggattcggtcgagtacagtatggacggcggccattgagcgtcgagaaagagattctccaaactactctctctgtcctctcccactcgtagacatagtcacagccagccactctgttcccttgttttgttcttcttctttttttttccttgaggggcttgannnnnnnnnnnnnnnnnnnnnnnnnnnnnnnnnnnnnnnnaatatagnnnnnannnnnggaggatatgcttctgcacc

SEQ ID NO: 942 - DNA, 416 bp, Zea mays
attttctctccatgttcgacgtgtcgtacaacaatctgaccggagatatacctaccggcgggcagttctccacgttctcgcctgagaattttgacggcaaccctgccctgtgccttcggaactcttcgtgtgtggagaaggactcgtctgcgggagctgctggacacagtaataagaaaaggaaagctgccaccgtcgccctcggactgggaactgcggtcggggttctcctcctcgtgctctgtgcttatgtgatcgtgtcaaggatcgtccattcaaggatgcaggagcgcaatccgaaggccgtagcgaacgccgaggactcggagtgtagttccaactcctgcctggtgctgctattccaaaacaacaaagagttgagcatcgaggacatcctcaagtccaccaacaacttc

SEQ ID NO: 943 - DNA, 209 bp, Zea mays
  misc_feature (200)..(200): n is a, c, g, or t
ccctgatgatcttctccagagggctgaactgcagccctagctcgacgagcttcttcgacgccactcccgcctccgctcttaccagcccaggctgggtgtccttggggaacctgccacggagcaacaccacaagcctcaggcatgcacaccgtacccggagatcattgcaaaaccaacagagaggaggcaagcattcccanagattgctg

SEQ ID NO: 944 - DNA, 459 bp, Zea mays
gctcatgcatgacgaggagctatcagagccagcagagttcatcatcagctcttcatcatgcctggagccttcatcatttcctgcgcaacagttttgttggttcaccataagagtactactagcacatgaaatagtttgatttctcccaccatttgcacatggttgatctgaattacattcatccctggaactttcagaagcctgaggctgtgattcacatcctactccaaaattttgagatccactgttatcaaaaaccacatgtttcagtgaatcaacatcgttaactgaacctgaatcatgaactgtattgtgtaatttagtcttccttcgagcatccataggctcccatatttgctttgggatagcatttttctgtgtagaaccagcacggtttccttttgacactataaagctatccaatgtatagcatctgtggtactgcaccctaggtttcta

SEQ ID NO: 945 - DNA, 428 bp, Zea mays
tctaatgaacgaggaagtcatgctgggcaccatctgatcctctcgtctccgaccagtcactcccggtgcgtggatagcaggttgaaccggctgtcggtccacttccatccgtagttcttgagggaagtcgatcggcggctcatccgtggaatcgccgaggccttcttccattccgttctccatggcagcacgagaggctgcctcaagctcccacatctctgacagggcatcctgcaacctggaattggctgcatctaactcgacaatggggcgtgggtagttagatcctagctcaacccctgcagcctgaagcacagactcaggtgcatcccagggatggtgtatccattccgttggcagccttgccagctccggtagccatcgccggacgtactccccgtgcggatcaaacttgtacccttcaaaca

SEQ ID NO: 946 - DNA, 401 bp, Zea mays
atctgcatgttcgatactggaggactcaaatatgctctccagctcagaaacctcaaagcatatgtctttctcagcaattatgaaggggaagaagccattgctaaaaccactatcttcaacctgaaattgcaggtgatattcaggaggaattcaaagttacagaagaaaactaaaataacaacatcatgataaaaattatacaagtatattttgttccacggttgggttgatagcctagaggtgaaggcggcgttgtccctttcaccaggtcaggggttcgacttcgacccctagttccgcacccttaaataaatcccctcgttgtgtcccgcccgctctcgggaatcgatgtcctgtgcgtcaccctccggctgagccgttgcaaagtggacagttgtact

SEQ ID NO: 947 - DNA, 248 bp, Zea mays
agaaaaaccatgggctgctcgtcagaataaactctaatgaaatcaggaaatgattttcttttaccatctattgctaccttgctgagctcattcagcttctccctggcatcttttagtagaagttcagcatcagtatcccacttgtagaactccagctcccttccttccagaatcttttcgcagatctatttcaaattttcaattcacaaatcagtttactatgcttctattcaggcactacctaattt

SEQ ID NO: 948 - DNA, 425 bp, Zea mays
aaataggacagtaacgttacttaccaaaccataagagccgaaggtacagccaaccgcatgaaactgccaatcccttgaaaagcttcccacgtgaatggagcacgagttttctcacaagaaggtgagaacttaatataaagaccaagaaccgtgacttcaacccagtcacagatgctgactgcaaaagcagctccagcattacccatcccaactttgtaaaccatgaaccagcacaaaggaatgaagacagcgagtgtagtcaaggagctcagaaccaggggaaaaatcaagctctgagattggaggaactttgaaaggcattgagccacactgaaggcgaataaaccagggataagccacaaggcatacctcccggcctcaatcgctatttgtggatcctgacctatgagaggaagtacgtttgg

SEQ ID NO: 949 - DNA, 415 bp, Zea mays
aagagctttagaagttatatcacgctatgagaaaaattagacaaggatcaaatatttgtacaatctacaatgccaagcttaccattgaacgggtactgatagagaacagcacctaggccatcaactattgtcttgaagttcagctcactcactgttgcatttagtgcatcatcaaagaaattcttgagagcaggcacaatcggggaaacatctacatccggtcccaagaaatctagtgcataataatcacgagccattgcttcatagtccctgttgactaagtggacaacatgtcctataatggctaccctcgcatcctctggtgtttcactcatcatgccaaaatcaagaaaagccagcttcccctcaggtgttgccaatatattaccaggatgagggtcagcatgaaagtaac

SEQ ID NO: 950 - DNA, 380 bp, Zea mays
ctgatatttgccgggcgactcggcgcgtaggaggaagaactctccctcggcgcggtggcggcctctcccacaacttctcctaattcaattcgatctcccttccctatccggcatcagcgcgcaccaccactaactagcgaatcccgtttggtcatcaagaagacgtacggctgtctccaatcgaagttccagtcccactccaacgtcggagagagagagagcacatgtctgacttgcgaactccttccctctcctccttcccccaggtcaggagtcccagatcgtgaagccagctattttactctactcccccctcaccacgagtcgcaattcagccccgcgccgcgcgtcgatcttatcctccagtctgattccagcat

SEQ ID NO: 951 - DNA, 521 bp, Zea mays
atttaagatcgtgtcaaaaacctggcagatttcatcagcaggagaaagaaatcaccacacgagtgcttaaacgatgctcataaatatcaggagaataaagtaacagaattacgttttttctacttatattaagtatcacaacaccgggtctccaccttctaagggtgttatagtagctagttataaataatacatttagaaatggtaaaattcctggtccaaactggcttcaacaaaaactggaagacgcgacgcgagtgttgcttcccagaagcccaaccgttcgagtcatttcttcagcaactgtttcaacacatcttctgcgtgccgctccatcttaggtagagcccagtcatgctgcatgatatccaggctgtctttctctgctcccaaactctggatattgccaatcgaaaaagtaaagttctcaaatcttgtcaagacacaagttcaaaaaattacttgtcacaaatatagacatgtaaaataaacaaacaaatccagtaaccgtacacaccaag

SEQ ID NO: 952 - DNA, 371 bp, Zea mays
cggaagtcgacgatgtgcacagctaaatagacgggactctggaggtggcgcgcgactgggcgtcctcgaacgcgtccagatcttcgagcttatcaggcttcaagcacggcggtatgtacgcggtgtagatggcctccatgttcggagtctccttcaggtcgtgccgcaccaccacctccaggggagtcttggcgaacgccgggtagaagcgcatgtggcagacgtaggcgaagattatgctggctggaagcaggggcacgagaacggacgcgtaggcgaacttcttcagggagatgaagccgatcatggtggtctggtaaaccatcagagccgcgatgatcctcgtgtgcatgtgtggccacattcgtccg

SEQ ID NO: 953 - DNA, 392 bp, Zea mays
gagctcaaggcaaagcatggcccgactctgatgatcggcgacggcatgaacgatgccccagcgctggccaaggccgacgtcggagtctcgatgggggtatctgggtcagcggttgcgatggagacgagccacataaccctgatgtcaaacgacatccgccggatcccgatggccgtccagctggcgcggaggacgcaccggacgatcgtcgtcaacatcgtcttctcggtgatcaccaagcttgcgatcgtcgggctcgcgctcgccgggcatccgctcatctgggcagccgtcctcgcggacgtcggcacgtgcatgctggtgatcatgtacagcatgctgctgctgagatcggaatcgaacggcggccggaagtgaagaagtgctgtgcc

SEQ ID NO: 954 - DNA, 215 bp, Zea mays
ggacagcaagccgaggcccctgtcgcgtagcctcgaggccgccgcgccaggacaggtcggtttcggttcgccgctgcaactcttcgtctgtctgtcctgttgcttgctcctgggaatctttttagtgtttgctcatgcggttcctgtgttcttgtttcacttgcaagatttccccatttttgttttagattcagtttccgccgtgagaatttggc

SEQ ID NO: 955 - DNA, 378 bp, Zea mays
  misc_feature (273)..(273): n is a, c, g, or t
  misc_feature (276)..(281): n is a, c, g, or t
  misc_feature (283)..(288): n is a, c, g, or t
  misc_feature (291)..(296): n is a, c, g, or t
  misc_feature (301)..(302): n is a, c, g, or t
  misc_feature (304)..(307): n is a, c, g, or t
  misc_feature (310)..(314): n is a, c, g, or t
  misc_feature (317)..(320): n is a, c, g, or t
  misc_feature (330)..(332): n is a, c, g, or t
  misc_feature (337)..(352): n is a, c, g, or t
  misc_feature (355)..(357): n is a, c, g, or t
  misc_feature (359)..(373): n is a, c, g, or t
ttgcacaacttctagttagaaaatcaaacaggagccgataatattaccttgtcgagcaatattaatagtatgtcacataatgtatagtgtaattcaaatatcaatactaatacaagtacccaatcagatactattactaatcgtcgctcgacacgcaacattatttgcatcgacttatatatagcttacatgcaagaggggagggaagtctgagagttgttgagcacataaaacactcgctaaatacaccgagccggagcaattccgtatatntcnnnnnntnnnnnngtnnnnnnacggnntnnnntcnnnnncannnnaataacaggnnnacggnnnnnnnnnnnnnnnncgnnngnnnnnnnnnnnnnnntgctc

SEQ ID NO: 956 - DNA, 418 bp, Zea mays
agcggcgccgcaagccgaacgaaccagagagagagaagcagagaacccctcctcgacctcggcctctcctcttcctcctccgctcccaaaatcctagggttttgctcgccgcggcgcgatggagcccacctcgtcggcgtcgatcgcgcggcagacgtgggagctggagaacaacattcccgcggcggcctccgacccggacgcgatggacgcgatctaccgctacgacgacgcgtctcaggcgcgggcgcagcaggagaagccttgggccaacgacccgcaccacttccgccgcaccaagatctccgcgctcgcgctgctcaagatggtcgtccacgcccgcgccgggggcaccatcgaggtcatggggctcatgcagggcaagtgcgagggcgacgccatcatcgttatggacgca

SEQ ID NO: 957 - DNA, 389 bp, Zea mays
  misc_feature (375)..(377): n is a, c, g, or t
gagagagctggtgtgagagatgcgtagtcaccacactcacgcatagtataccatacaatacatatagccatataggtcttcctgttcctgggatctgtatccttagctgtcagtatagtgtagtccatacatacttcgttctcattgcaagagatgattgatggattagttagtgctctgtaacataagcttatttataaatggattaagattactgtggaatcagataccatcttctcgcagcactctgtgttcatgtatcggttgctcaaaccatccgtttgcttgcttgctttcatgtgaagaaaaggagcagtctgcatcgcctctctctctgaagcagctagcgtcctcttgctttttctatccacgagnnnccatcactaaaa

SEQ ID NO: 958 - DNA, 357 bp, Zea mays
cacgtcgatatcagcagtgccaacagatcagaaatataaatagtagagccgagtgcaaaaccctcaaatcaacattttacgaacatcatcaccatcctctaattaattgtacacatccacattagcagcttataataattaatcgaccaacacagcactcaagctccctagcttagcttacaacagatccagcacataacaccagagacacacggtgaaactgaactgaacacaacacagcacagaagacagcacatcgaatcctcctaattactccattaattaattgagcaacgacgacgccgacgacgacaacaattagatgaagcatggagaccaagcctaccaacattaaca

SEQ ID NO: 959 - DNA, 364 bp, Zea mays
gcagagagacattgtccctaatgctggaagaccacagcagcggttagttatgaagaattggtctccttacaatgatgtttccaacaacaaacagtacaattatgtcgaggattcgtttgctcgtagaaatgttggtaataatgctgcatcatcatcatcccagatgccacgaccagccgtaagatctaaccttaattctggattgcataatgatgcatcatatcataattatgatagcattatggctggtacctctgccatgaagattacatctacagctgagaccgggaaggttcctgaaagggttctgcgtggtgatttggacaagggtcaaacaaattatagattggaggatcaacatgtc

SEQ ID NO: 960 - DNA, 390 bp, Zea mays
cagcaggagcgcgggcaagagcaggttcccgttcgcgctcgccgcaaagccccacgtctgcggcaccaaggacaaggaggctgctccggaatcgtcaaagtcggagacgtcaaagtcgaaggcagcggcggcgaccaggagcgatgacaagttggctgtggtcaagggcggtgccgctgccgccggtgatggcgggccgcagctgaagcacaggaagcacaagacgagcctgtctgcctgttagtttttagatatctacaagcacacagtataggccctgaatgaacaacgactgtgagtgagagacgctatcgatgtgatgctcatttttttttcttggacatttgctcagtgaaaaatgcatagcgttaccagcgcgtgtcttggact

SEQ ID NO: 961 - DNA, 357 bp, Zea mays
cgagatacgcgaggccggttcaggacctgaacgacagagacatcagcttgtttcgccctaagctacataagcaggagcttttgagttttaaggataaattggttggtgcatgaattgaacaccactttctgtcagtttatgcttttcggatgaacggttcatggtatcaaaaccactcaggtttgaatcatggttaacacaattaaataaaataattgatgatcaaacgtagttcaggccttcagaataacgtacatgtgagttgccttcaattgttggatggttcagtgatggggagagatgtatactgtgtatgattacagttttgttctgtacttctttctacctctgttaggc

SEQ ID NO: 962 - DNA, 368 bp, Zea mays
actcgccggctggggctacgccaactgcgacatccgaggctacctggcggcgctcgacatcatgcagagctactacccggagcgcctcgcccgcgtcttcctcgtccacgtgccctacgtcttcatggccgcctggaagatcgtctacccttttatcgacgacaacaccaagaagaagttcgtcttcgtgtcggacaaggacctggacaggacgctccgcgaggccatcgacgactcccagctgccggagatctatggtggcaagctcaagctcaagctcgtcacgccgcctgcaaataaattaccaagccactagctaggcacatgcatgccggtggtttcacggtgatatcagtcagtgcaaataa

SEQ ID NO: 963 - DNA, 785 bp, Zea mays
ttaaataattctaagagacaaacaaacagtctagcttatttgcccagattatataatctaaccccttagattatgataatccataagcaagtgaggaggtacttatttcagattattttttcccacttccccactaccctttcaagtttcctagaaattacccaccattgccattataatccaccgaatcgttttttcgccttccgtgataatattgctaatgcaatatttgtcaatgtcaattgaattttttaaaattatttatgtaataaattatgaatactcagaaacgtttgttacattgttcatctcatatatgagtttcaacctagtacaaatatagagggcattcttgtcttcctcatacaaaagaatcctattaacaactcaaataatctgggtaaacaaacagaactactcagattatataatccagattatataatcctccaaaaataatccagattatataatccatggggtaaacaaacaggccctaaaccatcacgtattccggtattcacaaatttgctactgaagttgattttatacattaacgcatatatacatctgacgaatgcccataggtctacagcagtgcgtgacggaattctactatcacaagtgacaactgacaacccgaattcctgggtgtcaccggcacgagaagattgcccatgccctgcatcagcccaatcaattcgcagatgctacgcagcttgaacccccaaatgctaggcgcctaggcttccatccatcagtgtcgtttctcgcttattaccgtg

SEQ ID NO: 964 - DNA, 340 bp, Zea mays
atgcaacagcccaaatctgtaattaccaattaactctgcaaagattaatcagcatgtcctaatctcttctgcagtgttgccgcagatcaacaatctggatgccgactaagtgatggaagatacaaaattctagagcatgttgctcttgtattatccaacagtcaaaaggggggaaaaactctataacgcatgtttaattattatcagccatggttgggaaaaaacagcaactgttaaaatcttcaggcagccttgttattgcagtagttctccagccactccatggtaacactcttcggcctctcaagtggcaggccaagggcacggtcccagatgagct

SEQ ID NO: 965 - DNA, 351 bp, Zea mays
ggttgaagacatgaccaagttagagcctttggtaggagtgtcttcaatgccactgggtgcgccttgcaatagcacagtttctgactgttttgtccccgatgaagatgcttgtatggagtcctttgcagtatttatctctgccacaactgcgttgacctggaaacaaatatttccagtattgattgtgtggtcagagaaactcacattccatatatacgtcttctcgagcagatctgtgattggatcaggaataaagccgatcggattgttggcaatgagcatatcgcacggcttcttgatgatgcgttgcgccatccgaccaaagaggatgaagtctgtgtcacctgtctc

SEQ ID NO: 966 - DNA, 336 bp, Zea mays
tttttctgtgtgcacaataagatcaaaggggctaacaagttacaccaagtaagttgcatggcattaagaggtttacctctgttacgatatgccttatatttataaactatattagctaaaataacataaatcaaagcatacttatcagcctaatggaattcataaaatttctaaggtcagtgacctgcaagaaaaataatagaatttaattttacattgattgcaaaggtcctcagaatcaaacaggtatatcatgaaaaagaaacaaaaaatgaaatagctgaaccatgaacaagaccacataagcaagagatatgagcactttcgaggttcaga

SEQ ID NO: 967 - DNA, 353 bp, Zea mays
tggatatgtctgttcagtttagagcttatattctctaaacatgaacattcaaaatcgacagcattgtgcgcacacgaaaattctgcagaaaacatttcagacggacaaggatggccaaagtatggcacttcattgtatatatgtaggtagccaaggctatggtgtacatgtggacagggaattgctttcgcttacgtgacatggagacacatcctgatagccattgctacaaatcctcaagaaaccctagatagcggtaacaagacatcaaagaatggtggacatgagtatctccgtcagaaagtcgatcctctgcagcctctcctccagccccagtttggatgatgcatcgt

SEQ ID NO: 968 - DNA, 218 bp, Zea mays
agctcgatcggcacgattggctctgcttgcacgcgaacctcagtcacctttgtatgtatgtatgtgttgtgtaggctactaactagctagtaactgatgacttgtgtgttgttgtgtgtacggctgagctacctaagggaatgaaagaaagaaggtaggtagcttgctagtaggagtctacggcggcgacggcggccgagaagagaaggagggcggtg

SEQ ID NO: 969 - DNA, 339 bp, Zea mays
  misc_feature (293)..(296): n is a, c, g, or t
gcaagcctcgacggctggcggcggccgaagcgatgtcgcggcggccgttggagtgtcatcttgcggcgtaagacccggactaccacccactggccagacgacggaggaggaggaggcgcgcgtcaggcgcgaggcggagaaagccgagctcgaggaggagatcgccacgttgaaggcggagatcttcgccctggaggaagagttggccaggatggatgccgccgccgccgccgctacgcgcgcgagcgcttctcactctcgtgtttcagctaaaaatgagctgaacagggcannnngagaggcgcctgctgaggaaatgctctctaatgactattatga

SEQ ID NO: 970 - DNA, 346 bp, Zea mays
gtggtggtggtgggattggatgacatggtggtaggccatcccagcatatccaggtgctgcattaggcgctggagcaggggtagccgcagctgttgttcggtagacaccaggttgttgcaattcaggccttactgccatctgaggaattggcacggttggctttggcgttgtgtcaacaagggtcggaggtggcaaagtgacttgtgcaccaggaggcacgccatatgcctgatgtgcgttctgctgcataggaacataatacatccctgtatttggggcgaacgtaggtgcctgttgctgcctttgcatggtctggggtgcctgctgagggacaggatggtggtaa

SEQ ID NO: 971 - DNA, 621 bp, Zea mays
  misc_feature (58)..(60): n is a, c, g, or t
gaggatgatgagatgctggatgttagtgtttcatttttggttgattatgttttccttnnnttactactgcaatactatttagtttagcttgaagtaacatatactattcgtattgcagttaatgactttggtgatatggacttctcggtaagtgtctagtggaagcctcctttgacgattaaggtgggagcaatgtttcatggtactttcgtcattgtagaaactggacataggaggtgctgatgacgacgatattggggatgatgaagatgatgtggttgaaagtgctaacaaaggtacatcgttctcgttgtcatcatgattatttatttgctcaagggcagttgttcctggatttagtcgtagctttacactatcatgggagtcctgacattctactacttatttgggtgatttggatattggaataatcttgttggatgcccagaatttatttctgaaggtgtattgacatagtagcctagaatttcttgcaaccttagtatgaatagttcactgacccttttcaagtgacatcaatagtagcatgcaatagctcacatatcaccctgtcagcaaagaaggatggaatgtagaatttcaatttctttggttgttact

SEQ ID NO: 972 - DNA, 371 bp, Zea mays
ttcctctgcggatgaggccgatttcgctgcctccgactccgcaactgcctctgttgtctctgcctacctctcggttgctggcgagggggccgacctctcgaaagttggcattttcctctcatccgccgcgcgccgccgatcgccgccgtgccttatctgcttcgatcctatacgcccctctgacccggtgtggtcatgctcttcatcttgctttgccatcctccacctcccctgcatccagtcatgggcgcaccagtcagcatccgggcccgccgtgccgtgcccaacctggggatgccccaagtgccgcttcgcctaccccaagtccgagatcccctcctcctacgtctgcttctgctccaagaccatag

SEQ ID NO: 973 - DNA, 350 bp, Zea mays
aatgaacggcacaagggttaagggcagcttgcaaaaggttagcgcacgtatgcttgcaattgcaaggatatatcttatctacttctatctcgatctctgtacaacttccgtagtgtttcgtttgctcggtctgtctgatttcgtgcttttagtttcttcttctttctttttctttttcctcctctcgcgtgtgcctcttgaaacttgatatgtggtgtaaccttgtcttaatttttaatctggtgtttaataagtcgtcttcaaaagttgttctctaggactcgatcgatcgatgcgcaagtgtgtgctgatcaatgtttccatgcatgcatgggcttctgcttgttgtt

SEQ ID NO: 974 - DNA, 350 bp, Zea mays
  misc_feature (70)..(70): n is a, c, g, or t
  misc_feature (72)..(73): n is a, c, g, or t
  misc_feature (77)..(77): n is a, c, g, or t
  misc_feature (109)..(109): n is a, c, g, or t
  misc_feature (115)..(115): n is a, c, g, or t
  misc_feature (163)..(165): n is a, c, g, or t
  misc_feature (171)..(171): n is a, c, g, or t
  misc_feature (183)..(183): n is a, c, g, or t
  misc_feature (188)..(189): n is a, c, g, or t
  misc_feature (215)..(215): n is a, c, g, or t
  misc_feature (303)..(304): n is a, c, g, or t
aatgaacggcacaagggttaagggcagcttgcaaaaggttagcgcacgtatgcttgcaattgcaaggatntnncttntctacttctatctcgatctctgtacaacttcngtagtntttcgtttgctcggtctgtctgatttcgtgcttttagtttcttcttcnnncttttnctttttcctccnctcgnntgtgcctcttgaaacttgatatgtgntgtaaccttgtcttaatttttaatctggtgtttaataagtcgtcttcaaaagttgttctctaggactcgatcgatcgatgcgcaagtnngtgctgatcaatgtttccatgcatgcatgggcttctgcttgttgtt

SEQ ID NO: 975 - DNA, 659 bp, Zea mays
tatttttctcttattgaaaaggcagaacattttgtttacatcgaggtgtgttttcttagctctgcagttttaagccataagatttaagttttattgtaacacttgatattcagagttattcacgttcatatgtttgagaattaatagacctcatatttcgatatgcacatataattacaaatagactgatatcccttgtaacatacattcgttctgctggcctttgcagaatcagtttttcatttcaggtctttcaggggatgacacaattaagaatcgtgtattagaagcactatataggcgcatacttagagcagaaaaagagaaaaggcgcttccgggttattattgtcataccacttttacctggttttcaggtagcgtgcttttgtatcaatgacactatgacacatggtttggtgcttaaggttggctgtatagttaattgttttatttcagggtggcattgatgatggtggagctgcgtctgtgagggcaattatgcattggcaataccgaactatttgtagaggacctaattcaattcttaaaaatctgtatgatgtggttggctcgaaggcggatgattatatctcattttatgggcttagagcacatggaagatcagatgatgggggtcctctggtcaccaatcagata

SEQ ID NO: 976 - DNA, 413 bp, Zea mays
gaccagcgctaccagcagggcctccccgccgagtgctccatgcagtagcgcccggttattcctcgcccgtccaacaatggcgcgcgcgcgcgtgtgtgtgcatgtggtccgctctactgctaccgctacgacgatcggtgtcgatcaccggatcaaggcaagacgaaaggcatcgaaacatggtagataaataaaggacttgacgatttgtaacgcagtagctggtgcgtgcgtggtgtggtggtaagaaattcttctgctgcctgtgttcttgtagagcctcctcgtacgtcctcgcccaccctgttggtacgtgtacggtgtacgtagtctgccgccgcgcgctgttcgtgttcgtcgtgtctcgtgtctgtattatactcgtcctccccatcaaaaaaaaagttgttcca

SEQ ID NO: 977 - DNA, 370 bp, Zea mays
tgcacctcatcaccgtaccccgtgacttcgcccgcctcaagctcgtccacatgtacgacgtcgtcgtcaagacccggaacgtcttcgaggttcgcgacgccgccgcagcctgatggtcttcgtggcgatgcaagctagctcttttctgcgggctcgatcgtcaggccagcgctgtgctgggagatctgccggcctgtcgccgccgtttcagcgtacgtacgtattgtatgtttgtgattggtatgagtacagacgtgcgctttgcatggcgcaggccgagctcgtgcgtgcgtggccacctctgccgccaaataaatgctacgcgaaagcgcgccgccgctgccgtatgtatgcttcttatgtccgaact

SEQ ID NO: 978 - DNA, 593 bp, Zea mays
acgatctgcgcctttccccgtctcttccgtctgctttgggtggcaaaaccctaaccccctttttttcccgcgtaggcacgtcgtcctcccgcccgaggtcgccaagctcctccccaagaaccgcctcctgtccgaggtaaacgcctgcagttccacctgcatttatgttgattgcgttcttgccctgttggtttggttatctgatgcctggatgaattttttggtgtggggatttttccccttctcttctttgcagaacgagtggcgcgcgatcggagtgcagcagagccgcgggtgggtgcactacgcgatccaccgcccggagccgcacatcatgctgttccgccgcccgatcaactaccagcagcagcaggaggcggctgccgcgcagatgctggccaagtgagcccccggtggccagggcggcgaccaggaacgtttaaaaccctaaccccctttccatctctaaaaggggcgtcgctgttctgttgatcaattcctctatgctgttagttggaaacttcgggtgtagttggtggatttgctggtgtgtgccttgtgttcgtggaaattcctgtgaaggaactgccatg

SEQ ID NO: 979 - DNA, 364 bp, Zea mays
  misc_feature (218)..(222): n is a, c, g, or t
  misc_feature (234)..(235): n is a, c, g, or t
  misc_feature (245)..(260): n is a, c, g, or t
  misc_feature (274)..(295): n is a, c, g, or t
  misc_feature (340)..(345): n is a, c, g, or t
  misc_feature (350)..(356): n is a, c, g, or t
acacctctcctaggaggaacagagatccagagaaccttttttctcttctggatccttgccgccttttggcgttcgaaagggggttgttttgcaataccctctctctgttttttttcttcttcgcacaaacccacctcgtttctctacttttattgaggaacagagctggttttccaaaaaaaaaattctactttgattttccataaagacaacctctnnnnntctttcttctanntccatccaannnnnnnnnnnnnnnnccgcagccatcgannnnnnnnnnnnnnnnnnnnnnagcgcacaccaaatcccctcctcctccccctcggatcaggagctnnnnnnagcannnnnnncttttata

SEQ ID NO: 980 - DNA, 571 bp, Zea mays
aggtgccgaccagcaatggcgagacagcgacgacgacgacgacgacgacgctcgtcgcgttcgacgccgacaccggcatgaagaaggtaacgacaccgtgcgcgccaacctgtttcttcttcattcgtccccttttgtcgtttcgtttcgtgctggatagaccgacgcgcgcaggctgaccggatatgtgcttgctgtgaagccagaagacatcgtcagggagttgaacgagcacccgcgtcgggagttcacgacggaggacgagacggacagcgacgacatgggcgacgagtacaccgacgacggcgaggaaggcgaagacgacgacggcaaaatgcagtacaggatacagttccagaggccgaacccgggcggcaccaacaccgcgccagcaccggcagcagcgacgacggctgcgccagcggtgccgacttcggctccgaccagcaccttcctcgccatggttcaataggggcgcgggtggcaggcacccctctcaaaccgtacgtacgtatatgcgtccaaaccaaaaaccagcgcgcatcaccgtcaccgtcacctcctcctttac

SEQ ID NO: 981 - DNA, 267 bp, Zea mays
ggcagctcgacgccctcgcggcttatgctctggaaggagactcgatccagcgccgcctcgggcttgggaatctgcgccaccttctccaccacgaagcccttggccctgtccacgaggccggccatcaggccgacgctcctctcccgtctctcctcctcccctcctcccgcttctgcggcggcgccggacctctcatcctctgtcgtgctcatgttggggaacggagatcgtgccgcgcggccggaggcggtgtgtccctcgctcgac

SEQ ID NO: 982 - DNA, 446 bp, Zea mays
agctctatacctgacctgccactagcgaagcatacttcgtcgacgtcgagcacactcttgcaattaatccaccgagttcggtttagtgttttactactctcagacgtacgcataaatatagcatagcatcgacaataataatgtcgctcgtgagtcggcgcagcagcaacgtgttggacttggaccccttctccctcgacctctggtgggaccccttggacatgttccgctccatcgtcccgtcggcggcctcctccggcggcggttccgagaccgccgccttcgccaacgcccgcgtcgactggaaggagacgcccgaggcgcacgtgttcaaggccgacctccccggcgtcaagaaggaggaggtcaaggtcgaggtggaggacggcaacgtgctcgtcatcagcggcaagcgcagcagggaggaggaggacaagaacgacaag

SEQ ID NO: 983 - DNA, 410 bp, Zea mays
gcgctgctctactcattgcctctttcggtatcgtgatccgaaggaagatggtgccactgatttgtcttaatctattttgcttgacctgagggctggggcgctggcggcccagagatatttccattgcttttccaggaagaacgcgttacctttgtgcacgagggtcagaagcggttcttcgttttccttgctgtatatgtaaaggccaggtaatagtagaaaggattcaataacattgccgcagaaggaggtttctgtacacggtgggaagccagtaccaccgaaaggaatttcatggaatcgcaatttttgtagggtgtagggggagattccacgactgtaaatatgatgagatatgaaacagaaaagggggtggcagatcaacatcgaccttctgtaattagccagaa

SEQ ID NO: 984 - DNA, 699 bp, Zea mays
  misc_feature (657)..(696): n is a, c, g, or t
ttattacaaagttactagtagaattttctacacgtgaacttaaattttccaagtatgctactactgattgtactcaagtgtccctgtgcacactcgcatgagctagcatctgccgatgctcttttccttctcttccagttggtagtcttttcggtctgaaatctagattgtcagatattctcgttatttggcaatccatcaaactgcaacttcttaactactgaagcagcaccttgatcaactccaagtaaaagacttgtgtatcctccttgtacaccctgagcatccatttctgaagaactcaaatacatattaaagtgtggcactattctctgattcaaaagccattccaacttctggaacaaatgaagtttgttgaattttattagcgacctgttgtacagggtaaagaaaacgtaagcatatttatgcatgatcaaactacatcaaagagaaataatcgatgaaagagacatctaggtgaccatacctgagttccttgtgcgtcttcatctccatgttccacggcaactacatttatctcgtcgttctcgtacccgacgacttcacgaatcacgatctccatcaagtggacagatgagttgatcggcctctatgttggctgctggacctgaggatgaggaaatatccatggcnnnnnnnnnnnnnnnnnnnnnnnnnnnnnnnnnnnnnnnngtc

SEQ ID NO: 985 - DNA, 426 bp, Zea mays
tggagagggtgagatcacaaaagctttcaaccgccgggactcaaagctagaaaagccatcgccgccaactccaagaccggcccgtccaacttccaggcattcccctttgacgccctctgctagagtggcaccgatacctgcgaggagaaaatctgtcacgcccaagaacgggctttcacaggtggacgatgacgcgaggagcgtgctcagtgtgcagtctgagcggccaaggaggcacagtatagccacctcgactgtgcgggacgacgagagcctcacgagctccccgtcgctcccaagctacatggttcccacagaatctgcaagggccaaatctcgcctccagggttcagcaatggccaatggcgcagagacacctgagaaaggaggctcaactggaccagccaagaagaggttatccttcca

SEQ ID NO: 986 - DNA, 697 bp, Zea mays
tactctgggttctttgcctccatggtggaggctggagatgtgagagctgcctttgtgggacatgatcacattaatgacttctgtgggaagctcagtggtattcagctctgctatgctggtggatttggttaccatgcctatgggaaagctgggtggtcaagaagagcgagggtactgtctgtgcaacttgagaaaacagacagcggtgaatggcgaggagtcaagtccatcaagacatggaagaggcttgatgataaacatctgagcacaattgactctgaggttctctggaacagaggctctaatggtaaaacactctcctatgcctggatacgatacttaactcaaacctgccatagtaactgtagagtaggagactataggtggcttcggtgaatgattctcgtaaaaggggggaaaatatctaggacaagtgatatgatgtttgatatatggtttatttctcgatgacatgaagttattcttttctatgcaacaactaatctatgaattgccttgacagggaggcgcgggaaaaatcctgatggtagttaacttttgatgcagacaggaatggtgctccataagggatctctacatcggtgtgtattgttggatggccagtttactatagaatcagaaatatgcagaagtgtgtacatgggggagaaggtctatacagacacatacacgcagg

SEQ ID NO: 987 - DNA, 401 bp, Zea mays
  misc_feature (388)..(398): n is a, c, g, or t
taaaaactaagagtcaacatagtaaatgaaaatatttatgttggcatatattatatacatggacacagtgatccagccgctatgtagtgtggtttgaactacacaactaaagtagctaaaagaatgcaagatagggttgcgcgaaccggctaggtggcactatattggtctccatgatccaagatatgctttctgggtaccatggaactctttctcctacaatcaacttgagatatcgagggcaagtgggtcgttcaaagatgtgttaatgttgatattggtgccaatcgatctactgatggtggcgatgatgaaagtgttggcatctttcgtcttcaggagcaaccccgttcgataagaaaatcgttgattctaaagatctcaacgnnnnnnnnnnngac

SEQ ID NO: 988 - DNA, 164 bp, Zea mays
cacagcgcgcggcggcgtggatcccgtctccctctcctcgatccagccctctgaaccacatgcatgtgatcatgcacgggctggtatggtaaagggcgcgccgtgctgctagactcgtatgggctcttggcagcaaggagagctgcagggagcagccatggatg

SEQ ID NO: 989 - DNA, 395 bp, Zea mays
cgtatagtaagtatgtcgtgccgtgcgtatgggatctgggcaagttgtactagtactagtagttagtggtagagtcagggtgctcttcacattttccatgtttcgtgttcgtcgttagcttagaccactcgcactgtactgtactgtactgtgtgccataccgattgctgtatacgtacggcagcacggagcagattagaggacccagcagcagttgttgtgccagccaagaattagagagtagtaccggtcaaattcaacagggcccagtagttgttggttgcagcatctcttgtctctctgggtttaccgaaactaaaacactgccttagttttcagccgcttcagatgtttgtactcatgtactgacaagtatgttgccataagcatgcaga

SEQ ID NO: 990 - DNA, 577 bp, Zea mays
cagcacaaggtattagtgtgtgtgtgtcaacttttgtttctagctagctagttccttaatgaaaacaattggcagccttttgtactatattctcgatcggcgcatatgctcatatcatttttctcctcaactagggctctgaggattccaaggataacggcgacacgaagcaagcagacctgcggagccggggcctgtgccttgtcccagtggcgagcacatacacggtggcggccgagacaccggagttctggcaccctacatttggaggcacattccggtagacaaacaaacaacctcatgcaaagagtgttctgaagctaaagcaaagcaacaacctggctcatctgttcttatcaaactaagttttgtacacagatggtgatgatcgtccagttttagtagcaagctaagtagcctgctgagacggaaagcaagaagtcatgatgccgcccaaagcaatcgaaggatgttttgcaagggaaaagacgtacgagatggatatgataataggtttccggtggtctcttctaagacatgcatacatgctggatcaggtgcagaagagagaatgatt

SEQ ID NO: 991 - DNA, 406 bp, Zea mays
tcaactatcaaatggagcacaggacagagtggtgccaatgcaatggtacctcggccccatgttttttatttgccaggaagttctcctatagtgcggccatgcatcttttggaacaaggagccattggcacaccgaaatctgctcagctgatgattaacttttaacaaaattgtttacacaagtctgcgctcacttttttgatgggtcattataccgttcacaatttcaccagcctcaatgggagctgtagcatttgcagcggtagctacagagacatggagtatcagagtattgacagcgaccggaatgcgcttagacagctaaggacttgaagagagttgatgcacaaactacagagcctcggttttgaagtttgtcagctctatcagtatgcgaatttccaggg

SEQ ID NO: 992 - DNA, 405 bp, Zea mays
gctccatccatttgcttacttatatgaagtatgtgtatctgtgtccttccttctcttgctatatatcttcaagcgcatgcatgcatgggcatggtataacacatagtgatgtagagctatctagctttaccttttttacgtcgtcgtcgtgattatgctgatactaatctgggaggtataaacttaaacggttaaaccataccttcttgtccgacgttgagggcggcagttgctatatatggccgccgtggcgtccagcatgggaacaccaccctcctccatatgatccacctccctgtcttcctcctccgttgtctcgtgggggctccacggtccttggtgccttggtggccaaggggattaggagcggtggaagccacagctacggtgattccagtcattgat

SEQ ID NO: 993 - DNA, 358 bp, Zea mays
atctgctaattcatctggtggtactcttacttctaactcagagctagggcatggttcatccaagagctctatttcagcgtccattgattcaccctctggagtagggaacagcttagagttcaacttcgccgctgttgagaggcatgttaagaacacgggcacgaacggcagagtcgatgactcggggaattctccatcgtcaatgatagctttcaaccaaggagagccattaatcagcctgaaacttgggaagagggcttacttcgaaaacgcctgcggaggacaggatgccaaggtttctgcagcttcagacgttacttctgcagccagcgtggtcaagaagactaaggtgtctcag

SEQ ID NO: 994 - DNA, 907 bp, Zea mays
agtgctttttatcactctattcagcacttggactgtttgttatcctttatcagtaatccgtactctaataagtttcacataactcttcccaagcaattcacaagccatgaaaaatatcacaaccagtacatatgggtattttgttgctatggaaaatataaacttacaccgtatttatgtttaccggcttttaaatatctgaacttgagctactaaaagtgagatgaacaaacaaacgatggtacttataattttttttcttcaaagcttttgctagctatcattttgagcaacatgcttccaacaacaattctcgatcctgatgaccttatagtttgctgtgctagataatgatattcagaaacgagctctatgtagctgctttctaacttatagtttgctattgacccgtatatgacaaaatagacaatgcatggttaagcagtcaggctaagatacattaaacatcgttgtttgattgtttctaaatttgggtgatatttctaactttagcacaggcttcatgcttttgaatatacaatatcttctttcagggtggtttagtacgagagaaattatgggatttgctgggtaatgagcctgacgttatcatggaagaaggcttcccgaatgccaccggacgtgaacaatcaataaaagggttgcggacatcggaattttgcttgcacccagccggtgacaccccaacctcatgtcgcctctttgatgctattgccagtctgtgcataccagtcatcgttagtgatgaggttgagctccctttcgaagggataatagactacacagaaatctccattttcgtgtcagttagtaacgctatgagaccgaaatggctaacaagctacttgaggaatatttccaagcagcagaaggacgagttcgaaga

SEQ ID NO: 995 - DNA, 234 bp, Zea mays
tatttctgcccgaataaagaaaacttcggcacgatttcgagggcgcgcagcagacgtgtgtctctactctctagtctctaggcatgagcacgagcctcaacatcgatcgagtggttccaaccacatcgcccgacccgacgcttccagcagcagtcgcgaaagaagtagcatctcgccgatggggacgggtaccagaccgtacggaccagggagtctacaacttgacacgcttca

SEQ ID NO: 996 - DNA, 476 bp, Zea mays
tacgtgcccacctgatgaactgagctgaacgtaggttgcatgcactgcatgtgtatagctaggcttctcagatcgcttcgtgtggcgtaaggtgtggagcaacgacaggtacgagagcgcggagcaccgggtgtcggtgaactcggcgagggagaggttctccatgccctacttcttcaacccggcgacctacaccatggtggagccggtggaggagctggtgagcaaggacgatccgcccaggtacgacgcctacaactggggcgacttcttcagcaccaggaagaacagcaacttcaagaagctcaacgtggagaacattcagatcgcgcatttcaagaagagcctcgtcctcgcctaactacgtactgctagtactggcctactgctaggatccatgccattgccatgtcgtcttcagattcagagcacgccatgtcgtcgctagcttcgtggtagaacaaataatgatgtgc

SEQ ID NO: 997 - DNA, 352 bp, Zea mays
tactgcttccgcgtgttcccgtccgggcaagctcttggcggccacaagcggtctcacctctgctcggcagcggcagcggcggcggccgccgcccccgtcacatcaggcgctgatccgtcgatcacaatgaggagcctgggtttcattgatctgaacctccccgcgcccttcgacgacgtggaggtctccgccatgtctgaccccttcctctcgtccaagccagcaggttcttgaaagctagcagagcaggcaagccggccgctttacctcgctcgcgatatggctggttccagtggcgacgattcgaggtaaggatcagagacggagagaaagacctgctgattaacgaagc

SEQ ID NO: 998 - DNA, 379 bp, Zea mays
gactcacctcgccgatgtcctccctgccatgtctgtcgccgaccatcgatctccatcgtgctgacgctcggtcttcaccttgacgtcgatctgcatcaaggatttggactgcgtgttggacctcacctcccatcgtcgcagcagtagcccggcaccatcgaccttccagtttgtgcccctcgacccggctctgctcttgtgtcgtgcgcgcgctttctctagctgctctagctgcacgtcgggtgtgtactcatcttccgtcgtgtccacctactcgtcaaattgaggagccagcagcccccttgctcctcgtcgtgtccacgacatgctcgtcgatctcgacgatctatcttccaattacgtgctacttgtgttgagc

SEQ ID NO: 999 - DNA, 454 bp, Zea mays
agcagggcctcctccttcggggaccgcagcagcagcagcaacagccagggtggcgagctggaggaggaggaggagaagagcaaggtgcaacaacaagtcgccatggccagcgtcgtcaagcaggacgccgaactgaacggtgagcgcagcgagagccggcggagagaaggagaggagcgccatatccctgaggtgtgatccccacttctgaaagaagttagattaggtcttgtctcgggttttccatcggtggagtggaatcgtgatggccagaacgtaacagggcagagcattttttttttcttcttcttcttcttggtttgctcagagaagctgagcgcttgcgcttttgtgacgctgtaaacccgtctccgagacaaaccccgacccaagcaaaattttgtgggggctgtaaaatttttgcattgatgaatcttcagaacggggactgacg

SEQ ID NO: 1000 - DNA, 301 bp, Zea mays
  misc_feature (133)..(133): n is a, c, g, or t
acccagatccggctgggaaccccatccagaacagatgagaggtacggacggtaacgcgcctcacacacacacacactcacacacaacaagctctcattgttagcctgtgatctaagctaagagaatctctgcntggcgcgcatttcatgtttcagggaccgcgtcctagatgaagccgccgtccgtacgtcggcggcagggtcccggcatctgatgggctgcgtcttggaagcgtgctcgagctctgtccaggactagctcagaaaccacacgcgcccacacggcgcgacccatcgagttt

SEQ ID NO: 1001 - DNA, 448 bp, Zea mays
ccgcctgcatcccagtcacagccgccgccgtcgtcctcctcctcctcctcctgccgcgcttctgctcaccggccggcgacaagttgacccccggggagtcgctgttgcccggtgagaccatcgtgtccgacggcggcgccttcgcgctgggcttcttcgcaccgtccaatgccacgccaggcaggcagtacgtcggcatatggtacaacaacatccccgtgcagacggtggtgtgggtcgccaaccgggacgcgccggtcaccgtcggcgacgcgcgctccggcaactcctcgtcgtcgtcgtcgtctgcgccgtcgcttgccctggctaacggctccgcctccaccgacctcgtcttgtccgacgccggcggcggtcgcgtcgtttggaccacgaacaccacgagctcgggtactggttcgaccgccgtgcttctcaactccggcaa

SEQ ID NO: 1002 - DNA, 372 bp, Zea mays
cagagagcacccgagagaacgacagcgagagcggtaacagcgcgtggccccttgtcccttggttcttcagcgggctgttctcggtacctgaaccgtcgcacactgacagaggcactctcaccaccgatcaacagagtccttccaccaacccaaatgctggaggaaattgatttcgtcatcctttgtgaataatgctcatacatctgagaatagcaaggagccttgtcagtagatggcttattttttttctgtactgataatccttctcggatgaatcgcaaggtacggagtctgtgtctgctctgttttgtcaggattctagcgatcgtttcgcctctagttaatctcatagctactgagactgtctgtctg

SEQ ID NO: 1003 - DNA, 365 bp, Zea mays
  misc_feature (351)..(361): n is a, c, g, or t
agttgctggattcaccaatcaggctgcatctcaagatgacgtgtcgagttgtgacgacgacattgcagggatcgcgggcgtcgacgaagagagcagcgatggtgactacgatgggattggtctcggtggctgcaacgtggatggagctgctgatccccaggctagcatcggtgaggtgaggaggaaggccccctggaagcggtggaggaagcctgtgaaggcgcggtcgctcaagtctttgatgtgagcacgcaagcgcccgcgttactcttccatctccgtggtgtagatgtagaagataagttaatcggcagcttggcttattcgcttgctaactcctgttccttctgnnnnnnnnnnnttgt

SEQ ID NO: 1004 - DNA, 361 bp, Zea mays
  misc_feature (333)..(341): n is a, c, g, or t
  misc_feature (345)..(353): n is a, c, g, or t
ctccttccttaattatgatgagttgcatgagatttacaatggtatgatcaagtccatcctttgtctcttcaattttatttaatcacgtgttctgctcattggtaaaatagtttatttctttatactcgatacgtaatattgtttaagggtagggaaacactatagaagctttcagagaagtcatgcaaaaccgagaacaaatttgttgtagatgatcgcggacaaaaataagtacacctagcccaaccattcctacaaccttctccatgtgaaattctcgcctagctcgtatcttatgaccttgggaaatttcttcaacatgttttttttccnnnnnnnnnggannnnnnnnnatatgggt

SEQ ID NO: 1005 - DNA, 605 bp, Zea mays
ccgcatccgcgtcggcgcctgggccgtcgtctgtggacgtcgaagcttcatccaaggccaccggaccatcgccgtcagaggcgccatcgcagagtggttcgaccggcgaagacaagacgccggttcgccgacaatctcgtccatttgtcgactgcgagtctgcgactgcagctgtcgcatggatttgactccccttgtgcatggctgacggtgcaggaaaaggaggagggaggaggagacgctccgccaccggcggcatcggccagcgggccggccgacgaggcgtcggagtcggagacagcagcaaaggtatgctcgtgcatgcattcagcattggcctcgccacttttgggacgcattttgcgttttagtcgtctgccatgcattccctgtgaagagaaattcgattctgctgcttttcttacttgatgattacctctatagtttgaaagcatatagtttcaactctcgctaatggtctttattgtttttatgatgatgaaacggatcaggacgtcgatgctgctggaggcggcaaaacgccggcgcctgcgggagcagagtctcagggcagcagcaacctccgagtccccgtctcttccgtg

SEQ ID NO: 1006 - DNA, 448 bp, Zea mays
gcacgccctctgttgggtccgccagcgatgagcgccgggaagggagggtggggggcatcgcccaaacttcacctctgagcccctgcatcaggttcctgacagcgaaagcctagcacctgctgcaacctacctgctcgatggaatgctcaacctctcgccggatctgtgcagctcttacgcgatgtcgttgaacccggtgagctcctcgctgtcccacacttctatgtgtttgattaaatgtctaaactagtgtggcatcgttgctcgcagctagttgttgacactgctcctcgtgcatcgcttattcgacaaaaatcccaagcccatggacagcacacgcgacatgcgcaacccaaatccgatcgaccaggttgttcgatgtgtgtgtgtttttctatcgcttatgtgtgtgatttgtagtttgttctaaatatgttctggtcgatgc

SEQ ID NO: 1007 - DNA, 381 bp, Zea mays
ggctgggtgcttgtctaccattgagagtatagttgttgccatgaggaaactgggagaggattcaaagggactggatgatctcttggatgtttttgagtcgatgattgctgatcagcgacgatgcaaggatgagaatgtgaagcaaaagctcaagtcctaatcataaaaaggtcttatcatcatcagtctgttacctaacttcatgatgacctctggatgcatttttcagtctagatgacatatatacgttaattcatactcagaatttttaaatgccaagattttgtagttatatggtgttttccatttgagctttatctcattttctggataagggcagagcatatcattgtcagtttcaccttctatgatcagatccga

SEQ ID NO: 1008 - DNA, 1186 bp, Zea mays
  misc_feature (1164)..(1165): n is a, c, g, or t
  misc_feature (1172)..(1176): n is a, c, g, or t
tggcgtgattctaggtaaaagtttatgtttacataataatcagagatgtatttcgagtaactgaattattgtatataccttcgtccttttcctttcttggaaactagctttgtaaactattgctttactatactaagttgggaaacctacttctgttagtagtctccttttgcaagtgtttttctggttaatctttcataacgagactggagtgaataggttaaatggattatgatccctatcgcatgcagccttttttgtatgcacaacagcatttttttgttgctgcaagccttctacctttgagaatatatttgctcttacgtagttatgtattttgacaacatagttttggtcattgtttagtactcctataagctcccgcgtatcctatcaggtgcatttccttttagcttataaaattttcccttaatcctttatatatgctgattttacatgttccatcccattgggaattaaaactgtaatacctaaaatatatgttagtttacttctcactgtttcatgaggatgtcttttcaagttttcagcaaatttggtgatatctttgacgaagatcacttcattgagtcacttagaaaatatgtaagggttgtaaaagatcttcctgaagatgtttttctgcgattcaaccataatatcagcataataccaaacatgagaaccaaagctttctcacccccaagttactacttacaacatgtgcttccaaagctgttggagctagggtacgtgctccctcttttttctccttgacatgaagtagagtctgatatttgcactgagcatcacatagcaccatgtcttcacttatttcttgttctatgacacagggctgtgcgtattgcccctttctcaaatagactggctcattcagttcctatgaatatccaggcattgagatgtttgacaaactataaggcattaagattttctgaaccaataagaattcttgcagataatatggttgaccgaatgatcaagaggagttttttaagtggcgggaagtacgtctcggttcatcttcgctttgaagaggttttactaaagtttatcttgtgtggactaatattactacttttctcaagttgtgatgagttatatgtctaggacatggtagctttttcatgctgtaattatganngtggctnnnnngagaataatg

SEQ ID NO: 1009 - DNA, 403 bp, Zea mays
gcactgacgacgcgctcgaccgcgccaagtcgctcgtcaacctccagttcagctggtacctcaccggcacggtggtgttcgtcgtcctgttctacctccagatggcgaagctctaccccgaggagccgcagtacctgccgctggtgaagggaggcggcagcggcagcgatggccggttcagcatcggagatgatgatcacgacgatgaggacgacgtcgaggccgcaaaacgtggcggtttcggacacgtggttagcggcacgaggcctgtcgaaatcgagaggtgagggtcgtgcgtagcaccgtacaaaaggttagcatgttgttgcgtggttatagtgtaatttgacttgaacgttttttgtttattggtggaattaaaacatgcaaatattctctaggg

SEQ ID NO: 1010 - DNA, 211 bp, Zea mays
ggccgccgcactcatctccttcctccatccgaaaccaactgacatcgccccgcagccaagaagctcggctcagctcagctcagttggttcctccattttgagtggaggactgactgtcctcccgtcgcccgtctcgcgatgctgatggggttccccgtggggtactcggagacgcccaagctgctgctgcacctcctcttcctcctcgacc

SEQ ID NO: 1011 - DNA, 383 bp, Zea mays
gcatggagctgcgcaatctgccaggtgagcgcgaccagcgaggccaacctgaacgagcacctccaagggaaaaagcacagggcaaagctggcccgatgcggagcgacgaccaaggcgacgacggatcctcctcctaacagaagcggcgatggcgcagtagcactagcagcaggcccgagcgacgcgccgaagaggatccagatcctggtcgacggggaggcgcaccaggtcgtccagaggagcagctgcgtgtggtgcgagcgctgcagggtcggctgcaccaacgccgccgccatggccgaccatctgcggggcaagaggcacagcctgtcgaacaaggtctggacggcgataaaggccgtgaggaggagcagctaatacgg

SEQ ID NO: 1012 - DNA, 206 bp, Zea mays
aggcatctcagcagaagatcagttgagaccctttaccggatttgtaaaatgtgttcacaatagctgccattgtttcctcatgctggaagcaagcaatccatgtaaatgactgggtgtgcggatcacatggtcaacaaccgtgtacaggccacccttcccgtaaatacatctgcttatgcattttgacatgatgaacaagtgcttca

SEQ ID NO: 1013 - DNA, 515 bp, Zea mays
cacctggtggtcaaccaatgaccccaggcaatgctgggatggatatgctatccccaataataggtgtgctgttgtgatcactatgttctcagattttaatgtggtgctttgcttttatagatatctaaccatgtggcgcaatgcctgcaggtggtgatggtgaagttgcatggctgttgccggatgttttggtcaatgtgttgaggggaggtgatgacggccctggcgtggttagggaagtactcggggtacgtgtgtggtggactagaaaattgtgtttgagtttcatccagcgccattgctcatgtgcacttcaacttacaggatggatcttgccgggttgcacttgggtcgtcgggcaacggtgacgtggtgacggtccttgcgaacgaggtcgaggtcatcaggccgaagaagagcgacaggatcaagatattgaacggcaatttccgtgggtacacaggaaagctcataggtatagatggttctgacggaatagtgaggcttgacgaaac

SEQ ID NO: 1014 - DNA, 878 bp, Zea mays
tatgttgtctattaaatgttctctttcaagtacatattttaagtgatcataaatgtttgtagtgacaacacaaagtcactgaacaaagttgtgctacatgttaggtcttctgctgttgtcagagaagcccacagtcccatactaaggagccgaacacggtctcgagcaaaggtattacactgtcatgatatggtttttgcttgtgatgatcttatgtcctcttactgatgctggtttgttgaaactggtgacatttaggcggcttcaacaagtatcacatcagttctttatctgaaagatggtgtctccattgctacttctggagctgcagacaagtaagttgcactttcatttttattctgcattttaatttattacccactttcatacttttgtatggtttgcaatagcttattgattttatgatattattgtgaacataatgcacttgcttgacgatgagtgagcctgatatcatctactctctgtttcttgtttttttttaaaattttgtagagtaaccaacgtttatatattttaaatactaatattgtaccttgtaaattgtatgccagtgttgtgaaaatatgggatacacgaaacctgaaagtgccgttctccaacaaaaactctcaagcaggggcccaacctttggtaaacatctctactcactaaagaatgttaaactatcagtacaaaaagcaattgaatcgtgcaattcagagtataatcatgtctatcaaattgagtcaacaattatggaatgttgtgtttccgtagctcaaatctggacaatctctgaacaaacatactggtcttttgtctctgaaggagggggtgaaacatggcatctcttgcctgtctcaagattcgtatgg

SEQ ID NO: 1015 - DNA, 352 bp, Zea mays
gtctacggtggcaagcagtactacaattaagtaataatggagggcggcctggtgttgacagccaaacagcgacaggaataccctggcggatggaacccgttcgtgttatggcgcggcgtgcctcgtggcgccatagagcttcattacaatcatcttcttcgtgttctatgctatcttcatgacactatctatggttgtctatatttagagagagaatatggatgaaggagtatcctctatatttagagtggactctagaggacatctttgaagtctatagaggagagaatcttttctatatttatagctagtagatgaacatatagagttagtcgttgaagacaacctgaga

SEQ ID NO: 1016 - DNA, 720 bp, Zea mays
  misc_feature (597)..(601): n is a, c, g, or t
  misc_feature (608)..(612): n is a, c, g, or t
  misc_feature (615)..(620): n is a, c, g, or t
  misc_feature (633)..(642): n is a, c, g, or t
  misc_feature (649)..(661): n is a, c, g, or t
  misc_feature (683)..(716): n is a, c, g, or t
tactgcgtacagtgaccttgctttcctaagagctgcaagatgttagcatattgtgcctcaaccttaaagtgtcactgtgttgtgtattgaagcaatagtatgcatcaatccgtgtaatgctgcaattgttgtatttctttcgtatttacagggtaatctcgtgttgttttacctttaactgacttccatgcatctattgagaagtcatattcagtagtttaaccttttgcaaagacccatgagatgaaattgctattcccaaagtaccactgttcctgtctatatggtttttatagcataatgtgtaattcatgacagggcctctgcgatatttgtcggggtgtatgagccaactaaaagaaaattactggaaacacttcctgaaaatctgagtgcagttgcccattttgtaagttagacaaggcttattatttgacattgctatttatgccatgtaattttcattttatagcaccagcacattttttattttacattaccagaatgatattttgtgtattctctgtgaattcttagtgcctactacagcatatattcattaatattgatcatatcttttataatgcaattgctacnnnnngcagggnnnnntgnnnnnnttgctgcttcccnnnnnnnnnnccctacnnnnnnnnnnnnntttatatcttatcactactccnnnnnnnnnnnnnnnnnnnnnnnnnnnnnnnnnnctgc

SEQ ID NO: 1017 - DNA, 367 bp, Zea mays
gcctcggccacgggtgcgccaaccagacctccgcggtgcgcgtggccggcgtcgcgtacagggacatccacggcacgtacaacccgcaggccggcgcgcccatccgcctcgcgtgcagcgacgccgtcgcctgcacggacatcaccatgtctggcgtcgagctgctgccggccggcggggacgacggagcactgctcgccgacccctactgctggaacgcgtacggggtcatggagacgctcacgctgccaccggtgtactgcttgctggagggcagcccggagtctctccaggatccgctcaccagttgctgagatgagatcgttttctttactaacaaagatttctctcctgagacagtcaacgc

SEQ ID NO: 1018 - DNA, 393 bp, Zea mays
cgccgctgcctcggcaactgcaccgtcaccatgcgcagcgccatgcagaagctccacggcgccaccgccgcgctgcactcgggcgacacgcaggtggccaggacgctcgcgatgcgctctgccgccgacgtctcgtcctgcaccgtcagctgcagggagctcaacggcgacgtgcgcctcatcgtcgtgcagagcctcaccgagttcaccaagatgctccagatcgccgtcagcttcatcagcaagatgaagccgcttccaccgtcagctccagcgcgaactgccacgccatgatcacctacatatgcgcagcgtggttcttctaactaagagagcgggatcgagaagaaattgaagccgctaataattagccatcgttctctagagtttctt

SEQ ID NO: 1019 - DNA, 250 bp, Zea mays
ttctctgttcctggacgtgtgcaggggcagaagctccagcagccatggcgtccctctcctccagtcgctcccatggatggcgcccaagcccttcttccacctctagccggacctgcccagcgccactcctttctctccatggctggcgcacaggaagcccgcagccatggacgcccaggcccgacgccctacctgcgtacctccatggctggcgctccccttccttggtgccccatggctgctcgttcag

SEQ ID NO: 1020 - DNA, 476 bp, Zea mays
catactcagacaaatcaaagtgtgccacgccaggctgctgcaccaaaggaggaactgccacctccacctccccctccccttgctaagccccctatggctgacctgacgcctttaggaagagagaggcttccacccactccaaaaaagccggagcctcctgtcgtgacacttgacgatctctttaagaagacacagtcctctccgaggatctattatcttcctttatcagaagaggaggtggcagccaagctcgccgcacagggcaaaggaaaaaagggataggaggtgttagcttccattttcggctagcttggagtttgttgcggtatgcttaagttctgttgaaatgtgctttactagtccttttttgtccaaataattaatggatacgaatctgccctctttcaggaacatggcgtgcggtggtcacagcagctgacacgtgctactgctgtggcgaaagagttgtagccttg

SEQ ID NO: 1021 - DNA, 491 bp, Zea mays
gccagcgtgcaggccatggtggccgctggtcgtcatgcaccagtgccaccaaggtatctccgtccagatctggccgcggatgtcgtcgttgccgacgacgcgacgaccatccccatcatcgacttccagcgactgctgctggtcgacccagaggaatctgcgcgcctccatgcggcctgccaggactggggcttcttccaggttgggtttctttgcttccctttctttcttgcttgccagatctggatgtttatgatggacttggggggtgaatgaagaagaagatgtgcacgcagctgataaaccacggtgttccggacgatgtgatggaggcgatgaaggccagcatccagtcattcttcgcgcttcctgcggaggccaagcagcagtaccgtcagcaggcaggccagctggaggggtacggccagctgttcgtcgtctccgaggaccagaagctggactgggccgacgtcctctacctcaacacgcag

SEQ ID NO: 1022 - DNA, 429 bp, Zea mays
cagctgtgcgacgtgggcacgcgcttcatcagctgggacggcgtgcacttcaccgaggccgccaacgccatcgtcgccgccaaggtgctcaccggcgactactccacgcccagggtcaccatcgccaaactcgtcaactccacgctgcccaacgacgactagctggctggccgatcgatcgatcgatcgtcgtcgtcgtcgtcattctgataaacatactgcaggctgcaggcttcatcgatccatatccaattgtccgtagaaatctacgactagctcattgtagatccgtaatgtgggctaagagatgcatcatgcatggcgatcgactatagctgcccaactcgtcaagagctggttcaccgccctcgtcatgatcgagctagtttggacgagcaaattccatggcaccgagtaacacaattgata

SEQ ID NO: 1023 - DNA, 881 bp, Zea mays
  misc_feature (814)..(824): n is a, c, g, or t
tgatattgattatttaggcgaagggaaatggcaaccgttccaggggatctgatctggcaggttgtgaggaagaacaactccttccttgtgaagcagttcggcaacggcaatgccaaggtgcagttcaccaaggagccgaacaacctctacaacatccactccttcaaacactcgggtatgttgcgtccttcaaagtttctggattgtctaattgtcgtgtatatgtaacacctgtgatcttagtaataaaaataataaatggctttgtgcttactgctctggctgttttgttctgttaggtttggcgaacaagaagactgtgacgatccagccagctgcaaaggactcggctgtggtcctctctactaccaagaccaagaagcagaacgcacctgcgaagctcagccacaagtctgtgatgcgcaaggagttccgcaagatggccaaggctgtgaaaaaccaggtactagcacatggaatcacattatgcttgattgtacggtaatatggcagtgtttgttttgctactgcaatgcgtggcttttttatgtattggatattgtttccaacacatgaaatttgttgctgtgatgagccataacaagtaagaagaccaactgatcaactggatattggtttcatattcctctatttagcactgttttaaacattatgtgttggtttgtaagataattgttttgttctgttgcttgtttggtgttatgtggatttttcttgttagattgattctcctctctttatgagccataacttctaagaaaactaactgatcaattggttcttcaatgaaatnnnnnnnnnnnacgcttgccttctgagctgttcttgcaggttgcttaaatcttgtatgattaagtaac

SEQ ID NO: 1024 - DNA, 454 bp, Zea mays
aagcttcagttgcaagaaattcagtttctgggcttgtgcttgttgcaaagtcttgtggcaatgatgtttcaaggtaaattatgactaccttctactgcttgttgccccttattgtcattaccatcaattccttcagatcaaaatttaagtgagaatctaattttgatgtaggttgacattttggctatcgaacacagttgtcctgagagaaatcatcgcacaaacatttggtacttcacaacactcaagtccagttaaggttttcagctcaaatggcaatgcaaacaagcctgacaggagtttcactccatcgcaatggaaaagtaactacaatggcaagtatgtgaaacccaatatcatgcagctgccagatgattggcaggaaactagcacattgctggatgcattggagaagattgaatcttggatcttttctcggattgttgagtctgtg

SEQ ID NO: 1025 - DNA, 337 bp, Zea mays
gtcgccgacgcgatcgcgatgggctcaggtcagcatcgtcatcatcaggggcggacaccaccatgccatgtgtcgcctccgcccgtgttgccgccgccgtgtcctggtcaccaagatcggcgtagagaagcactggtgccgccgccaattgttctcggtgtgcagaggaccgcgccggctccgccctcgccgcagcacgcgcaggtggagcattatagggcgctattggcgccaccgccacctccagcttgctcattctaggcgatggctcttgttgttactgtacttcctaagcgtctagtagccgtctagtgtttggagttcatttactcagcaa

SEQ ID NO: 1026 - DNA, 397 bp, Zea mays
ggtagcgttctaagttttgtaaggctatctccagcaggataactatctttgtattcaaacttcactctacaaacagtacagtctacactacataacagtgtaaatcagtgcttttaggtaaactattgataaactgctgcatacggtctaagtttagaaattagcctaataaccttttctatcttagttgtttgtgagatattggaggtcgccaaacttgtaaataacagcgttggagctaggtcgtaatgggctagatcccacggagaagatggaggtcaaaaagtagatcatagtaaggcacaacagtggcaagtttggtgacagcatcgatcgattccaccatcgcatcgttgagcgcaacacaacatggcgtgcagtgaccagctagtttcaa

SEQ ID NO: 1027 - DNA, 364 bp, Zea mays
ctggcgtcctcgtgtacgacgacaccgagagcacagagctggtggcccggagggcgcctccgttgatgtacaagttggggctgaagctgtacgattcgtccctgtttccgatgcgtgctgatcctacagatcgagatgcctgcatgctccggcggctgctgccaccgtgtgtcgcagatggcgaggagagttaccggcatcgcgtgttgctgttggttgggatggatactcagaagctcgacgctgcagagcttgcacacttcctgcagtttgaagcggatctcgtccacgccgccgaggcagtgatcatccaccggtcagagggacttgttgtcgtggtgctgggaagctcggaggacacgac

SEQ ID NO: 1028 - DNA, 940 bp, Zea mays
cctctccgtggagacagccaaggcggccgtgagccacgccgccacgagccaccacgagcacggcggcgagctcagcgatctggagtcggatctggtggggcggcagaagactggctgctcgtcgtcgccggcggcaacaacgccggctgcagagctgatcgtgccgccagcacagcagatctagcaattccaggtgaagagaagagagccgatttgtgcttgctaatcactggcggagacctacagtgctacttgcatgtgtgcgttgcgtgcagatccagcaattccaggatttttgccacaccatgtgtgcgttgcgtgcttcgaatggattgaaatccaaatccatttcgtcttgccactgcactacacctgcacgcctgcacctgcacgcccggccgagctcttgaccggtggggaactttagttttgttatggtgcacaaccaatagttctctgtgttggtctgcttgtgggtcttttcattattcagcaagttgctattttcagttttgttcgaactttttaggttgtgtaactctttagttttgtttgaactctttagtaaaatctgctatttagttacctctggtgttatttacttacctctattgtttacttgcttaaatctgctatttattacttctggtgttatatacaagcatgctcagaacttcaaataggattatttattattctttcatgcctaattcctgtattttagtcactatttagtatttacatgtccaattctttcatgtcctgaaacagttttgatgctcttgtttcttagcattaagttcttagaagatgaggaattgaaaatatagacatttgtctgagttttttttcctcatcaacaggtggtacaaaagggtttttcatcaacaagtggtcaccaaaagaagaactgaaacatcaagatggtgtttgcttctac

SEQ ID NO: 1029 - DNA, 404 bp, Zea mays
tcataaagagggtgtggctggcttctaccgtggatgtgccacaaatctgttgcggacgacccctgctgcagtgataactttcactagcttcgagatgatccataggtcccttcttgatctattccctgctgaacctgaacctcacatccaacctctaaagcattgaccatacaacatttgtaccctatccatgcggcagattaggaccccagtaaccatccagcaacagcaatgttgtttactgtgccagatggctcttgtaaaagagagaattgtttttttccccagataatagctgccattcaaaagttgaaacaatagtgtaggcagagcaatagcatctgtgtacgtaatagatttgttagcatgcatttggggtggaggtatatgagcgatgttgggta

SEQ ID NO: 1030 - DNA, 713 bp, Zea mays
  misc_feature (99)..(99): n is a, c, g, or t
tatcaagaaggagatgatcatgacttagtgctgcagaaacaagaatggatcaagtatgccttggtccccttctaccacctgtttgtagtcatctcttcnatctgccaagaggagttgactcatatctcttgctggtgtttggccatacagaacacaagacatgctcaagagtaaacttattcttgaagatgaatttgcctggagtttaccttcggtgggctcaggtttagatgaacctgagtggtgcaaactgaagtatattggtgggactgacatcagcttcttgaaggaagacccatccacagcatgtgccgcggtggtagtcctcaatgtcgatactttagaagttgtccatgaagagttcaatgttgtccgactgcaagtgccatatattcctggttttcttgcattcagagaggtattatgcatttttgggcgtgcaattgttttcatagaaaaattgctgtctttcaaccaataattaagttgttacctttgctgcaagaagtgtgacatggcctgttgctaactgttcgttcttactgcctctaaagtctagagccaagggattctagtatgatcaatccaaaatcatagatcttgagaaaggtgcatgtctttcaaaaattctttcttttgtgttgtctgataaaaatgtatgatatataatttcatgttattgttaaactgtaccaacatgtatgtgaacaagc

SEQ ID NO: 1031 - DNA, 446 bp, Zea mays
ctgtagcagatgctgctcaaccggcaaaaggcactgctgatcctgtgaacccatcccctaagaagcgcaagggcttcctttcattcggcttcagctggaccaagtcttggagcagacgtggtgcaaccagcagctcagagaacttcgggaagacgctgtctgcagcccttacaggcagtgctcaaggcaacagcaggggcggtagcaatgagcaccagggctgtcaagaccctgctgcccactgcctgcatctgcacaggaggtccaacacgcctggcgtctctgcttccccgcctggacctggtgcccttcggcctcagctgatctcagtgcagatgcagtcggtgtctgtggcaggtgtggaggacgtggcggagtccaccgcctcagtttctcccagagagaagcgcaggaggagcttgcagtagtgacagtttcgtctgtcc

SEQ ID NO: 1032 - DNA, 371 bp, Zea mays
agcccccgtagaccatggaagatgcatggcttgagcatctgcatggttcttgagagttaaagctgcacgacgatggatagtggaaacagagcttctcaagtagaagcattcgttttcgtggtgcctttcctgacctccttggtggtcagctgaggtgcgcacaaaccggcaagtcacaatacggcaatggcggattccattaggagtcgtccttttttatttctttacccctttttacattctagttctgtgattgtgtcaggcggaagctagaagacaaataacctaagtattcatgtgtgatggattatatacgtatacattggtgagacaatgtttgtctcatgtgtactccagtctccagaaacaag

SEQ ID NO: 1033 - DNA, 404 bp, Zea mays
cgcgtccgcgaacagctccgagctgcgctcctcctccaggggcatcgacgacgactcccaggccccatcgttccggctcagcccgccgccgatcttcccaaccggcagcgtcgaacgccgccctcccccggcctctcccgtgaagatcgtccgaaagcttccgttcgggtacgtgattggccgtcagctggacgcccccgcgctacagccgccgccatctgtgacgacgctgtcaagaaatgtcaagacggtggtgatgccattgatggcttggctgcacctccggtcgaggtcgctggcgctcaagaagaaggccggccgtgctttcaaaaaggcgtgtcagcgaggcagcaggcgtgatgagcgtgaaggtgtacaagaaacactcccatccttcttcttgc

SEQ ID NO: 1034 - DNA, 661 bp, Zea mays
cttcagaggcgacagcagaacggatgtatgttgccaacatctcaactttccacatctcttattccttaccatcatttcttttttgaattcaatgtcacatactagttacaatctgttgggctcccaataaattctttcgttacatgtgtcagcagcaaacaatcttccttttcccctttcagtaacgagtcctgctgtttaaactatgctctacaattacaggcagaaggccccatcaaggatagccaggctattccacacaaagaatggacagcctgcaaactccaaaccaaaaccaagggagtctgctctgaaaccaccaggtacattagaaacgtggaccactagtaggcagtactacctggtatcaaatccaattgtccagtagctgatcaatgcttttacaatttgcgagcattccatcatctacaggtcgcacgacatctacaggaggaagccaggcgacaggaggatctttagtgaaaccccctaagaggcggtagagaaataaagattccatcatctaggatttgccatgttgatggctgatgctatgcgtctaaagcccactcggagattgtgctgaaagacaacgggtgccatgtaagggtatgtgacgtatgtcactgtaacgggttcacttgtcatcaacatgatgagc

SEQ ID NO: 1035 - DNA, 457 bp, Zea mays
tcagactatgtgaacattgccaagtcactgtctctcgaggtaaatagctgatttgaagtttgattggatttgaaatatcccttgctgtatctaccttgcatacaatacaaatctgcgtcgtcagcgtcaagatcttggctacattgaatgctctatagaccccacctattagcgggacacaccaaactggcaatttgcctgctgtgtgtgatatcgatacattcatacataacaggattcttttcgctgtttgcatgtggtcccaggatatcaagacagctgactggtcggagaacgtggccccgttttggcccgccgtgataaaatcagcgctaacatggaagggcttcacctctctgctgacgaccggtacgcaacctattactctccccccgtcttgttaaggctctgttttactgagtagggagtgcagcaaaaaaaaaaaaaaaaaaaaaaa

SEQ ID NO: 1036 - DNA, 546 bp, Zea mays
cgcactaccaccccgtgtccgcggacacttaccaagacctcgaggctggcttctccggccactcctcctcccctctgaagcccgcggcctcgccgaggcggcccggccgcatgttctgcgacccctgcgacgacggcgacgagctccacggccgccaccactacctcgacatctgcttccgctgccgtaaactcctgtccggcaacagagacatcttcatgtacaggtaaacaacaccaccaccgatctagagactagagtatccgggggggtcccttcccctagaagaagagatctccgtccgtggcatggaggaacggacgaatggttcgctgacggcggtgtggctgtttcttttttttgctatcgcagaggtgacctgccgttctgcagcgaggagtgccggcaggagcagatcgagatcgacgaggcgcgagagcagcggctgaagcagacggggcgggccgagcagcagcggcagcggcagcagaagcagagcccccagaggatccccatctgggcgtggtaggatgagaaaaattttgg

SEQ ID NO: 1037 - DNA, 352 bp, Zea mays
gggcggggagcatctcgcctacgcgccgtcaggagccgctgctgccgtggttgccgctcctgccgctgccgaggtcgaggaggaggccacgaaggaggaggatgaggacatcgccctcttcaacctcttcgactgatcgtgcaaccctacgtggaccgatcgatgccatcctcgtccttgcctgctggcgtttgcttgttgctctgattgtacattgtagtattgtattactgtagtaataaaaccatggtgctcttctcgtctatatccgggatagagcctgcgtttgatgccgatcgaaaggttttggccggatccatcttgctgatcggagattgatctgaggctgttc

SEQ ID NO: 1038 - DNA, 368 bp, Zea mays
  misc_feature (360)..(361): n is a, c, g, or t
ggattggaggaggtcgtcgtcagaggatgccgccgaggccactaaatcggaggagttggtaaacgaaggacacccaaaccaccatgcagactatcgaaccttgcagatcgcgtcttgctcaaccgtcgtcgtcgccggagtcacccgtgcctagcatgcaaccatcggcgaagatggtcgtgcctcatggggcgctgccgccatttgcatgtcgaggacgccgtcgctcacccacctcagggcccaggcgtcgccaccgctcactcgccccgacgatctgtcgccgcttgccctccggatcggggagccgctgccaccgcaactccaaatctgggaaccgtcaccgcaactctggatcgnngaaccgc

SEQ ID NO: 1039 - DNA, 486 bp, Zea mays
taacaataaacacctcacattaggagaccatccaaaaccggaatatcaaatggtaaccttataactccaagggcaataaatagaagcaatagccacgcaggaaacgtcatcatgcatagcactaagaaagatttctgtcctgaaaaaacaaagacgaggacaaaaggaagcaatttcagtccaaatcgtacagttatagctttagcttaaattgtggatttgcaattgcaataacaattagtacatatgatatgtataatagcttggtatggatagaatgctgggggcatcatcaccttcgcaagcgcgcgtctcagtggtgtcgactacccactcggcggcctcgcggaggcggcgctcgggctcgctctccggctgcccgatgggcgtgctagcgacgaggtccatgaatgcagagtttttcgcctccatggatgcggcggcagacgcggcgtcgtcggagacgccgatggcacggcacacctc

SEQ ID NO: 1040 - DNA, 444 bp, Zea mays
gatcaataccttcgatccttggtgttctggtgttaattctgctggtggaagaaggtggaggtggcactgctcgtgtgcagtgaggttctcctgtgctccgttgatttaacagtgcacctatgtggtgctctgtctgttctgattattgtccaccgtggcctggtgcctgggctccctgctgcgcggtgttcgtcttctcgggctggtgccgtggacgtctccctcggctccggcagcggctctagtatctccgtcaacctcccgccgtgcaggcccggacgtgggcggcggaattggttttctgggacagaaccttgtgttcgctgagctggtcttcccacgtagacaatctacgtgctgtgagttattcgttgcctcactttatttactgtttaattttgtgcaatctgctagtatcaaatacttgagtgtgattgcactatt

SEQ ID NO: 1041 - DNA, 282 bp, Zea mays
gcactccgccgacggcgatggccacggccacggctcggcgacggcgggcgggtgctgcgggagcaaggtcagggtccaggaggcttgacgctgatggatggcggcgcccggatccctctctcgctccatcgcggtcgcgactcgtgacccattggagcagggggtttcatgaaattctatgtactacttactcgatctccgttgattttgttctccatcttttttctttctttctgagagagactgctgcttgtacttgcacttgcacaccatgaagatgaa

SEQ ID NO: 1042 - DNA, 357 bp, Zea mays
ggatcgtcaacgtctacatcggcctccgcacctaccacgagaggaccgccaagagcgtgaggctctggacggcgctcctcaccgtcgaggtcgccttcctcgccttcttttacctcatggtagacagatggagctacatgctgaagcaaggccgcgccaccgtcgagcagctaataaggccgaccgatagccgcagaacctacccgaccacccttcggaaggagctgaccgtggtgcaggagtgagtgaatctccgaacagaaaggcgagaggtgctttcagacttgctgaagaagacggtagagtgctgctgatggtcttttgtggcttgtttgctttgagagaggtgtggagttc

SEQ ID NO: 1043 - DNA, 461 bp, Zea mays
tggccacgcttcttggggactcagtatcagctggtctgaagattgaggacaaactgatagtgaacaagcagctcagggtcctggttagcagtggggccatgagtgggaggggagatgtggcctatggaggccgcctcgaagcaataagggacaaaaattacccgattgggcggttgctttccactatcgcgttgtctgttgtggattggcacggggatctggcaattggctgcaacatccagtctcagatccccgctggaagagctagcaacttggttggccacgccaatctaagcaacaaggggactggccaagtcgggattcgtctgaacagctcggaacatcttgagatcgcactcgttgcgctcgtgccgatatttcagaacatcatgaagaagatgctgaataactcctaatctgcctagtccctcctggcgatattacataacatcatgatgaag

SEQ ID NO: 1044 - DNA, 456 bp, Zea mays
  misc_feature (450)..(450): n is a, c, g, or t
tgcaggtggaggcagatctttgttgaagctgttcacccccgttatttaccttctggctggaatattaaccacaggttgtttgcctttcatatatatcttctcttgtgcgctatgcatgctgattagttgcataattgcctgaacttcctggtgcttagaattggccaagctgtagcgaatatcgaagttatagccatgtaccagtgaccttaaaagatctttctatttgtcgtaatgtctttttgtccagatttcctttcatcaccagatatttactgttatctgtatgacctcttgtgtggttcagtggacggcgggattttggtgacttcagtgtctacaagccaccaaggaaagatcctcaatctgcaactgcaagggattaggcttacgcgggtgtcatgctgtcgttggtaccctgaggttcaacttactttccagaattggttncattcc

SEQ ID NO: 1045 - DNA, 303 bp, Zea mays
gatgacctggacatgagctccagctccaggggaagcagcacgtcccctcggaagaagtatgttatcaagatcagtgcgctgcggccgttatcagacgactctggtgctctcctctccccgtgatggcgatctggattctcagctgcagccatgtgtaaattaagggatagtggttctcttcagttacttcgtgagcagaatttttttggtttattgtacgttacaagttacatcatgttcagatttattttgtgtaataaggtgtggttgatgtaatatcttgtttatgattaggtcatggag

SEQ ID NO: 1046 - DNA, 366 bp, Zea mays
catcctcctcctcccgcttctcggccacaacatctccgtctcgctgccgacctgaacaacgactcaacgaggcacactccattgttggccatgcttgatctcctcatcctgctgcagtgctgctgccgtggaagggaggccagtgcgggaacaacccagactgcgagcgccttcgcgccgagctccgccggatgccgccgccaaacggccgagccgtgctgctctttcgcaatcccgtgtggctgctctgcacttcttgatgcatttttgttgacatggtttgcgtttcattcaaacttagaatgcttcttaatttcttttcgttgcattgaaaatatccagcggtttattggtgtttgggctaaa

SEQ ID NO: 1047 - DNA, 1301 bp, Zea mays
  misc_feature (534)..(535): n is a, c, g, or t
  misc_feature (543)..(546): n is a, c, g, or t
  misc_feature (548)..(549): n is a, c, g, or t
  misc_feature (553)..(570): n is a, c, g, or t
  misc_feature (572)..(581): n is a, c, g, or t
  misc_feature (583)..(618): n is a, c, g, or t
  misc_feature (620)..(628): n is a, c, g, or t
  misc_feature (630)..(768): n is a, c, g, or t
  misc_feature (773)..(775): n is a, c, g, or t
  misc_feature (777)..(788): n is a, c, g, or t
  misc_feature (792)..(808): n is a, c, g, or t
  misc_feature (810)..(816): n is a, c, g, or t
  misc_feature (818)..(825): n is a, c, g, or t
  misc_feature (827)..(832): n is a, c, g, or t
  misc_feature (837)..(842): n is a, c, g, or t
  misc_feature (846)..(850): n is a, c, g, or t
  misc_feature (852)..(897): n is a, c, g, or t
  misc_feature (900)..(939): n is a, c, g, or t
  misc_feature (941)..(949): n is a, c, g, or t
  misc_feature (951)..(956): n is a, c, g, or t
  misc_feature (963)..(970): n is a, c, g, or t
  misc_feature (973)..(974): n is a, c, g, or t
  misc_feature (977)..(987): n is a, c, g, or t
  misc_feature (989)..(1013): n is a, c, g, or t
  misc_feature (1015)..(1019): n is a, c, g, or t
  misc_feature (1023)..(1029): n is a, c, g, or t
  misc_feature (1032)..(1061): n is a, c, g, or t
  misc_feature (1063)..(1112): n is a, c, g, or t
  misc_feature (1114)..(1133): n is a, c, g, or t
  misc_feature (1137)..(1149): n is a, c, g, or t
  misc_feature (1151)..(1152): n is a, c, g, or t
  misc_feature (1154)..(1172): n is a, c, g, or t
  misc_feature (1174)..(1177): n is a, c, g, or t
  misc_feature (1179)..(1179): n is a, c, g, or t
  misc_feature (1181)..(1181): n is a, c, g, or t
  misc_feature (1184)..(1205): n is a, c, g, or t
  misc_feature (1207)..(1210): n is a, c, g, or t
  misc_feature (1212)..(1223): n is a, c, g, or t
  misc_feature (1225)..(1225): n is a, c, g, or t
  misc_feature (1229)..(1255): n is a, c, g, or t
  misc_feature (1257)..(1267): n is a, c, g, or t
  misc_feature (1269)..(1285): n is a, c, g, or t
  misc_feature (1288)..(1290): n is a, c, g, or t
  misc_feature (1294)..(1298): n is a, c, g, or t
cgcgccgacgccgtggccgctccttcggctcctctcggtatgtatgcttaccttcgccgtggccctggcggcttcgtcgtcccctgatgaaggtgcggtctgttgtcatcttcctgtgggttttgatttcagcgtctgctgctgccgccgcctcggactcggagcatggtgtggcgaccgcacgggagaatgctgtagcacaggtcagtggttcatcctccccccggatgaagcttcaaattgttgcagttgcagcacagacctgcccttttttttacatagctttctgttacagggtggcgatgtggagtggatccaggactacggcggccccagcgccaatacccggcacgtcccgcacccatgatgatcggcgaccgccgccgccgccgccgcatgagaccagcgggatcgggacagggacagcaggagagcaacagtgtagtcgcagcaactgtagttcgcgcgtgggctactcagcagcaatcactttttgtcttgtaaaccttttttgtttttgttttggtgcttccnntgcatgcnnnnannaaannnnnnnnnnnnnnnnnnannnnnnnnnnannnnnnnnnnnnnnnnnnnnnnnnnnnnnnnnnnnnannnnnnnnnannnnnnnnnnnnnnnnnnnnnnnnnnnnnnnnnnnnnnnnnnnnnnnnnnnnnnnnnnnnnnnnnnnnnnnnnnnnnnnnnnnnnnnnnnnnnnnnnnnnnnnnnnnnnnnnnnnnnnnnnnnnnnnnnnnnnnnnnnnaaaannncnnnnnnnnnnnnaacnnnnnnnnnnnnnnnnncnnnnnnncnnnnnnnncnnnnnncacannnnnnaccnnnnncnnnnnnnnnnnnnnnnnnnnnnnnnnnnnnnnnnnnnnnnnnnnnnccnnnnnnnnnnnnnnnnnnnnnnnnnnnnnnnnnnnnnnnnannnnnnnnnannnnnnaccaccnnnnnnnnccnnacnnnnnnnnnnnannnnnnnnnnnnnnnnnnnnnnnnnannnnncccnnnnnnncannnnnnnnnnnnnnnnnnnnnnnnnnnnnncnnnnnnnnnnnnnnnnnnnnnnnnnnnnnnnnnnnnnnnnnnnnnnnnnnannnnnnnnnnnnnnnnnnnnccannnnnnnnnnnnncnncnnnnnnnnnnnnnnnnnnncnnnnananacnnnnnnnnnnnnnnnnnnnnnncnnnnannnnnnnnnnnncnccannnnnnnnnnnnnnnnnnnnnnnnnnnannnnnnnnnnncnnnnnnnnnnnnnnnnnacnnncacnnnnnccc

SEQ ID NO: 1048 - DNA, 460 bp, Zea mays
cttcggcgctccgcgtcccgctccgccaggcagcaaccctcgtctccctctcccattcgctcctctcccgcgtcgccatcacacgtgctgctcgtggggacgccgcggcggccgcacgcgtacggcgaatcgcttccctgctgtcgtcccgtggtgcgtggggactcggctgggactacctccgccactacgccttctcctcagccaccggatgcggcctctcctgcgcagccgccgcttctcgtctcatcgccgctgccgcggaggcctcgcgcctacgttccgccactgacgctgcgcagtggatgcgcctacactacggcgacatccgcgacgccgccgcgcagctcctgaacgggcttctcctcgccttctccgaagaggtaactgacctattcactcgtggtgcctctgattcacacattgctctgtcgatttgtgatatttgttgcggtttagg

SEQ ID NO: 1049 - DNA, 361 bp, Zea mays
actctcaggatgacatgctgaatgaaaaagtagattcagaagtcatgggaaaaattgcagatgaaaaaaacaagaagaacaagggaaaaggagctgagcttgtggaaggaaccaggaaaagtaccagactggaggcaaatgaagacattaaaataacagaaaaagctatttcaagggcggcggcgaaagatgcttttctaaacaaagaaagaaactccaaaaaagatcttgctggaaagaagctcccgtctcagaaaaatggctaaagagtttttcaaccgacgttttggttgggcgccggtggacaatcgattgtgcaactaatgtttgctggtgatggatgaaagtgtaggacgtctga

SEQ ID NO: 1050 - DNA, 413 bp, Zea mays
agcagcctcgtccccctttcctacctcccttccttctctgacggtctgaccggcttgttgggaatagtcccactcctcctccccctccgactcgtcggacctgtccaagtccacgtcgtcgtcgacgagcgcctggaagaggcgcacgaggaagctcagcgatgagttcgatcgcatcgccgcggagcagcagcaccagctggtcgtggagaagaagcggaaggcgggtgcggccatgccggtgaggaagcaggattctgcacccgccgctggggcgccgacgagggcgtcgccgaagaggaaggccgccgcaccggccgttgcgccctcgtcggtggctggggcaaggaggacctcgccgaggaacaagcactgagcgtaggtcgttgtatgtgctattttgtttattgatg

SEQ ID NO: 1051 - DNA, 385 bp, Zea mays
tcgcctccatccccactcgcccaagctccattgcctccatccccactcgctcacagctctgcatcgccgggacgtgtcggcagtggatccggagccggtgacgcgatctgcagctacgaaggagagaggtaaaaggaagagggacgtctactttgacgcggtgccgcggatgtggtggccgccaatggcttgagcgcgcgggagcgagagagggcgacgagcaggccgtatgcgggagcgccagcggattgagcgagcgacagagggaggagggcctgtgggcctttgcctagcgacatcggcagtccgcctgcagccgcggattctgcctgcggctgcgtctctggctctcgccccgaccgactttttcaagggaggagcggct

SEQ ID NO: 1052 - DNA, 731 bp, Zea mays
  misc_feature (700)..(707): n is a, c, g, or t
gatgagccatccgaggtacggcggcggctacccatatccggggcagcaaggtacgtggcgcgtggcttatactgctcccaagttccagttctagctaggctagctactgcgtcgtaaccctcctcgaccagccctgctagctagctgctgccacacaagctgatgaccagagtattctgcctgtcgttcttgccaaatcaaatcaaaagggtactacaaccagggcccgtacccgtaccaccagggcccgccggtgatggcgccgccgcagtaccagtacgcgcagccgccgccgccgcctcggtcgcctggattcctcgagggctggtacgtacgtacgtagtgcacatgccggccattttggttcgttcctagctactttcacctctgggcgactgggctgcttggtcgtctggctagtttccgagaaggctgggcgccaatataatcatttcagccacgtgtcgcgcctcctgatgatttaatttgatttgatttgatttgcagcctggcggcgctgtgctgctgctgcctcctcgacgagtgctgctgcgacccctccatcgtcttcgtctcctgagtcctgcatgcggtcgagagacacccctgcgccaagaggaggggtgtgcacgccattttcttcagtccatttttccaatttcctcagcgtgcatgccacgatcatgtgtatgtaccaaannnnnnnnatgtgtgatatattgtttgtcctt

SEQ ID NO: 1053 - DNA, 352 bp, Zea mays
cattcaccacctgacattagtagtacaacgaaattgatcctctggagcaactggtgaagtaaatagcacaacaaggcagagcagaacttgctacttagcaaaggagaactaaaaaggggagaaagatacgcggagacgaaaggggcagaaaagcgggctttcacttcacctgggctgttgtcagcgcggaccagcagcctggaggcggaggcggaacgggtgctgggcatggcggtcggcaagaggcgaatgcgggagatgagaagggcaaggtgcatctgctcccgcgccgctgcgctagggttttagcgacgaggtcctgtcctgttcatctttttcctctctccctccc

SEQ ID NO: 1054 - DNA, 362 bp, Zea mays
atactttccactttgacgaagcaaaattgttaattcctcccttccagtatatagctcgctcgctcacactcggagctcgtaacaaagtcatcactcatcatcacatgagcttgcttgtgactgccagctttgcccccagtgttcatcgcccatggaagagcgggcactgttcccggtgtccgatgccagcaccacctgcagcagctctggctgtgtaccggccccaactcccctgtctcgtcatcgcagtatttggacgacaccagcggcggcgccggcagctcgagcagccggaagcggccgcgccgggagctgaagcatccaacgtaccgcggcgtgcgcatgcgtgcgtggggcaagtg

SEQ ID NO: 1055 - DNA, 356 bp, Zea mays
ggtgcatctccggctgcggcgaaccggaccatgggcgcggaccgtgtgggtcaaggtctcgagtcaggttgactcgatagataaagattctttctcttctgactcgagaccaagatcaggttgattcgagagacaaagatttttttctcctctgactcgagacaaagattctttctcctcgtccagatagtgatgtctggacgatgaaagggacagtttggtggatccatgaagtttgctaaaaaaaagtagagttatgtcgagagttatcacgagttctcgtataccgttagcctgttcgagatctcggcgaaaaagtgcattaggtgggataaagtgtgttgggtagcttgctc

SEQ ID NO: 1056 - DNA, 275 bp, Zea mays
ctagctagcctagcagagctagtagctagctgggtcgtggatcgtacacacgtgcgatcgagagtactacacgcgtgcgtacgtacccatcgatcactccatccaggcaccgcgtgcattgctgtcagctagcaatggcgccatacgcgcgcgcggtcctacgcgtgcagcacatgcagagcagcggcgcctagtagctagctccgtcgtcaccatatactcgtatgatgcatgcatgcgtcggtcgggttcgggttggccctccgatccgatct

SEQ ID NO: 1057 - DNA, 343 bp, Zea mays
gccgcggcggccgagatgccgtgcatgtgccgcctcttcgccgacccggagcttctcgccaccttcaacgtcaccagggagcagatgttcaagctccccgcccgctgcggcctgcccgtcggctgccgtaccggggcctcccacgagcctggttagtccttctctagcctagccgtagccgaccgccgttgcgtttacccacccccgagcccccatcagatgacacctgacactatgcaatgaatgcatgcagtcgtggaagcgccgccgccgcccgccccggcgcagcagcaccatcatggtgcctcgtcgaggggtgtccagttcagtagcatctggagcc

SEQ ID NO: 1058 - DNA, 643 bp, Zea mays
ggaggaggccgaggtggcgagcgtgccgccgccgcaggccgcggagaaggaggcgaggaagggggacgcgcagtccctgccgcggcagcctttggcggagagcaagaacatgagccgcgagtacggcgggcagtggctgagcagcaccacgcggcacgtccgcatctacgctgcgtacatcgacccggtgaccaacgcgttcgaccagacgcagatggacaagctgacgctcatgctcgacccccaggacgagttcgcctggaccgacgaggcctgccagatggtcttcaacgagttccaggacctcgtcgatcactacgaggtaacctctgtagttgctcccacagtcccactccaacagctccgatagtagataaaaaaaatttgaattgaatctcttgttgtctgaaattcgtacggtcatttccccccttttcatctactttagagccactcctgccaaaaaaataaaacatacggtcttggcaaaagaagtgatcggtaagaggatagctgagctcgtttctgctttgaaacagggggctgagctgtcggagtacacacttcggttgatcgggtcagaccttgagcactacatccgcaaactgctgtacgacggggtgatcaagtacaacatgaggtc

SEQ ID NO: 1059 - DNA, 626 bp, Zea mays
  misc_feature (607)..(610): n is a, c, g, or t
catttatatgctgctgcaaccactagaccggtaagcgctaatcgttttcattcttagaggatgctgtctaattatttatgttgtcatttgtgccatgttgtcttttcgtgtcccttttaggataacagagtgagtgttacctctgtactaggaggaacatctgataacaccggttcaagtatggctcgccgtctaggtaccgtttctgtttgcagttgcagtggctaattgtgctgcattcacggttagcttttagtaacagaaaggttgcaccctacatgtcccagtgctgaagactggcctgaacatagtcctggcatgcaacatcccaaaggacagccccatacttgaggtacttacaggtgggctgcatagttgcataacgatcttgttgacatatctgacactcactgtggtttcatgatctcaggctgctgcggagaggaagctggttgagaagctgaaaggtttgggctacattaaaaccccagctgtgggggctaacacttcctcggcacaatgatccgtggtgtgatctagtgagctttcggtcgacgtgtagcttcatcactacatgcagcagagagcggttgtgatttttcgcggnnnntgactgtgctacctgt

SEQ ID NO: 1060 - DNA, 535 bp, Zea mays
  misc_feature (501)..(502): n is a, c, g, or t
ggcttcaacctggctaagacgggaaattcaggcccttactcgggtaagccgttgttatctattagcactacagctattccataggttacaagaatcatgagtgcctttagctactggggtaggcgacctagcttttgttaaggatatatagcaacgttgagttttttgcaggacgagaacgttgaggtcatagtccaccacattcacggtgtcatcggatccttcatgaagaggctcgaaaaggagcacacgtcgtcaaggtggacgacttcaccggagaaaaggagggaagagttcaggagattggtttccgatgctgctaggccgttcctcctcggccgaacggagcgattcgtcgccgaggtggagctcttcctggcctcggatctcaacatggaagcctacaacaaactgcgcgtccagaggtttagggagtccagctctcatctaacgagagagcaagatgcactgcctcgtgatcggtcgcttgaggagcactanntgtatttcctgtgtaacgacacggactgtgatg

SEQ ID NO: 1061 - DNA, 272 bp, Zea mays
  misc_feature (67)..(67): n is a, c, g, or t
  misc_feature (69)..(69): n is a, c, g, or t
ctgcttgctcatcagctcgcgtataaacatgtgtctcttcccacgcggacgtagagctagctagctngntagatgtgtgtgcgtagaatagcgccagtagatcccggccaaccttaagaggaggggagacacaaacggctctggcttttttcggaagggtgtctggaactcttccggttgccgacagagagggaaggggacatatggggaggaagctgggcggcctggacagggtcctgcactgcttgtcgctctccctgctgtgaccctgc

SEQ ID NO: 1062 - DNA, 742 bp, Zea mays
  misc_feature (592)..(596): n is a, c, g, or t
  misc_feature (737)..(737): n is a, c, g, or t
aatccataataagtcaaaatccatctcaatcccacccaataccctccaatccacatggaacgaaaataaccgaacaagcccttaaatggggtttctgcttgtattcatagtttatgcattcggtatgcaggttggagacagggcattggtgtctatcgccgagaactgtaaatcgctcagagagttaacgctccagttctgtgagaggtagataataacgcatgatgcgatgtgtcttatctaacttggtatcccaatctgtatcgccctctttggtctttgctttgaaccgtgaatcttttcaatttcttattttttttcttctcagggtatccgatgcagggctatctgcaatcgcggaaaactgccctctgcataggctaaacttgtgcgggtgccacctaatcaccgataccgggctgacggcagttgccagaggatgccctgatctagtcttcctggatatgagcgtccttcgggtatgtggtttggtttctccatgaccctgcattccttacgcgaaaactgtccgaaattcgagtgaacagaaagagtcctcactgtttcactttgagtacattctctatcctgnnnnnggataggataaactttttgttttgtcatcttgcttcgacatactatactacacatgcatgcagatcgtaggtgacatagcgcttgcggagataggcgacggctgtccgaagctgagagagatcgcgctctcccactgcccngaggt

SEQ ID NO: 1063 - DNA, 410 bp, Zea mays
cgcagtgccggagcgtcgtcgtggtaggcgccgccgccggccagggtgtgcataaggcgctcgccatgttagattgctcgctgtagtcgtcgatcgagcctcttcgttccgttaggctgatcactgcacatatatacatcttcttctttcatggacgttgtttgttactactagtatagtagtatactatgccatttctttgttttctgctcatcgtcttcgtgtataccgttccattgttacctttttttgggttaggttaacccagttccttccgcccggggaagaagacacgtcagattctccggttctctgtaagctgtgtaattctaggtttctaccgtacgtatggagttttaggtattattttcttaggctaggatagttttgaaagaaacaataatagagag

SEQ ID NO: 1064 - DNA, 402 bp, Zea mays
gagacgaggacgcgggacctgtcggcggccactttgcgctcaactacgggggcggcgggcagtatcgcatctcagatttcgctttccgcggcggcgaaggagacggaggcgacgtcctcgtgggccagcgccagggacccctgtcctcccacgacgaacccattctcgaaaccctaggccgctcattcgactccgacggaggtctcagccaattctacccccacctctttcctgcatcgcaactcgtcgaggacacctccggggaggaggaggaggaggaggagatgatttcccgaaatgctctgggcggcgtagggtcggaattcgagcggggggcggtcgatgaggagactgccgacgacgacgaggacgggatcgtgctcatgctgaacgggtttaccc

SEQ ID NO: 1065 - DNA, 453 bp, Zea mays
atcgattcgtaaaaccaattgtttaagcgaaatagtttatgaatgaatacaggaagccaagcggtaacataaacttccatttcaaatgctaaaccagaggtggtattcggtattcattgagtcaccaatcatccagtgatggtatatcctaaattgatatatatggaaggtaatcgttcttggcatatgatgttcaccattttttaggtcattggttttcttttacaccatggttttcaggtcattggtacattttattacaagaaaatcgtgaagactgaagaacaaaatctatgtattggtccatccttggaaccttcctcactcaaatacttggagctaactggtagctagttcagacttcagatcagggaaaatggagtagggaaacaagaaactgcaacataatttttttgtggcctgattcccacgaagtacattagcaaaggacac

SEQ ID NO: 1066 - DNA, 411 bp, Zea mays
cagcagtgaggaaggcgccgaatatcctgagcttaactccggaaagggttcataaaaagttggattttctaatgggtgttgttgggttgcagatggcagtcattgtgtatcggccagtgctgctattgcatagtgtggagcgtcggttgttgccgcggtattacttgatgaaatttctcaagaacaggggattgatgagttctagtttaagcttcctaactattgcatcgatgggcaatgataatcttctggataaacttgtgcaccctcacgagatgagtgtcccaggtcttgctgctgcttatgcttctagctgcgctggaaaacaccagtgggagctccttgacgacatgacaaagggaaagagaaagagaaagtgctaagacatgttctggtaactagtgctgtgaa

SEQ ID NO: 1067 - DNA, 382 bp, Zea mays
cgtgcgtgtaccctaaactcttccccctcttcctcctccccctcgcctccgtccccatcccgattgcatggtccatttggttgcacggaacggcgtctcctccatcggtccgaccaccgcgcgggcggcaacaccgacttttgcatcggtttccccagatcctggatgacaagcttagccccaagtgtttggatgtgctgctgctgccatcaactgccgtgatgtatttctttagctcgttcaggagtgtgtggggtgctaataactgatgttatatttctgtagcgcggccagaaacagtacaacaggcgctcgtatattaggcctgtgggagctgtctggccaggcaaatttgtcaggtcttgatctaaataggccctca

SEQ ID NO: 1068 - DNA, 537 bp, Zea mays
gtcattttcgtagttgcagctcggaggagatgatggatgctataaacttggattaacttgttggatctgactacgcaggttcaagctaaggacaacaggttcacacttcttgcacgagctgggaggcaggttaggtttcttctggtgaccgcaatgatttgttttgttttcagaggagtttcattgtactgctgtcgggccttggctggttcggttccgattcctactaaatagaattatatggattgtaattccttcttattacttggcaggtccaggaagtgtatttgaccacttccctagaccaggagggcataaagaaagccgtgcaaagagtgctggggcgtgttccttgaacccgacacgcagcgtgtagaaaccgattttctaactaaagcattacaaggaatcaacggtacgagcgaacagcctgaaacatttgccactgtcagtctgtcacaacatccggctagatttttctctgttggatactacaacaaccaaaaatctgtaaatatttgcagtcctacacgagta

SEQ ID NO: 1069 - DNA, 801 bp, Zea mays
tagtcttggatactacatttttctactgatctatggttgtccaaacttattaccatttcatagaagtgcatctgatttttttttaaaaaaaaaattgaggttacatttaatttgtgtccttttgttactgattaaagctcattgttgtagaggcactggaccttctccaagatccaatcatattgctacactgtatgatgatagggtccttttaatttttggaggccactcaaaatctaagacacttaatgacttgtattctttggatttcgatacagtaagtttgtgggcatccttgtttcagtatacctcagtacattttgcatttagcaggctactcattagtgttttcttcctgacagatggtttggtcaagagtgaagacccatggtcctcacccatcacctcgagctggttgcagcggaactctctgtggaactaagtggtacatagctggcggcgcaagcaagaaaaaacgtaagtctcaagctctctctcaatttggaagatgagttggtgatttatttcttaatgaagaatacatgtattgctaatgatgaccatctagcttcttttgcaatttctaacaagaaatcaaattctcaggacatgctgaaacttgggtttttgatgttctacaatgtaaatggtctgtttgtgtagtgccccctagttcatcgattactacaaaaaaagtaagtgtttttttttctttctgactctcatatttagttttgatagtatctcgtactcgctactttccattctacaccactttcatctaattagccagaaaactaa

SEQ ID NO: 1070 - DNA, 381 bp, Zea mays
cttcacatgagccccctgaaagggaaattggcttaatcatttcctataatcgattttggtgtttgacgtccatcacaaaccacgtggactaactagtttgcctagttgtcatttatcttaggtgcacaaagttcaacataaactgacaaagaaatggagttggggaactcaacaaagtttggagtaaagacaagcattggtgctaccagtggcgcaccggacattgtccggtgcccaggccaaggcacccatgaactggccgctctcgagtttttcctagagtcactccgctataattcaccggactgtccggtgtgcaccagacatgaacggtgagccaacggagcaacggtcaactgcgcccaacggtcgactgcgatg

SEQ ID NO: 1071 - DNA, 280 bp, Zea mays
  misc_feature (238)..(243): n is a, c, g, or t
  misc_feature (267)..(270): n is a, c, g, or t
ttttgagcttcccccaaacgattagatgacaatgagagaatcaccaacctctcagcacttgtattatagtcctccacctctacttctgaactaggatcaccaaccaagtaaggaacgaagcacagcagcgagctcaaacgatgaatcgctctgtaattttgtaatccgtcatgccaagaagctggaaaaaaaaggaagcttactccttcacggtctagaagccggctttgcggccccnnnnnncgactcctgcggcaggggaggggnnnngggagtggaa

SEQ ID NO: 1072 - DNA, 557 bp, Zea mays
cgttggcacagtcacgtcaatcgatgaacatcattcagaaacattacccagggctgatagcagccgcgatccttttcgaccctccaaagatctttgaatccttttggaaggtacggtgttccatagtgcaattctgtttctaagtttaacagcaggtttactagttctggcatcggttgtcaagcatcctgaactttaagccatggactttgtctgaaccagtacaagcttggtcctgtagaaattgtgacatgccatttcattaactgcagtgtcaatgtataatgcttaaacctccttttttttagatgctaagttacttcatcgagccggagctggaaaagaaggtgaaattcgtgtacactgacaatcctgagagccagaggataatggccgacatgtttgacatggagaagctggagtccgcatttggtggccgcagcgcgtctggcatcgacgttgccaagtattccgagagaatgcgaacaggagatcagattaggggtcttcgctaacggcaaatggaatactgctatctcacagttcgtcaagaaact

SEQ ID NO: 1073 - DNA, 482 bp, Zea mays
catttctggtgggaaggctagtagtaaaagacagatccgcagtagggatgctttgccgactgaattggagttccacacgtccgtgtctgtgaaatatttactattatcagctttcctggctttcaaggagcccagctacgcttgatgcagctttgttcgattcaactggagggtcagatagccataggcgtaagagaaagtatgccacctaatctcatctcctgacttgccaacagtctaattatcttattagaatattagatgcttacatcgttgttccttgatgtaggagttctcaggtgttgacgaatatgaaggacaccatggccgaagagatgcttttgaaaggccctggcacatttcctcttgagaggctcttggctatattttagtgtatcacgtcagtgtcataagaagatctcggtgatgttgaatgtcctgatagtatgatgaatgaaagtcgaataactggtttgatgtca

SEQ ID NO: 1074 - DNA, 413 bp, Zea mays
aagagcaggagccgctattcccctctcctcaaagtcgtttcgtggctgctgtctccgacgacgccgatgacgccgagcggcggcggcgaaccacgatcgtgcccgtgaagttggagcccggtggccccggccggcggcaaacgaacgcgaaaaggctggtggtcgttttcgcgtctctgcgggcgtgttcttgggctccgaggattaacgacgggaaggtggctgcaggccgtgctcccggcaataaggcggatctgttctattatcgacccattcccatggggcggaggtgccgggttcagcatctggaggagtctccttacgttgcaagtagtgacctgtcgtcgctgctcaaccttgaacagatgtgagaggtgcatggtccgggaatagccatgcacaaacttcaatat

SEQ ID NO: 1075 - DNA, 397 bp, Zea mays
tgtgggtcttgtcggcaatttggatttgcatcacaagattgcggtcccaatgttcttcttggcaatggactcgactcaaaattttgactctgatgctctggctggaacagtgttcaggccacagttgccagctaatgcgacgttctcgtctatttatacagctcaagcacctgctgttttccctgtgaaagttatgaatgagattgatttcataaaggtgattcggctaatgtccataggagacccacttctgatggagttggtttaaaggtgtaatgtgtagttgaagtgcaagcttatccttgtggccatgaggacagagtagaaaaggcatagttttgtgttttctggtgtttttgtaatttcatttattttgttcattctgtagctgtttatt

SEQ ID NO: 1076 - DNA, 341 bp, Zea mays
gatgcaccgaaaaaccggtggtaccacacatgccggacggcgagaagacgaccgaggcaacggccaaggatgccggcggcggcagccagccgaaaccaccgtctcgccgcggtagcgcccgcttcgagcgcctcctctctggactgggcgctggtccgctcgtggacgtcgagcccgacaaggttaaggacgagatccggcgatgggccaagaaggtggcggctctggtgcgccagctcagcttcggcgcctgggcggagaagagcgacggcggctcgtcggagaaccacggcgcaggcgatgatggatacgagagctgggcacctagactgcagataact

SEQ ID NO: 1077 - DNA, 287 bp, Zea mays
ctcaacatgtggctaaaaatcagctgcatcagaaatattaagcaaatcagacatgcgggcctatcaacttatttctggtataaaaaactgagatccttaaaaaagaataaaatattttacttttgttgcagcctgctggactggaccccgttgtgttcttccgatgatcaatcagtcaatcacaaattcaaaccatacaaatcaagtatgtttttattttatattacggtgaaatgatactagaatttcactgacatgttacacaatttttcttagctcaatatcca

SEQ ID NO: 1078 - DNA, 774 bp, Zea mays
  misc_feature (44)..(45): n is a, c, g, or t
gagcggttgacacgagtatttacccagaaaattcatgatcttannggaacgcatacagatgtccctgctcctgacatggggaccaatgcacaagtaggcctaacattgcttttgttatttttttttgtatgctcagctatcttgtttttcattggtaccttttatgcaattgtgacagaccatggcatggatgctggatgagtactcgaaatttcatggtcactccccagcagtcgtcactgggaagccaatagtaagtgaaaaaatgtggcagcaagttaaattggtgccaataaacttttttacaaagtataatataacagaaaaaatgtacacaatagttattatcatttttactcttttttgtttgttgttgtaggatcttggcggatcactgggcagggatgcagcaacagggcgaggcgtaatgtatgctaccgaggccctactcgctgaatatggaaaatgcatttctggatcaacttttgtgatccaagtgagtgatagtttattcacatatgtccatcgaatgtacttttataagatgataaaaggataaccacatgttccctatagcaggttacctactgaaatattagttctttttttaaaaactctatatttgttatatttgctatcgtgtcagtatgcaatatatatggtttaatatgtaaaccttgcagggttttggcaatgttggttcatgggctgctcgacttattcacgagaaaggtggtaagattattgcaattggggatgtgacaggttcaatta

SEQ ID NO: 1079 - DNA, 396 bp, Zea mays
ctaagttttttccctcaaccgcaggaggtggggggcaattgcagttaccaaactatttcacgtttccaagccctcatgcaacggatccaaggttatgtgtctgacatggagagtaaatacctggataaggaaaagacttgcagggacactcaacatgaggtggagtgcattaagaatatggtgatggaaaaggatcaacaaattgaagctactgtcaatgctatacgacaggaacttttagaaaggagtgttgtaatgcgaacattggaagcagacaaggatcaattgagccgcagtgttcaacaatacgataagttactcaagaagtctttagctaaatttcaggagtatatgaatatggtaacacgtggggaaggtgttgactcgtatttggag

SEQ ID NO: 1080 - DNA, 384 bp, Zea mays
cctacgccatgtcgtcggagacgtcgcacgacaggcagcggttcgcggcgaggggcgacatcgagaacaatcgcctcttctcgacgccgcgcatggacaagtacctggagcaggccaagaagttcgacgaggacccggcggcgccgctgccttcggcggacaaggacgaggaagaggaggtcgccgccaacccgctcgcgccattggtcggccccatcaccttctacatccgggccgccgtcgaggcgctgcaggccatcgagaagctcatcaacaagggagccaattaatgcgatgtaatgaacgggcacgcagtcagatccagtcctgttttgtttacatggccatggccatccatcgtcatcccttcttctctctgctata

SEQ ID NO: 1081 - DNA, 612 bp, Zea mays
  misc_feature (406)..(406): n is a, c, g, or t
  misc_feature (465)..(466): n is a, c, g, or t
  misc_feature (521)..(521): n is a, c, g, or t
  misc_feature (562)..(564): n is a, c, g, or t
  misc_feature (591)..(592): n is a, c, g, or t
acagcttgagctattctgccttcttggaagctcgccaatgggagtctgttcagagacaggagcggctccgcaggaggatcgcatacggtcgttcccagtgaaggatcgtctccctgaggccgaacttggtcttcccagatacgaccacaatgtgttttgtgtatatacaggtacggcccttttgtgtggcaaacactgccacagcagcgaaaggaacgctgatccaagttgctgcgtggagatgtattcctagacagctaacctgcttttgctgtatggagctgccttgaggagacaggagtacattagctgtagcatgtagtaacctcaccttttgggaacagtactttgtgtggggttactgtcaaataccgtaaactggaggtgccagtaaccccacacaacnaagtactgttcccaaaaggtgaggttactacatgctacagctaatgtactctgtctccnnaggcaactccatacagcaaaagcaagttagctgtctaggaatacgtctccgcagnacttggatcacgttcctttcgctgcctgtggcagtgtttgnnnacaaaagggccgtacctgtatatgacnnaaacacattgtggtcatatc

SEQ ID NO: 1082 - DNA, 392 bp, Zea mays
tgcggacgctgaagatgaaaaggaagacgaagaggcagagacacacgaggcggcggccgtcgagatagcagaggagagcaataccaatgttggtgtcgacgagcctgagggttcggagatattggctgaagaaaacgaacacacctcaccggccctgactgcagttgctggcgccgcctccgacgttgtggacgcgaggaagttgatgcagatggtggcgacgctgtgcgagcagagcgcgcagcagtgcgcgttgatcgaagtgctggccgagcgtgtggacatgctggagcgtaccgtgcggcggatgcaagacgccgacagcgccggcggcggccagccaagaagctgagcacggagggcaactgaaggagcaacagcaagctttacag

SEQ ID NO: 1083 - DNA, 445 bp, Zea mays
ctggggcacgcccatggtgctgccttatccttcgcatcagctgttctggggcgtccctttgccctcacggccaaccgctcagccgtgccctgcaacgccaccgccgggatggagcgtacctacgccgccgccgtcttacccagcgccattctgtggcgcgccagtaatgctgccgccactgccacggcatgtggcctggcgatcaccacctcccctcctgctgaaacggccaccaccgcatttgcaggggaagccgctgcccgcgctgcttccaagtccaacaccaccacctcccacgctgcagcactatccaccgcacttcggcgggcagcatccacctcctgatccaccggtcatgcagctgcagcagtgcagcggccgctgtcgcattgacagggccagtaggcagtagccacctcctgcgcttcttcagattgaggaattt

SEQ ID NO: 1084 - DNA, 773 bp, Zea mays
ataccttataaacttctctcaggtattctcccagtttcatacaagctatgtaatttgatttctgccttgattcagccttccaactccagctgcaaattgaaaagcgtccagccaatgatatgtgtagcctttcaactccagccgataacttaagaagtcattgccctaaaatgctgatatagaactagcagtttggccatatttgtctgacaatggagaatcgctttgttctgttactctgtgaaaacagtttgacacttggtcgctaaggtccgctaaatctttgttgattgtttcactgttatctgctacggtagtttagaggatttccatttcctccaaatctaaccttgctacaagtatgatctgctaataggctttttaccgccctttggtcactgtatacttttcaatgcaggtggatgtaattagaacaaagttcgaggataacatcaaagatctctatattttgcattcgaaatcttcaaaatatacggagcttggcctttcccgtttctgggggtatctgaactacaatgagtatcattctacgaaagtcagcaaagatatggacaacttctatttttgataggacattgcaagactgaagtaaggtttgcctttatatttgggcaatagctcactggccaccgggactagcttaccttttgaggtacacactgctgagtggtgagagttcttgtagatatacgctggtttgatcaaattggcccttgtattggtttttggcgaacttaagagaactatgtcag

SEQ ID NO: 1085 - DNA, 594 bp, Zea mays
tgtaaggagactcattgtgaaccaagttctgccaccttcaacatcggactgtaaattctgttctataaaaagaaaggtacaaatgatatggcaccgacagtttaaattttcagttaatacctggttcttgtaaaaaccactagcctgcagctgcaggaaaagttatgtatctcattttcttcacacaggatcaaacgcgtgcattggatatgatacggactgacccagagttaaaaggtttgaacattatccaagcacctcttgtggacatggagattagaggtgttccggctctcaattttttgggtgatatactgtggaagtaacttcagttatgggaaacaggatcgcttataagggtgcttaattggccaatatcactgttagcctgctgcacaattgcactgctctgcaactagcaatctgtgggctcttctggttgtttccagctaacaattgcacaataagcttaagttgtttccagctacaatacagcacaacacattctccatggtgcgttaaatctgagtagaaagcaccaaattggagggttttgctgcactcctgcactagcatttgatgacctgttactct

SEQ ID NO: 1086 - DNA, 685 bp, Zea mays
gctctgtacagaagagtgaaccaaatcgaagccctgcggtgctactccaagcctgaaggctcaatgtttatgatggttagtcagagatacacaaaaattcagtatttgaaactttgttacttcccaacataaaggtgttggtattcacaaaaccctgcaggttgagatcaacacttcaattctacatggcgtcgccaacgacatggactttgctcgtgagttgatcaaagaagaatgtgtcctggttctacctggtacagctcactcactccatttgttgcgatattattttatccaacctttaacaggtgcattggtttctctggctgctgagaactgaatgttagtaataggttgacttgacattccagtacaagattcttcatgctggcatgattttaatctactctaaaattgatctgtagtaacagatccaatatcctttttgtttcttgttattttacaggttctgtcattgggttgaagaactgggttaggatatttttcggagcacctgttagtttaatactagaagcttgcgacaggattgagatgttctgccgaaggaggacgctcaagcaaaacaactgaagagctgaaaatgttttgaaaccaggaagtagggtttttgttagcccagtaacatatatatacagcttcgatttattttccaatgcacattctg

SEQ ID NO: 1087 - DNA, 475 bp, Zea mays
ctgttgctcgccgtcctcgccagccaccgccagcctgcggcggccgtcgtcacgctgtcgacgtcgtcgcggtggatcgtggacccggccgggcaccgggtgaagctggcctgcgtcaactggccgtcgcacctggagtccgtggtgaccgaggggctcggcaggcagcccgtgggcgccatctccgggatgatcgtctccatggggttcaactgcgtccgcctcacgtaccccatcgcgctggtgaccaacgcctctctgtcggtgctcaccgtgcgccagtccctcctggccaacggcctcgccgagacggtcggcggcgtcgaggtcaacaaccccagcttccttgacctcacgctcatcgagtcgctcaaggcaatgcgtgcacgctagctctaaaccagccatctcctaccttcctgagagaaggagctagtcctgttcgtttcgataatcttcaagcaataatgcctgc

SEQ ID NO: 1088 - DNA, 301 bp, Zea mays
  misc_feature (298)..(298): n is a, c, g, or t
tttgcttggacacactgatatcgctgatgttggactcaccctccaatcagatggtatggtttacttttttacctaaatatatcttccaaagtcttgtatatgcggcatttgattttttttaccaaattaagatgagtatacaggtgctgagtgtaggaccacctttttgaaaataatctaagtaaatatcgctaatatgattggaatatctttgtctttgggtgttactgttgttcagtagattggttgattttctttcaaaacattgtttgcatgggccaagacttacgaaaatagncgg

SEQ ID NO: 1089 - DNA, 650 bp, Zea mays
  misc_feature (341)..(341): n is a, c, g, or t
  misc_feature (639)..(644): n is a, c, g, or t
tcttcaaggaattctacacgaaaagccatttttgtctaaacacgactagttattactagtagtatatccgttcttcaaggaattctacacgaaaaaggtagtagcaccgttccttacatacagaaccacaagaagaaaccaccatcgcactcatttcgcgtcacgtcacgtcacgtcacgtgtagcattctccggcggcacccagtgctcgatgaggcgaagcatatgaggaagatggaggatttctaaactctccgccagagggcgatcagagatgcagcgaccatggctatccacgcccttctgtccagcatcgccgacgaagctgctgccccggatgncctgcaccgcacaaacagaatttaccactcgcacgaaccatggatcaccacaagcgaggaggcatacgcatcgcatgcaagggagaaagatttgcagtggacaaagaacttgcacgatctggtggtttcacttactcagacgccaagaacttgcatgatccaaaacctgccaagaaaacgaagagcatcacatcacagcactggacaatgctgccggtgaccaaaaccagcagtgaatgacaggatgggggatggaaacggtccgtacttgggtcccgcttgacgagggctccagcgnnnnnnaagtgc

SEQ ID NO: 1090 - DNA, 155 bp, Zea mays
cccaattgaatatatgccaactttgatttccgcatggaaaataatgtacgctttcgccctccatcatgtctactgttctagaatgcttcgattaggtttattataagatgcacatggtccaattctctagtcatttctgttcgttatttgtcttg

SEQ ID NO: 1091 - DNA, 991 bp, Zea mays
  misc_feature (981)..(987): n is a, c, g, or t
gtcctggaccgagagtcaaaacaatctcttcgagcgtgcgctggcagtatatgacaaggacacaccagaccgctggcacaacgttgcgcgggcagtcggctgcggcaagacagccgaggacgtgaagaggcactacaagtacctgaagacggacgtgaagcacatcgaaaccgaagaaggcggccgaggatcccagtccagcagccctgctggtgctggtgctggtggcagtggaagcagcagcagcagttcttggggcagggacaacggtgacaagaggtagtagagtgtaatgcattgctctctctagcatctatctctgctcgatctataagccatggcattacatcgtagtacatcctcttactgtgctgtctagcacgctagcctttggtacgtgcagtataactgttgcttctgttttcttgatgtattcgttactcacttactcttcgttccattgtccacctggactatctttctagatccctctaatcttcagcatgccttttttctagcttgttccttctgttccccccttcactcgccttttaaactgtgtgcatgcatgggcttgactattgactatcattgtcatatgctttcacatataaaacccccaccatataaaaccctattaattaccttaagaccttattcggttgtactagatcaaaagggattaaggacgagtaaatatatttttattcaattttaactagcaagagatttaatccccttcaatctattcctaataaccgaacaaagctctagaggcgttgtgcttatgacatgttataggtggggggctctttaattttaactagtggtttcttctgttgtgttgcatgagagtgcatataccgaaactagctttcacatctttgcaatattcggccaagggatagcagtgacccgtcgttgtggttccttgtttcaggatgacgaggcaccccaaccagccgcagtgaagtggatgtnnnnnnnagag

SEQ ID NO: 1092 - DNA, 397 bp, Zea mays
ttagtccctaacatgtttggttctagggattaaaattagtaagaatatactaaatgactcataagaagactagtgcaattgaactaaatgagaggtaaatgtggaattaatatggtttaatcccttttagccacatcttgagggactagggactaaaatagtttagtccctgttttaatcctaccgtttgacaatttaggactaaatatgactaaaatggagagattaatctttagtccctcaaaccaaacgggacctaaattgctcgcgccccgctagcaaattaggaagcaaatatattttttccttcctttctttagatgcgaaggatgacattatggtgtgcttagccagttagcctacatcaaagagatgtctctcgtcaagaacagttagc

SEQ ID NO: 1093 - DNA, 780 bp, Zea mays
tttcctttaggaatttggtacctataacaaagaggtgtccagtgaactttgatgcacattaatgatttttgtatctacttgattttgagtcacgcactcacgcacctgcacaaacgcatgccagttctgtccaacacaggcaggatttgggctgaacatatatgctgaatcaccgatcgctttggctacgtactctgcgctttcaggtgcgtttggtgcggatcacagaaatggtccatgacgcatactattctcgactatatctcgcaaaggtaactgcactcccaagtaaattatgccgcaaaaacaatccttttagcttatattggtctgaaaaaagaaagcatggcaacatgacaccaggttgggaatgaccaagacactatcagtttcgacctcaagccatcggatgctatcaacattgctttccgctgcaaggtatgcatttgcttcttgcattttccagtacagaggacaatatttgtgtgtcgaccggaccacacctattggctatttctattgctgatactgaaggcataacttgtatcttcttggcctagtcaccatgtaaattatatatatttcatatcatcatatgactataaactaaaccattcaattggagaatcaaagcaacggatataaccccgtttggacgtagatattgtagcacagaattagtaattggaatcagctttcctaaattctgttgtttggttgcatgtgaaattgagatttagaatcagagctcaattccctggaattgtactataactagaa

SEQ ID NO: 1094 - DNA, 544 bp, Zea mays
caggcggcggcggccggcctcacggtgtgccgcacctgggccttcaacgacggcggctggagggcgcttcagaagtcgccgtctgtctacgaccaggatgtcttcaaggtagtaattaattataagataatatatatactatacatgcatggttgtggagcctgcgtggccacgatcgaagcctactacgattttcgcgcgaaaaatcgcagcatttatttgaaaccggccggccttaagtgagatgcaatgcaaggatacatgcttgcttagcttattaatggagatttgatttgtttatgcatggacgcacgtacacgacgaagctaggcgctggatttcgtggtgagcgaggcgaggaagtacaggatcaggcttatactgtcactgatcaacaactgggacagctacggcggcaaggcgcagtacgtcaaatgggccggggacgacgccgccgccgacggcggccgcctcaacatcaccgcctccgatgacgatgacttcttttccgaccaaaccgtgaaggtctacttcaagaaccacg

SEQ ID NO: 1095 - DNA, 344 bp, Zea mays
atgtttaaccttcaatacagtgcttatttatatccaacacaccgcccaatcggcaactacttattagcatcatacaatggtgatatcaccccccatgtttgccgccaaccgacccaaaaatcctctgcatagctaaacaaggaaaaatggtgctgttcgtcccatgtctaaacaaaggggactgaggtttatgatccatccgagacaacagatgaaaaaatgatttgttccgggaacaaaggccatcaaagattgtacatcggctacatgggacgatctcaatcttcttcctcacgaatcagcgcaaaggagaatggggcgaacttgtaaccatcaccttcata

SEQ ID NO: 1096 - DNA, 421 bp, Zea mays
atttgcctgatttagacacaatatgtcaatgatggtaataatttgtatggtaaatacaatgtttaccatggtgaataaaatcagttcagatggttagtgttgttgtcaagcacatgttccttgaatatcaacgttactagtcagtacatgtcaaccataagtttgatgctgacaatagggtcacggctcgtgggaaatggcaagggggcactttttttcgttttacatgttccctttcatctctttttgtgtcaggacaacataaaacatatagcaaatttctggtccatacaatattcgctgttatttagtgcaaagcttgttacagcataatgttatcttgctgacaatctaaactgaatggtccaagattctcaaactgcattaattttttcagagctggtgactggtgagtttaaca

SEQ ID NO: 1097 - DNA, 398 bp, Zea mays
  misc_feature (374)..(389): n is a, c, g, or t
tatctgcaagcaatagcatcaagatcgctgaactgcatgaaggctgtatgcaaaccatgatgaacacaccacgcccagctgcgcgaatcaaccaatgcggacataggtgggcaacatgggcccggcggcgctcatgccagctgccaacaggccgtccccggcggcctcctgctccgtgaggaagaggtcgtcggtggtcctgagcgcggcgtgcgcgctgaccagcgcacccccgatcatgacggagcccaccacgttccagccgacgctggtgaagagcatggcgatgacggtgaccccgcagagcgcggcgagcacggagccgtcgtcgaactccatccccaggaccctgagcggctgcccgccctgcgcgnnnnnnnnnnnnnnnnggaagaacc

SEQ ID NO: 1098 - DNA, 473 bp, Zea mays
cccgagaatgcgaggccgccacggagaccaggtccaattctagaaagaaaacaatgtcgttatacctccaactccaaccagtacgtcatgctacaccactctctgttggttcgtatcgtgggtttgtgcaacgcggaggagacgggcggacatccagtcggacacgtacgtgctgatggaacccggcatggacgaggcgttcgtgtccagagaggagctagagcctagaggagagcctcacaagaactggcccgtggacaccctatccctggacctcgccaggttcggcatggtcgacgaggccgtctcgtacctcgtcaggtccgtgtgtgtgctcgagatcgatggagacgttgggtccgtggagtggtaccaggtccagttggactagaacggaagggcaccaccaggcgtggagcctgcggcttaatttgactcaacacggggaaacttaccaggtccagttggactag

SEQ ID NO: 1099 - DNA, 1138 bp, Zea mays
ttatgaagcagaaggggatgccacattctgtaaaagggattattctcatgcattggatctctatactatggtaattttttctgtcacacatctcaatagacgtgagaggaacttctgtttgctgacaaaaagctcactttctgacgtccactgtagcagatcgtcctgatcaatcaataaagtagtgttaagttaccttaacatatggtcgttaccttttatttcattttaatgagcataacatccatataagttccaagaaagcaaaactggtcgtatatccttcagcatggggtcatcaccaactgttttgccttcttgtccttctttgttaaggattaacatgatctttggtttagtaaacttaaatcattaaatggatgcaggcaatggaaattgatcctgataattcaaccttgtatgcaaagaggagcctttgctttctgtacacaggctatgaaggaaaggctttggaggatgctactacctacagagatatgcaaccagctcttgctctggtcaaggtggggagtgatacaaatagcataatctctgtcatgttccatggttatttattcgctctgttgtctttaggagtattgcatgacatgcgaagcactcttgcctggcttgaactcggattttttaagcaaaccaactgacgaagcgttcgggtaacctacacttgattgcttctattctttgattgaatatttatttgctaaaatatattgttcaaatacggatatggaaagaaagtttgtcatatattagtaccctaataatatatgattggccaatgttgaaaatctttatttttcaattatgttaggagaaatagctaatcaggaagttaacacttaaggctttgttcggttattcccattacacatggattgaatgagattgtaaaaaattaagtagtttgacttgcttgtgatttaaatccacccaatcccacttaatccatatggattgagagctaaccgaattaccgaacaagccaataaagagtttgtctgcgtgcttaacttgtgctctaagtttccaccatatttgcagggaaggacaatccgtgaagaaaggttattagtgtacagggaagaaagaaggttgttactgcacaggaaaaacagag

SEQ ID NO: 1100 - DNA, 396 bp, Zea mays
  misc_feature (386)..(387): n is a, c, g, or t
gagcatcggaaccctgacctaaagctatttagcggcgtcgctcctctgcggggcgacacgtgcggaaccagcgccgccgccgcaagagttggcctggcccgcctcgctctttacaacatcgccttcgcctgagcacgcggccggaggcccgcgtcggtgcgaggatggcggcggcgaggtctctcagcttttctcgcccgttctcttaagcgtacttgcctcgtgcctgcgccagctaggacggttcccttccctggagaagctgacatcgtcgtcgctgtcgctggcggggaggttgtctggccggacgggggccccgcggcggcgccggcctcgatctggtgcgctatggccggatccgtggtgtgttgtggtgtgggtggagnntcatttgtg

SEQ ID NO: 1101 - DNA, 414 bp, Zea mays
gctgccgccgcagtcgagcgagaaggcgagcggagaccatcaacgagatgaccagcaggatggcaaggcgcaggccgaccacaggcacagggagatggtcgctcgcgaggccgcgcgcaggatcgaggcggcgcgggcgagggtggcggaggccaaggccaaggcggagcgggagaggaagtgcgagcactggaaggagcgcgccgtggaggagggcctcaggttggcggaggcggtcaataacaagaaggaggtgatcgccacggccgtcgccgccttcacacttggcgtcttcgtctccagtaggctcttctccaggacttaatcaacccatgcgtaatcatggagcagacaatttcacgtatgtgtgagcatgagaacatgagcagcatcgccaggttatattgattcgta

SEQ ID NO: 1102 - DNA, 641 bp, Zea mays
gtgtggcacaatgtcccagctagtagtcctttcaggttgctgattaacgtaggagacttcgtggaggtaccctacagttccatagtactacttagggggtgtttggttctgtggactaaagtttagcccgggtcatatcaagcgtttgactttcaaataggagtatgaaatatagacccaaccaactgtactagattcgtctcactttttaattttcggctgagaaattagttttataatccgactacatttaataccccgaacggaggttcaaacattcgatgtgatagaggctaaattttagcaggggcaaaccaaacacccccttatacactgtgacatctgtcatgaattgcatatttcagcaggctgtcggtttgacgaccttgacggacgcagataattagcaacggggtcttgaggagcccggtgcacaggggcggtgagcaacgcggagaaggagaggatctcgttggccatgttccacggcctggatcccgacgaagagattgagccggcgcccgctgctcttttaagcgagaaccagccggcgcggtacaggacactgaaggccaaggagtacctgctggccgggttctatgaacattttttttgtagattcatcgagtctgtgaagatcc

SEQ ID NO: 1103 - DNA, 641 bp, Zea mays
  misc_feature (168)..(177): n is a, c, g, or t
  misc_feature (181)..(182): n is a, c, g, or t
  misc_feature (184)..(185): n is a, c, g, or t
  misc_feature (188)..(194): n is a, c, g, or t
  misc_feature (196)..(201): n is a, c, g, or t
  misc_feature (204)..(205): n is a, c, g, or t
  misc_feature (207)..(230): n is a, c, g, or t
  misc_feature (233)..(233): n is a, c, g, or t
  misc_feature (235)..(237): n is a, c, g, or t
  misc_feature (239)..(257): n is a, c, g, or t
  misc_feature (260)..(265): n is a, c, g, or t
  misc_feature (267)..(276): n is a, c, g, or t
  misc_feature (278)..(287): n is a, c, g, or t
  misc_feature (289)..(292): n is a, c, g, or t
  misc_feature (294)..(304): n is a, c, g, or t
  misc_feature (308)..(310): n is a, c, g, or t
  misc_feature (313)..(320): n is a, c, g, or t
  misc_feature (322)..(325): n is a, c, g, or t
  misc_feature (338)..(340): n is a, c, g, or t
  misc_feature (379)..(381): n is a, c, g, or t
  misc_feature (440)..(440): n is a, c, g, or t
  misc_feature (447)..(447): n is a, c, g, or t
  misc_feature (455)..(456): n is a, c, g, or t
  misc_feature (460)..(460): n is a, c, g, or t
  misc_feature (566)..(567): n is a, c, g, or t
  misc_feature (574)..(574): n is a, c, g, or t
  misc_feature (587)..(589): n is a, c, g, or t
  misc_feature (593)..(593): n is a, c, g, or t
  misc_feature (612)..(615): n is a, c, g, or t
gtgtggcacaatgtcccagctagtagtcctttcaggttgctgattaacgtaggagacttcgtggaggtaccctacagttccatagtactacttagggggtgtttggttctgtggactaaagtttagcccgggtcatatcaagcgtttgactttcaaataggagtatgnnnnnnnnnnccanncnnctnnnnnnnannnnnntcnntnnnnnnnnnnnnnnnnnnnnnnnngtntnnnannnnnnnnnnnnnnnnnnnccnnnnnngnnnnnnnnnnannnnnnnnnntnnnngnnnnnnnnnnncagnnncannnnnnnnannnncttatacactgtnnnatctgtcatgaattgcatatttcagcaggctgtcggttnnncgaccttgacggacgcagataattagcaacggggtcttgaggagcccggtgcacagggncggtgancaacgcgnngaangagaggatctcgttggccatgttccacggcctggatcccgacgaagagattgagccggcgcccgctgctcttttaagcgagaaccagccggcgcggtacaggacanngaaggcnaaggagtacctgnnngccnggttctatgaacatttttnnnntagattcatcgagtctgtgaagatcc

SEQ ID NO: 1104 - DNA, 220 bp, Zea mays
ttgtggtagatatcaacgaaaggaagaagaagaagaagaagagggggctttcggtttcccggcgtggggttcgtgtgtgtccgatccgatcattttgaggatcggatttgctgctagtcggtggacaagaacagattgttcttggctccttgctgcaaaattgccatatggtgatggcgattggagaataagaactgggcttgtttgtatatgcatctga

SEQ ID NO: 1105 - DNA, 358 bp, Zea mays
acaactaacacattgctaaggataaagcacgcgaaccatgcttgatgcctcgatgcaagatgacagatgcttcgagctatgtttcgttttgagtttttattttcccgtggttcatgctatttcattgtttgccatgcagggacctggataagagcttgcagaaggccttgcacaggtaccttgaggtcagggggttcaaacattcactacatgattggctgtacgaatacatgatgagaaaggatgagaaggagtatgttgtttggctgaagagcatgaaggagttcatcggcggaaattgattgtttgcgctttaagttttatctgcattgtgagaacgagacctgtactcatcatg

SEQ ID NO: 1106 - DNA, 792 bp, Zea mays
caagtcactgctcctcctcctatgatcgttccagcgcttcaatttgttcctgcaaactgttctagctacttgctgcaacgccgtcttgcaattacagagctgctctgtccgttactccgttctttgtttcgaggttgaccgtccagtttcgtgtcctccattcagttcacaaccacttgtacccggacgctcagccagggctgtatcctcctcctccgccggcgccgccgccggcgatggcgaacccgccgcaggggggctacggctacggctaccagtaccagggctaccttggcgaatcggcgaaccctcctcctccttattactacactggcagctggcccgagcagcccccagctccgtccgacggcgccccctttcgctaccgctacctgcaggaccaggacgatgccgactgcatcaccttcctcagaggatggtacgtacgttccactttttttttcctcggaggatcgcgttttgataggctctgaaacaccccagatgcatgccgtgtagactgatatatgatgttcaggtttcccgtgtgttggagtgctgaatgaaaacttgttcgagtttttgcctgagtcagtcagtcggtcggtcgtctggcaaataaaacaagaaactactacaaactgactgacatgtctgcttgcgcgcgttgcagtcttgctggtctgtgctgctgctgcttactggagcgatgctgcatctaaggaggatggcgtgcagtgctgctgcctggactagcacgcatgtatgcagcagtgtggtggtgacataata

SEQ ID NO: 1107 - DNA, 433 bp, Zea mays
ggccggggggcgttggccgaggccggcgacctccctgtaccatgcgcggagcatccagagcgcgtagaggatgacggccatgccggcgagccccacgacggagttggccgccttgagcgccgtctgcacgcagctccgcaccatccgccccgccatgccgatgccgatgccgatgccgccgtggctgaccggagcaagacctgcggcgccgatagctcagcacctcttcctccctctcggctctctcggctgggtcgccggtccggtccggctcacctttatgttccgcgaacgaagcgggcggtcgcaggaaggaggatgcagcaggctgcgcgtgcgggagaagcggagaccggaccgggtaggtagctacagcctacagctagctttctccgcggctgggtctggtttgacgtggtgtaggatcttgtag

SEQ ID NO: 1108 - DNA, 411 bp, Zea mays
cgcgccattgccaaaccgtgctacagcttgcagtatacaagagcctatctccatgactgtgattacgagactatatacagaaccgaattgaacgccatggcaacaacagttttcctgtctaatgttgttgtaaatcgcgactgctacctatccttcctgctgagcctatatatgtttctattgctaaaaaaacgaacgttattgtataatatgatcgatgtggagacatcatcctctatggcgtaaagtgcaatatactatctcaagggggccaaggccgaggtttgtaatttgtatatggaggaggattcaggggttgcagcactgcaatggactctatgaccatgagaaagatggctaaatgagactgtatcactctgcaccgatcagattagagacgcaaacacatca

SEQ ID NO: 1109 - DNA, 382 bp, Zea mays
gcgatttcgggggcggctgcaactggcgcagcgcttcacttcgttgctgcgaatctcaagcagcgactgcggcgggaggtcgcggccgtgggcgacgtgtggcggcgcctggcggctggtcagagtttggtgctttaaactcgcgcggcgtcagtaatcctccaatgccaagcatgacgatgttgggggcacggtatgtttggccttttctcatttggttgtttaagtagctcaaaatttagggtttcatgaggattaaccgattaagtcactgctccaaacaggtgtcccctgtatttcggggatcactaggctatattttttttttcattaagctatgtttattttattcctaaacaaagaagtagatgatcatttggat

SEQ ID NO: 1110 - DNA, 825 bp, Zea mays
  misc_feature (815)..(820): n is a, c, g, or t
tactgcagcttttgtagtcaaatcgaactcaagcagttttgctttgatctcgctgccttacaaaaatctgcaccttgatttgcttatgcagcatatttatttttgttagtttttatattcagtagagtaagcccactagatctcattggcaagataagaagcttttatagggaaggtatcatgtaattcagtagcaagcatgtttgtaatgcaaatgccctcccataagaacttctctagtttcattctttgcctcagtgacactcttttatgcagatccgtgagtgcatcctgtggctcagtatagtgttcgtcacaatactgtgcacaccacaactaacagttatcaggtggtctccgaacccaccggtgtcagccgacgtcttgcatcagtggaaaggattctgtgctctaatcgcgaacgcttactatgtcaaaggaatggcatggtaagagcagagcagcttctgccagcgcccagcagcgttgctcttcttctatctcagaatctcatacatgttcctaaaactgacgctgcaggttgccagtgaaaaccttgcagctggaacagatggctgtcacaggaagttcagagaaaccatcagtagttgctagtcgcatgcagttagttttcagcacattagaggtttatagcggcaccgtcaatatgtacgcgctaaataagaaagatgatatgctcgttagtgattattttgtttgtttactctgcaggtagtcagcccacagtggccaagagtgtgattagatgaaagcaataccatcaaacaaaggtctgcagttttattctgaccaannnnnntgcat

SEQ ID NO: 1111 - DNA, 361 bp, Zea mays
  misc_feature (154)..(159): n is a, c, g, or t
agatagatgtaagactggaatgagaagaaggatgacaattaggagaattgaactgatccaactaagagacctaggatagaactagtttgatctatctaaaacattttttttctatacttacatataagagatactaaaaattgagggggggccnnnnnnccccccccctcaatttttagtatctcttatatgtaagtatagaaaaaaaatgttttagatagatcaaactagttctatcctaggtctcttagttggatcagttcaattctcctaattgtcatccttcttctcattccagtcttacatctatctatctgatcccattctttccaacatcacttgaaccaatctactctgatgt

SEQ ID NO: 1112 - DNA, 347 bp, Zea mays
agagtagattggttcaagtgatgttggaaagaatgggatcagatagatagatgtaagactggaatgagaagaaggatgacaattaggagaattgaactgatccaactaagagacctaggatagaactagtttgatctatctaaaacattttttttctatacttacatataagagatactaaaaattgagggggggccacggccccctttgccccccacgtggatccgccactgttgccgaggaagaagactgacgaggcgaagtcactgattagagtgttggtggcccttggctttgattgtgatcaaatagaggcaaatggttgaggtttggagatgctggtttgt

SEQ ID NO: 1113 - DNA, 338 bp, Zea mays
ttcagcgccgcttccttttctccgtcgtgctctcctccgcctccggtcaccattaacctagccgccactctcctcggtgcggcggagcccgcctgcccggatcccggacaccggggcgacctcaagtgttccacatgcatcatgggacacgacgctcaccgctcgctatcgctggtgagaagcatgcccttactcctcccacctctgtcctctgtctctcacatcctcactcacctcaccggtaggcggactacggacgactggagctggatttctgtggagaagtggattgctgactgctgtggagaatttcggactttgaagcctgaagtgtgaag

SEQ ID NO: 1114 - DNA, 550 bp, Zea mays
gtcaaagtcttttatagcagatgatgatggtattttctcacgctgaaataataagatgaaggcatctcattttatttccttattttgtgaatgttgctctttttcagaagaagaagaagaagatgttcatttagtccctaatagtgctgatgatgctcctcggaacaccaattccacacaatcaacagttggatcatcagctccttccatttctagtcgtccagttgggcgtgttatgggtataatcaagcgaaattggaattcgtgagtttctatgtgttatgagttagatttcttatgtgtactatcctgatcttgtcattatatgataaggttctggtgttctgcaggtactgtggatccttgcagccgatgcccatgcctgctggtagtgggggtgtcgctcatgctttatttgtttcaaaagatcgaagagttcctaagattcgaattcaaaccaggcagcttgagaatcttgtgaacaaaagaattgttgtcgcggttgattcatgggatgttttgtctcgatatccatcaggacactatgtac

SEQ ID NO: 1115 - DNA, 1220 bp, Zea mays
  misc_feature (58)..(58): n is a, c, g, or t
  misc_feature (61)..(61): n is a, c, g, or t
  misc_feature (1156)..(1163): n is a, c, g, or t
gagcggagcggggagggcgaggaggagcagcaatggaggcgctgctggagctcgagangangcagagggtgctgtccctcatgagttcacgcggcctctcccacaccgactccagctgcggcggcgctgccgctgaccgcttcctcgcccaattcctcctcttcatggtacggtttttgggggtcgcccctcttcctccgtatgaccgtatatacgaattcaatcggatccttaccagtgcgccgaagcaggcaaaatggatttttcccctttgtttttatatgacacggactgtgtctagcatagcatagtgctccctccgccgcccgtccctgccttcgtccttcgtggtggtttttggttaggccatggatttaaggcgcgtatatgctgttcgtttagcattttcatgggtttattcgacgaatacggtttcgattgtgcatttacgcacgcgtagctcgctgaagtgttccgattgatttgatgagttgttggattttgtattgacctgctgttgattggtgacgtgtgctcgctgctctcctctcgtagttttaatccagttagctaaatgcctggccgaaggagcttacaccactagagtaggcatggtcaactggagactggaccagattgatttgtcacattggtcatgaccagacttcaataatgcaaccttgccttaatgatcagattcatcacactagtttgctttgctgttctcgttgctcctctgaattgggtatctcctgctgaaacatcaagtattcccatgctttttgaaatgggacagaaagaagcaccgagaactacttccaaaattatgatcacaaaatcttttgtgtaggtgcaaccgtttgattctcttaccctggagaataagttccttttgatctctgagctattaagaaaggtaatctaagtgacaccgtctaacttttagttcatatttgtctatgtgttttctatgaagaaattatagttgagacttcttttattaggctactcctaatactttggaagaagtgcagcatctcacccatctggaaggtagtggtaatagttgtgaagtaatgatgatcttacattaaccttatgagtttatccggaaattttgttgttgattgggtctggaactctgataagacatagnnnnnnnncaaacgcagctaataaagatatatttctggaggttcactccagccaataagaagtaa

SEQ ID NO: 1116 - DNA, 793 bp, Zea mays
tggccgatcaggtacatgttttacttgttctaggggacaccagaaatactagggattgttttgggagcaagggcattggaagggggttgaggattttagccctctcaaacctctctaattcccttgatcccaaacacgccctagaagaaaatccttcatcttgtgttctgatgtgccaaatcacaagtttcacaccagaaatactagaagaaagtccttcaccttgtgttcagatgtgccaaatcacatgtttcacatccctctctccaaagggcttgcacttaacgtggtgggttttttggcagtacatcacgtacaagcatattaaggacagattcggtgaccgcctatggcttgatgttatttccaaatgcgatcttttgggaaagaaagagcccataagttttcacgatgctgatgaagatgtagcacggtacagaagattggggccagaaggcgccctccaagtatctgtgcagaccgaaatcggcgtcaaacaggttagctattctcgtgctagcctgatactgagcagcgactgcttgttgagtctacttattgcttatcatagcgacttacaggcccttaagaatctaggctaatatgcttctgtctctccagcttaaggaaagagtgcatgagctgctgacctctcagatggctcggatcaaatctagcaaggcggagcatgaaacacatgaagtagcgactagtgttgtttactgaagtttgacaataataaggattcgaatatcatgctgggtgtccgcgtaaacattcaatgtcgatgatg

SEQ ID NO: 1117 - DNA, 503 bp, Zea mays
cacataaaaagataagagctgttgacgagtgtgtgtgtgataatagcatccactttaggcttagtttggatactctaataatgagtgagattggagtagattgacatgtattgagagagtatttgatctatttgggatttatatcctcagatttatatcctctccgatcccttcaaaacactctaatcacaatgttctcccaagtgaacactgacagctccatttgccaatcctatcaagcaacagtaaccccgaaacacacagctgtgcagcaatagagagagcacgaaattatatattgggtgcgattctagtaccaaaaacaaaaggagttcgcgtcttcgcgatgctgtggaaacagtggatgtagacatgtagtagagaggaaaaaggcacggcacggtaggagcgcgagaaattccaagcactgtactgtaccgtagctagctactgcctacagcagccggcagcaaagtgctgcccagtacggacagaaagtgcca

SEQ ID NO: 1118 - DNA, 517 bp, Zea mays
  misc_feature (392)..(393): n is a, c, g, or t
  misc_feature (396)..(397): n is a, c, g, or t
  misc_feature (402)..(402): n is a, c, g, or t
  misc_feature (404)..(404): n is a, c, g, or t
  misc_feature (407)..(414): n is a, c, g, or t
  misc_feature (417)..(417): n is a, c, g, or t
  misc_feature (422)..(422): n is a, c, g, or t
  misc_feature (424)..(428): n is a, c, g, or t
  misc_feature (433)..(453): n is a, c, g, or t
  misc_feature (464)..(467): n is a, c, g, or t
  misc_feature (476)..(481): n is a, c, g, or t
  misc_feature (486)..(486): n is a, c, g, or t
  misc_feature (488)..(494): n is a, c, g, or t
  misc_feature (499)..(513): n is a, c, g, or t
tcgccgtcgcggcggccagactccattgacccaaaggctgtggccgctgtctcttggtccagcgaaggaggcgcctgcgccctcccgccgccgctgtcgtcgaccggcttgagtgcgcgctcagggccgtcaggcagttgcgtattcgccaggcagagagttaacctggacctttccctgtccatatgtggatcatagctagcttaatcacccgtgctgaattttgtacattcaatgttccatgatgcattgcatgctgtcgatgtgattccgtttggatatcaatggcggcgtgcatgccagcgccacagcctgcggtgattgcctgtctagagtctagaacagtgtgttccaatgaagatctgaagaatggcagttcacatgttcaggannagnnaaaantnttnnnnnnnntgntgatnannnnntgcannnnnnnnnnnnnnnnnnnnngctcctcgctnnnntacttcccnnnnnnaccancnnnnnnntacannnnnnnnnnnnnnngtgt

SEQ ID NO: 1119 - DNA, 604 bp, Zea mays
ggcgaaatccttcctttattatacagcttttatttacctgtcggacacttgcactgatcagcgaaatgctgttccattcatggaattgccatatataaacctgatgaaaccattcgtcttcctgaaaacaaagtacgctttcttccatttcaggagtatttgtggagctatcatacgactcgacacaggtcaaggtacaggtactgtccagctcagtggtcactgacggctacagagtgatggtcactgacaagcagcgcgcctacctcttcctgaagccgtttgcgtgcagagacaagccatgcggatcggagcctcggccccccgccggctcgttcatcagcgatgttctcggtcccgaccgccggctcaacgtcagcggcatcgtcgtgacggccaccggcacgcggcagctcggcgcgcttctccgcactttgcggtcgcttcaggcttctctcggcgacgctgggttggcggagcgcgtcaaggtctcgccggagctctcgatgtcttctctgcgggtcgtgggcaaggatcgcgctcgtgcgaccaagaagcggcggtggggcaaggtcctggagttcgtcaggaggacacgctcgtt

SEQ ID NO: 1120 - DNA, 395 bp, Zea mays
tcgatcgacctggtccactccagtccagaccagaaatggaggtacagatggcagcacaaggccctaaatcgatgggacgacgacgcagcagcacgccgtgtgactctcagcacggcggcggtgccgacaccaagcccgtccccggctacctcaggccgtcggccggctcctgccaccacgtctgcaagtacggcggcacgcacaccttcgaggaccacaacaggccccagcctaggccgcctcggaagcagcagcagccggcggcggagagccacagccacaacagggtgctcgtcaaggtgcggtcggtgttccggaggccttccaaggcggccgccgacaagtccagtggggtcgagagcgtggagtggaaggacattgtggcctatgataca

SEQ ID NO: 1121 - DNA, 552 bp, Zea mays
cattcaccgcctcgtggaagaagggaggacgagctggatgaggaggaagaatatgaggaagatgttgaagaagaagaagcgcctctgtcggatgaagaaatggaggtatgatttcttggcctagattcagcttcttccgaagctaacatatcaaagaatggaacaatacttcatgtctttacatcagacaagaaggttcacggaaatcagttcagaggagggggcattggtgtagtttttttttcttcttctaaataatcaaaatgggacttgggatgcaggcaccgaaacgtaagagagaatcagggggtggtgggcaaaggcgcgaggagctggtgtctgaggaggaggacgacgaggaccacgacgattctccgccaaggaagcagccggctgtttcgcatcgtagaaaggctgtcgtgtttgatgacagcgacgaggactaaaatttgtaaaacgttggtacatgtgtatgacgacctgacatgatacgcttgctttttctccccatttgtttaagagaatgattagttatttttcgtcatgctggtg

SEQ ID NO: 1122 - DNA, 567 bp, Zea mays
ttgacattcaccgcctcgtggaagaagggaggacgagctggatgaggaggaagaatatgaggaagatgttgaagaagaagaagaagcgcctctgtcggatgaagaaatggaggtatgatttcttggcctagattcagcttcttccgaagctaacatatcaaagaatggaacaatacttcatgtctttacatcagacaagaaggttcacggaaatcagttcagaggagggggcattggtgtagtttttttttcttcttctaaataatcaaaatgggacttgtgatgcaggcaccgaaacgtaagagagaatcagggggtggtgggcaaaggcgcgaggagctggtgtctgaggaggaggacgacgaggaccacgacgattctccgccaaggaagcagccggctgtttcgcatcgtagaaaggctgtcgtgtttgatgacagcgacgaggactaaaatttgtaaaacgttggtacatgtgtatgacgaccggacatgatacgcttgcttttttttccccatttgtttaagagaatgattagttatttttcgtcatgctggtgtaatatg

SEQ ID NO: 1123 - DNA, 435 bp, Zea mays
gttcttcagttcacacagacagatgtgcactgcactagaggactaggcctaggggaaaagccccaacaacacctatagttccaacaaaaatccgaagcaactagtagtatcagagatcccttgacaaaactaatctggccagagccaagcaggaaccgccacagattcacgattctgagtcttctccgtcttcctcagaacgctgcggcgggacgtggtggacgaagtcctccttggagaggcaggactccgggacaacggtgccgacgctcctcccgaacgcctggcggcagtaggacgacgcctcgctcccgtccacctgggtcaggttcacgttgacgagcgacaggcgcctgcacggccgggcgtcgctgcacgagaacgtgaccgcgcgctccgacgccgacgtgcccgtgatgtcgatgtagttgatct

SEQ ID NO: 1124 - DNA, 1014 bp, Zea mays
  misc_feature (229)..(234): n is a, c, g, or t
  misc_feature (283)..(284): n is a, c, g, or t
tgtagtgatggcgccatggccatggtctgcttagtttcctcgccctatccaacacgaaagctgccgccgaagcacggtcggtcacgtcgttcctgctgacatggtcttcttgagtttggggacaaagaaacaagaagaattagactagaaggttcagactttagcctctcctacaccggtggtcatggaaacagatggtttgactacctgacagttagctgccctagcnnnnnngaaagaactgttctccaaatttgttcccagttgaactgaaaagaggcgnnttgtaacagcaaatcttcccaaagtactaactatatttagttttaatatagtcaagccaagaggatgcatgataccccagccgttgtatccttaatatatgtagggctattttgacggctagctgcgaagaagcttgtatcagtgagtttagttgtgtgcactgaactgaaactgctaatagattgcttgctgcatgtcccataaagttctggcgagcattgcatggatatagaataatctgtggggctagaatgtgtgtgtgttttggcctttgaggggcgagcaagtaggattgggcactttttttttgtttttaatattcagttttggtttccaatatttgtctgtatcggtactcagttgcagtttcagttttagatggaaaccgaaccaaacactggttcaaacccaaacacgaagcattagataagaatgcggcaattagcaactgaaaaggacatataatcagttgatttgtcgtgctttgccagtgtaaaaactgtttggtgtttagttcagagtacatattttttacttgtaattgtctagacgtatttctaacaaaaacctattatatttctagattatccctacatcggtttgacttggagaagacgagcttccaccatcttgggaccctataccctctcctttaggtacttgttaaatcctaaatgttcttattacatcattttctgcttctgttggtgtttatttctttttcgttag

SEQ ID NO: 1125 - DNA, 409 bp, Zea mays
cgatcggtccccttcaggctccaggcttcggagcttgctttacttcaggtgagattacttcatcagcctgtctctagaagaacccagcgaaccgcccgcccacgatgcggctgctgcagcactcgttcgtggcccagccgccatcgcagcagccgctgaccgcctgcccgccgtcatgatcgatcgattgactgattaattcctccccatcacggtccaactagggcggtggcggctggattcatctctctgctcaactttggatgcttggttgcctgattggttggatggccgtgagatgtgggacctagggacgttcttccttcctagccattttgggaaattcaggtctccgccacatcaatcatcagcgcatcatccattgttgtctccaggaattataagttat

SEQ ID NO: 1126 - DNA, 326 bp, Zea mays
aaaaaaaaaaggaagatgctcacgtgcgctacataacagatgcttgtcgtgcgacatactgcagtaaagacttcaagccttctgctacagttaggttaagttccaaaggaagagctagatcaaaacctactaatgaggggtaagaggtctatttacttttaccacttccgttgcagtgaaatactgaaacgggatgaaatcaattcttttgttctgggaaattcgctcgtacttgttaactcctatcgctttggatcttagagactagggtgatcattgctaacatcggattatatcttaagcaattggtggagccatgggagatt

SEQ ID NO: 1127 - DNA, 341 bp, Zea mays
tcgccgcgccggagagccctggcggcatggatccaccgtccccacggcgcccggtttggatccttcactaacgtcaacttgtgagtcctctggaagctctgtgtgcgcccgcacagttagttgccatggcgccgtggatctgtcgtcgctcatggcggctgccttgcatccttccccggccatcgttccccacagttcgccgtcggtgatgaacccccagcacctttcatctctttgtcctcttcaggttgtttgatgctgctccttttgtatgccaccaatgcttcgaagactattatatgtagtatgctggtttgaagactatatgtagtatgctgtgc

SEQ ID NO: 1128 - DNA, 767 bp, Zea mays
  misc_feature (761)..(761): n is a, c, g, or t
catcaccaagatctgaaccttcattctctatcaataccggattccaggtaacaaacagatctctgaacttcttatcttttttctcagctttgcggattttcttcatgtctgaccgggagagcttagtatcttgcacttgaactgcttctgcattcctaccagagaagcagggctcttcttttgaggaagaggtcctgatatcctgctgcttgatagcaggcaagtccttgggtttttgaagaacagtaggccgggtagcttctggtaggcgaacaacagatccggtttccttatgtaataccttcggaaacggaggatcaactttctgcgacaccatggaagctggatggtgaactctctgtgacatcatcttaacaggtggaggatcaaatcttctcataactctagcaggcgaagggtccacacttcctgaagacttcagaggtaggcccgatcttccaactggcaccttaacagctgactggggatcaacaggatgtgtgaccttagctgcaggctgggggacaagtctctgcatggtctttgccggggattctgtaatcaaacatttttgtactgcttgggagtcaccattgaccctccgctgaccagaggtagatctcacattcatcttatgatggattgaattttgcttgcccgacagggatgaacctgatcccatttgttggaccaatggttgctcaagaacccttggtttctccagaacagctgattggggatcttgactacttttaatcttnaagcga

SEQ ID NO: 1129 - DNA, 829 bp, Zea mays
  misc_feature (352)..(352): n is a, c, g, or t
  misc_feature (354)..(399): n is a, c, g, or t
  misc_feature (727)..(728): n is a, c, g, or t
  misc_feature (745)..(749): n is a, c, g, or t
  misc_feature (763)..(767): n is a, c, g, or t
  misc_feature (769)..(774): n is a, c, g, or t
  misc_feature (795)..(801): n is a, c, g, or t
  misc_feature (811)..(822): n is a, c, g, or t
tggcgtcgtcgacgtgcccatcagcagcacgctgttcgcccgcttcccgttcgccgtctactccgtcgacagcgtgctgctgcccccgcagctattccacacggcttcttctgcgccggcaccaggacagtctgcagaggcgccggtggtgcctggaaaggcggcaccagggcacaaggggggcgtcccaaagagcggcgacgatgtggcagcgcagccgtccgctgcggtggatggggcacaagacaccagtgtcgccgcggatggtagagggagcgcggcgtggatgacgccggtggttgttttgggtggcatggccctactgctttgcgcgtgagcagtgtgtgcttcntnnnnnnnnnnnnnnnnnnnnnnnnnnnnnnnnnnnnnnnnnnnnnnttctggaggtgcctactgatcagagagcattcgtatctgatgtcatattctaattaaacttagttttcacaatctgtgttccaaagggattctcactttctcagatgaactgtgcaggtccgatctgcatatgtgaagaacgagttcgagtgggacaatttgaagaaattatccttcaaggtacgttgaattatcattaatcttctgctccatctactatatgggtctattacttgctaataataaatttcgacagactaaacttcttaaagtgtctcagttatgacccgcagtattccataaattttttggtcagtaaaattgtgtnnaatattaccaccaaaannnnnatcgtagtcagtannnnntnnnnnnaaagcaacactatatatttannnnnnnaattttctannnnnnnnnnnnttccact

SEQ ID NO: 1130 - DNA, 843 bp, Zea mays
gcttgaggttggccttgtcgccttctggacgagactggctgttcctttttgttcaacagcacttcgatagttcgatatcctgagtgatcgccaaagggactcgaaacggttatcagattttgattcctttttttattcttttgtttggatcatcgataaaaaaaaagagttacaatagggaagcgtacttggagctgaaggagttcatcagccgcacctccctgaacgacgccgagattttctgcgaaaagctcatgcgcgagtctccaaggctcaagggactaggcaagtctagttcttttttaaccacacactgttttactttcttgatcctttgatgaaacagtgtatgaaattactgaggcatgtgtggtttcgtctcttggaaacaaacagccttgaggattctggaggtgcctactgatcagagagcattcgtatctgatgtcatattctaattaaacttagttttcacaatctgtgttccaaagggattctcactttctcagatgaattgatgcgactgcaggtccgatctgcatatgtgaagaacgagttcgagtgggacaatttgaaggaattatccttcaaggtacgttgaatttttattaatcttctgctccatctactatatgggtctattacttgctaataataaatttcgacagactaaacttcttaaagtgtctcagttatgacccgcagtattccataaattttttggtcagtaaaattgtgtcaaatattaccaccaaaagatagatcgtagtcagtaagaatttcagaaaaagcaacagtactatatatttagcgttgtaattttctatgctcttttgtctccac

SEQ ID NO: 1131 - DNA, 569 bp, Zea mays
  misc_feature (56)..(60): n is a, c, g, or t
  misc_feature (555)..(562): n is a, c, g, or t
tagctttcgctctctccttctgcgtcccctcctcccactctccctgcgtgcatgtnnnnntgtgctcacttgtcaactgctggcaggctagaccttctgatttgattttggatgatttcgtgagattgcacaatcatttagcgaaagtatgactaagaagtgcctttcaaaatgcctaaagaattgcttgttggcatggtgttcaacagttggagtaacttacgcctgaccgcctgagagctgctatgcaggtaaaaagagatgatctcgcaacctgcttctgcttgagttcagattttgatgtttttttaatcctgaaatttgagcttctgctaaactccagtaactagctattttttcttcatggactacagctacaggtgccttcagctcagctccggggcgaagccaggaattacatgtagggaggccggccgaaagagccatcttgtaaaaaatgatcgcggttcaactggtttggttactcgcacttagcgtctgtctgagttaatacttgacaaaaaaaaacaagcacagctcaactggttaggtttnnnnnnnnggggggg

SEQ ID NO: 1132 - DNA, 398 bp, Zea mays
gtcagacacctacctgtcaggcatgaactgaaaaaggtgcaaaagaattgtcacttaacttcaggtaccgttagtgtctcatccagaaattggtccagcggccattagcgcgccactgcaggatatgcagagaaacaatggtggcaccggagcaccatctgcaatgccgacacagcgtgtatggtgccagacattgcatgcatcgcatgccaccatgcgctccccatcgtcgtcctgtgcaccacaaacacactgcacctcccacgcatctgcacctccctggcaccgcagcccagtctccatgtcagctccgtggccgtgcacaccaatggtgtcaccagactctgctccaccaagcatcaccggatcccatttatccccagtaatgccatccagtg

SEQ ID NO: 1133 - DNA, 385 bp, Zea mays
tccagtaccagctgtagccagcattcatgcatgccagaacgtagtactgcggccatcgcccccatcgtcaccatgatgatttttttctggtaaatctgcggtcagcagaaggttgggtaaggcgaatggtctcttacccaattcgcccagctggcgaatcttaatattctaaaaagttttgggtttccatgcaaaataggcaggccacgtttaccagcaagcctccctcgtcggatcgagggaaaaagaaatacgggacgttcgatttacaacttttacctatactaggacaatgctcatgcgttgcaatgaaaacatataatattacataacttatgaacaaatgtgtattatactgttatgagatagaagatggtgtccttga

SEQ ID NO: 1134 - DNA, 655 bp, Zea mays
  misc_feature (63)..(64): n is a, c, g, or t
  misc_feature (66)..(68): n is a, c, g, or t
ctacggcacgtcgacgggattcgcacgctccgggggcaaggcgctggtctcgaggtcagtccnntnnncaggatggcaaatttactcttgtttcatgtatctgtgaactgattgggctactgcggttgttgctgcgacaaatgcttgattggttgcagtggattgacaaggaaggcaagacgcccctgatgcttgcctgtatgcgcccggatctgttcgacgtggccaaggtgctgatcgagttgggagctaatgtgaatgcctacaggcctggtattcttctcttgattcttattaccaatctgttactttgatagtttggtcctatttatgaagctgagttgattttcgtaaagtaaagcagtgccaaaagggtagatttcagtcaactaagacaaggtttatgtccacattcactctaacataggatcgagttttatttgttctgtcaaatcatatcatatcaatgtaattctgtatcggtacacatctttcaaactctgcattcaaatgaatgaaaccatttgatgtgatccatccaagttgctgacagtgatatgtaccatccctggactcatgcttaattgaagaggaggctgtgctcgttattatgttttgatcaccacctttatccattaccagggtcacactgtgg

SEQ ID NO: 1135 - DNA, 616 bp, Zea mays
  misc_feature (54)..(55): n is a, c, g, or t
  misc_feature (93)..(95): n is a, c, g, or t
  misc_feature (513)..(582): n is a, c, g, or t
  misc_feature (585)..(589): n is a, c, g, or t
  misc_feature (591)..(601): n is a, c, g, or t
  misc_feature (603)..(604): n is a, c, g, or t
  misc_feature (606)..(611): n is a, c, g, or t
gcgtgcgccgccggtgcaacaggctggtccgaaaggtcgaatcgttcgttgttnngatcatcttggagcacagggcgcggcgcgcaaatggannngtcgtgggcgatgagtgcatgggtgacttcgtcgacgtccttcttggcctcgagggagaggagaagctgtcagatgcggacatgatcgctgttctttgggtaataacacagatcgagtttaacttttttttttcgtttaacttgccgcgtaaaatgcatgtcattccttctccaatcttaaacgttgcgtcgttcatggaaaaaatggtcgcattgaatttgcggtcgttttgatcaggagatgatcttcagaggcgccgacaccgtggcgatcttgatggagtgggtcatggcgaggatggcgctgcacccggacatccaggcgaaggcccaggcggagctggacggcgtcgtgggcatcgggcgcggcgtggcggacgccgacgtcgccagcctaccctacatccagtgcatcagnnnnnnnnnnnnnnnnnnnnnnnnnnnnnnnnnnnnnnnnnnnnnnnnnnnnnnnnnnnnnnnnnnnnnnttnnnnntnnnnnnnnnnngnntnnnnnnttttt

SEQ ID NO: 1136 - DNA, 519 bp, Zea mays
gggtgtttgcactttcttcagcatggactttatgcaccatctgttgtacttagcaccagaacattcatgagtggtaagatttggattggtaggacatcaatgcctgctgggcgagctggagagtcagcttctcatggactaactgaaaacttgcagtttctggggccaagctgctcggctcctggggcgtggacctccccatcaggccgctgcacacgctccacctctactggcgcgtgaagcccggccaggagcagactgtctcgacgagcgccgggttcccgaccttctccagctacggcgacccgcccgtgtacggcgcgccgtcgctggagctcccggggctcatcaagatcagctgcattagatcttagagtacactgttttacacaatttggagttgttactactatcaagctttagactttagactttggagtacactgtttttacactgtattaagctttagccttttatgctacagtgtgtaaaaaagcaagctttagacagttaggcta

SEQ ID NO: 1137 - DNA, 424 bp, Zea mays
ccgccctagtcccaaacacaccgaagagaagtgagtttgctccctcattccttcccccatttcccgagttgtgtagttccaaagtttctaaagcggtttccaatcttcaggcaacgcatattcgccgaatctgtcttgaggagactagaggagaaatgaagagacatcaaacactacaagcgcatttggttagtggtttaccgttcagctaccttgtaattcggttggctccccgaaaaaaaaaagtccgggacacgtcaagtgcccagctcagttttgttgtaaatttgttagaaatttgacagaattggtagtgtgaacttaccaagaaaggaagaatagccgcatgtgttgtggctgttcattctatgattggttaggaattgacacttgaaacacggtactctattcagaggctgtgtcc

SEQ ID NO: 1138 - DNA, 313 bp, Zea mays
ttcttccttgagaaggcctccgcggaggcgttcatggagcgagtcgagtcggtagtgggcgaggtattcaacatcgtcaggcagtggcaaactcagcagcagaagcaggtccaggagttccaggcactacacgacacacacttggctccagatgagcattcatagtatttcgtcttccatgtcaattaaccaataaactctttaataattgacgtctcgatgatgtgttatcatccatgtttaacttaaatgtgttctagttctgaaataccaaagtttataaaacaaaagatatgcaacaaggaatcaacat

SEQ ID NO: 1139 - DNA, 865 bp, Zea mays
aagtcccccttttcctcttttaagatcttggtttcaattcatccttatgagacctgtccgtcattgtcataatttttatttactttgtggagtcacacacttggtttgcaaaactcttaataatatttctttgttcaagttccactgtagactatcaaagctatacagcttcgtatccagttttgcacttggcataccattgttggaccaaatcttaacatagacaacatgcttccactttacatttctgatttctacgttgtgaattgtgtgtcaaactgtcaactattctattcctttattttttacagccaccacacaaaatgtagatcaccagttggaaactgatccaggcagcatgcaagtacaaagcccagtgcacttcaaggtaagttgcctattaattcattatttgtattgtctagcatggctaaaaaaacccattttccatagttttgtgatcataaattgagttctcttcattcttgtagtctggtgcaatgccatctccggagctagtagctgcaaatacagaaaaagctgacagccttcttgaacccaatgtagacattggcatggtatgggatcttacgctccttacactatggggtttttaggaacacaggttttgtggaaatcaaaattcctagaacagattttaacctaactaactgaaaaactttgtttggaaactctcatgtaatgaaaaccacttttccatacaaaagcccagttatgcactttgtgaaaaatgattacaaccggttttcatgaaaagcaggtttctgaaaaccatgcgtgctggtgtcattttgatggttcatgttcactttgctaattaagattgggatgatctggattaaag

SEQ ID NO: 1140 - DNA, 865 bp, Zea mays; identical to SEQ ID NO: 1139

SEQ ID NO: 1141 - DNA, 375 bp, Zea mays
  misc_feature (366)..(369): n is a, c, g, or t
gatgagcatagatgaaaacggattcatgctggagttaagggcttatcttcagaaagaggtcgccttgcacaccgataaatggtctgaagagcagattcggctcctggtttctgaggggagagcgctgaagaagctggttgaagcttgttgtgaaattccggttgtcgctgagcctgagaaggcgccggtcgcgaaggatgccagcacgaagaagaggaagatgccagatgggatctgtgaagggatggcgatgctgcagaacggtctcaaggtcatgcgaggcgcctttggtgaaggggactttgctgatctgaaggataggtttgctgcacacttgtctcgcctcgaggatgcagtttcccagannnntagttt

SEQ ID NO: 1142 - DNA, 359 bp, Zea mays
cactcactttccctggccgtgcccaaggtcggcgaccagcttccccttccctgttcttgccgtggccgagccaccacttccccagccgtagccctctccccctccattgtttcagcgcctgaaacaaacccctggccgccatccacacttgtgctcgaccctccccgtgcggcgtctaccgatctgcgcagcattgctggttcgcagcagggagccccctcctcgctgtcctctgtggtgcccgccgactgttcatcaaaatgcgcagcaagccgcgcgctgcagtagccccggatcccctccgcatccgcgtgcttcaccggatctgcgtagccccaacatcgacgccgttcaccccg

SEQ ID NO: 1143 - DNA, 998 bp, Zea mays
  misc_feature (949)..(952): n is a, c, g, or t
  misc_feature (988)..(994): n is a, c, g, or t
ggaaatcggcgatcaaggaagaggagaagcgactcacctttgggagggtggccagtgtgccgaggaagaagagggttttagttttagtaggcgaggaggggcagagggcagtggggcgggttgagcgcggaggaagcctccgcgcacacggcacacgtatgcgacgagatccaaagttaaaaggtcatgccgtacctccctccaacttcataaatttctactcaaagcggacgctctaaactttagcacttaaaaatttaaacataaatgttaaaatgtcctaaaattgaagtgcattcaatagtaacttagctcttgaaaatgcgttaaaatttagcacactactaaactttatcacatgggattcaaacatggcctcgtaagagcatatataaccatatttaacacgaggtcttttaaatagtctcgattgtattgttaaacttgctctaaaacttttagtatccgtggaagatttttaaaatccgaacggcgttcggcggagaagcccacggaccgatcgatggaaacagccgcgcgcgtgtctaatcgaatccatcaatcactgtatctcaacagacgctgcctgccgctagcctcacctttttactatttgtttgtttgtttacacttatagatgctcctctctcgttcttctggttttttttacagtggtatcgctgtgtgtggaaataaatcatgattcaaacgtttctttcgtttaagcaaacgaggcaacggcgactgatcactgatccgccactcaaagcaagttactttcttcccccgttgattttgttaattcctctgcactcaaagcaagttactgctgttttctgtctttcttcccctttttatcaaatatttgttcaggactcctttaaaaatacaggaattttagagaaattcctgtattttaaagcaagctaatgcaggagcctgatatcannnnctttggtgggctgctgtgcagaggaagagggggagnnnnnnnggct

SEQ ID NO: 1144 - DNA, 607 bp, Zea mays
  misc_feature (600)..(604): n is a, c, g, or t
cggacgaggagttcaagaccgtgcagtccgccatcgacgcggtgcccgccggcaacgccgagtgggtcatcgtccacctccgctctggcctgcacaggcatgcattttcctgcctcgatcgctgttgtattaattaatttccctccctctctctctctctctctctcttcacgactttgttactatatttctattgtgatttccaacgtaccatcactcgcaatgcatgcatggttgatgatgcaggggcaaagttgtgataccggagaacaagcccttcatcttcgtgaggggcaacggcaaaggccggacctccatctcccacgagtccgcctcttccgacaacgccgagtccgccgcgttcaccgtgaactcggacaacgtcatcgtcttcggcgtcagcttcagggtccgtccgtgcacttgacttgaccgtaccccgggccctccctagctccgtttgtacttgtacgtccgtctaactagaacgccaaacttgacgacagaacagcgcccgcgtcggcctggtgaacgacccggagatccgttccgtggcggcgatggtggccggcgacaaggtggccttctaccactgcgcgnnnnnaca

SEQ ID NO: 1145 - DNA, 538 bp, Zea mays
  misc_feature (525)..(529): n is a, c, g, or t
agctgggaatggggatgggaccggtcgccattgccgatggcatgggaggccttgtcgttctcgccatgacctgttcgttgccgagatcgatcaggattcgattagcctggttgctggttgtttttcgttcagagtcgcacgggtactttcgacaattccgtgctctgggggctggggcagtgttgctgctgatatagaccaactccagcaactctccccatcccactccgcatccgcattttgcacggtctgaggcactattgcgctctccagcaggttccgcatccctctccgcaaaatagacgccgtgtccctgcactccccatttccacactttctctctcctctccgcagctctctgcgtgcgcgcgcgcctgctggcgggccccaggtgtcatagactgcatgcggagtgggatgaggagtgttgctgcaaacggagacggatacggagaggagagagaatctgttggccgcgcgttttagggatacggagagggagtctgctggagttggtcttagtannnnntcaaagcaa

SEQ ID NO: 1146 - DNA, 616 bp, Zea mays
aagctcttgaaaactgctcgtcccctccacttcaaaatctactactcaaggatggaaagctgtcatctctgtacacaacccaaggtaatttgctgtgtgtgtgtgggacatctttcttctgttttactgggagacagatccgtttgtcactgaacagtcgtgtccttgcttcctgtagttgttgtttgctgtggtccaccttaacacctttccagacagctggtcattgctacatttcagaaagcacatgtttgtctggactctgggcatatgcatgatatagcaataggcatacttgttgataagctacgctagtggtgttgtcttcctaatggggggtgcatcttgcattgctaggcatcaaatattgcctctgccagtttggactgcatgcattcggttagcatcactgtgttcctgattgtggatattctacacaagtcagatctcattcttttttggctctgaattgtaggtgtggcggttgctgagctacagttctgccatcctgaggttgtcccaacgtcaaagaacttctggaagccactatgtgcatctctgcagaatctgctgaggtgcagcatcgacatccgaatcaacctatctcctatctccg

SEQ ID NO: 1147 - DNA, 461 bp, Zea mays
  misc_feature (444)..(447): n is a, c, g, or t
gggaagggcgccggcggcaagaccgacctgcgtcccgaccgtaagcagttcaaaaggcaccacaaggaggatgcagcagctgagcagggggatggcaacggagagccgggttctgacctagaggataatattagtaatacatgtcttgaaattgctaatggaactgaagcaaatgctaaaaagagtgataaacagttaaagaaggaagcaagaaaacaaaggtattcagacattttattctactctgcgacctttgttgacatatgcatcaaactttacatccttatctggttttcaacagggaactagaaatcagtgctatggaggaaagggctttgcaggaagatataccacaaactccagatgattttgagaagttggttaggagctccccaaatagtagttttatctggataaagtatatggcaactttgttagatcttnnnnatgttaagaaagca

SEQ ID NO: 1148 - DNA, 501 bp, Zea mays
  misc_feature (490)..(494): n is a, c, g, or t
aacgtcatgcagtgcaggtatgagcttgatttactaattgacttatgaatgatgccacatggtttgtatctgagtattgatgcattttgttacatttctggatactaattaaactgtactgttacagggtagaagctcatggtacaaaatacttattgtgctatagaattttgtcatgaacgtatacacgagtatttttttttctgttatagatctctgtactttgagtgaacctaaatataactggaggtattcatgggtttggttctcacaggaattcattttgagatgtttcgttgaaaaatcagttatgaatatatatactgtagtttgttagaaggacaggcctgatgcagtggtgacaagccttttcactgagccaaaggtcttggggttgatgcagcctctctgcaaaaatgcaggggtaaagcttgcctcggttatttcttccccagagcccactcatgtgggagccgccagcactggattnnnnntttttac

SEQ ID NO: 1149 - DNA, 369 bp, Zea mays
catgagcaggactgcggcctcctccactcccatcaggaccctccgtttcttcaccacttggagcctgctgcttttggtgttgtctctgacagcgactgcacttgttgccggacagtgatcctcttgatgctgctgctgctgctgctgctgtggcggcggcggccgctggttttgttgtggtttcttggcgctatcgagacctagctcttgcctccgcttcttcctgtaccggatcccacacgcgttgcagagcgactgcacccaaaccaaattaacaagattgctcatccaaaacgctggtttttctaagttggtttctggttgattgcttgctctgttgatcctaatactggataggaacaaacagct

SEQ ID NO: 1150 - DNA, 313 bp, Zea mays
acgcacgatctgaaagcgtgaggtcaccggcgagcacgaattcaagagagaacaaaaaaatcgtcgccgcgctgagaagagaaagaaatcacgccatacgcatggccatggtcgtcgtcggggcttcagggccactcaagcttgcagcagttgcttctgggggcctaaccacggcgcgccctgcgtagcagggttgggaagacggactgggatcgctcctgggcagctgttgcggtgccggtagggcagttgcgtgtttgcggctgctcctgtgcgctggagggtgtgagctgcaatcgccgtcgctgctcta

SEQ ID NO: 1151 - DNA, 706 bp, Zea mays
  misc_feature (692)..(696): n is a, c, g, or t
tccttcctgcacgcacgcagagtggcaaggcaagggttgagttcgcatatgtatgggagtaaactgaccaatgtaattctagcttaaggcttgttcggttatttgcaatctatatggattggagagaattgacattgtattgggagagattttgaattattagggattttaaaccaacccaatcccccaatttaggtcttgttcggttatttctatcccatgtgttttggatgagattggaaaagaaatgatttagttttttgatttgcttaagatttaaactcactcaatctcactaatctgcatagattgagagcaaaacgaacgaggtcttatatggattaggatggaaacgaacacggagtggatttgtacgatatggatggacgtacttacgcgtcaacaaagaacccggcatcggagaggcatttcacaggaacctcagggggaaaccgtgcgcgaaaatcgtcgcagtgcagcagcgtggccagaccaccagcggaacaacctgtgagcaaggcctgcaataacgaaggcgcgcgatgcatggagccttattagcatgtaaattaaatgagaccacgtgtgtaaatgaagaacagcagcaaaatggaatatatgtagatatagcttgtggagagatcatgcaatattctaagggggtgtttggtttctagggactaatgtttagnnnnnatattttatt

SEQ ID NO: 1152 - DNA, 388 bp, Zea mays
aacagcatggagttctccactgttgacctcccacctgatcacgaaaagaggaatgtcatcattgtggagtcatggggaagcaatgttgcaatgtttagtatgattgatgaaggcgcatctgtggattattacacctcttcgcaaaatgacagcgagaagtcccatgagtggcatatgatgattagcatccctttgcctgcagactatattattggcccctgctttaagggtccagctgaagggtatattttcctagaaggcattcgaatagatcatgaggcgggacattcagggttattctcacttgagattaaatctttcaaaattgagagggtctgtatgtcaccctatcgcttttttggccgtccatattttggtttcccacctt

SEQ ID NO: 1153 - DNA, 355 bp, Zea mays
ggtgtcaattttacgtttacacatgtaggtctagtttggatactttgggattagagtgttttggagggattggagagggtgtaaatccctaatagatcaaatactctctcaatacatctcaatccattccaatcccactcattactagagtacctaaactaagccgtagtagtttcaatgtagttttggcataaatagcacagctttcttgtttgcggtgatcccgttcccgtggttagtataaaagtgttttcgttctttcttcaaaaggtgaaattcaagtttacatttatattaccttgaagaagcatgtacatacacttcagtacctgtaatggtagtattgcaatgatgc

SEQ ID NO: 1154 - DNA, 357 bp, Zea mays
tcgctctggaagctcctgggccaggccgtcgtgtcccgcctcctctgcccgctccacgttctcgcactcctcacccctaggtgcgtgcgccagcgctcgtcccccgcccccaccccaccgccggagggggtgggggcgtgctgaaattggtgcccgtctgtgtgctctccgctcacttctctgtgggggtgtgaatttctcatctcgcggtggttttgtcacacagggtgctgccgcagcggcgagcgcagcctgaggcgtaccgcctgtacctggaactcctcaagtgtcatgtcacgtcgtccttactgtcgatggaggctgggcctaatcgtgacaagtaaggtcttgtgctac

SEQ ID NO: 1155 - DNA, 357 bp, Zea mays
tgttatgtgcgcaactttagcccgtaccagttgcccgatgttgagtcgatgctctcaacactgactccgtccttgatgagagtggttcgcaactccttcgcaccttcggcaccataccatcgccgatgaggacatcacatatgttagattcattgtgcatgttgatgtgcatcgatgtcaattcaatgctcgtagctccgccaccatgggtgtgcaccaatgccactgatgttgttgccaaccatcattgaaaggatctagatgcccaagggagggggtgaattagacttctctaaaatttcttgcaaaaaattaaacatataatgagctcacttcagctcttgtgactaggaagtg

SEQ ID NO: 1156 - DNA, 532 bp, Zea mays
tggatcactgacccgatgcacgggaacaccatcaagactccttgcggacgaaagactcggccatttgactccattctggttcttcttctttcttcttctgtcgacgtcgtactcctcaaaccaatatgaatgtgatacaccatgcatgcatgcatgtatatatatttacacaggccgaggtacgggccttcttcgacgtgcacgaccaagagggaagccagcctggaggtgtccaccttgagatgaccggtcagaacgtgaccgaatgcacgggcgggtcaagcaacgtcaccttcgacaacctgagagaccgctaccacacgcaatgcgaccccaggctgaacgcgtcccagtccctggagctcgccttcatactcgccgagaagctgaggaagcggaggatgcgccggtcgtcggtggcgtctgggctcggcggcagcatcttgcccttgccgccctttggcttttgatgtcttgcacgctggctgtgtgcatgcagggtgcagtgcaggggtgtggtaggagaatctta

SEQ ID NO: 1157 - DNA, 375 bp, Zea mays
tgccacctatatgcctgggtaaaaaaaaccttggccactagtatagtatcaagtgttgagatgccgcaaaaaccatatcctgtgaagttggtcgctgcaaaatagcccatgaatggagccaatgaacaattttgaagacaacctgctaaggagataagttatgttttttttatcaaataccaaactatttctgcaaaagccataacgaccagtaagtagtagccgcccctaccagaactagttgatttttttttcttttccaataccccaaaaccaagatccgaactatttcttagtccctcatcactgtcttccccatcatgaattgcatctttctcaatgaccaaactagactaatcaactccatcagcacaa

SEQ ID NO: 1158 - DNA, 712 bp, Zea mays
  misc_feature (698)..(703): n is a, c, g, or t
taaaagcaagcattaataataatagatgtattacttgctatttgaaagatgaccaagtcaaatggagcagcaacagatgaatccagcagcttcatgcactaattaccaataaaagaagggctccgtgctctcgctcttggaccagacatcgtaatagatgtgcagattgtggccataccgatgcctcgggtcaatctgccagcatagacacgggcgcaaaagcagcagcagcattagtaaacaactaatgatctcactggatctacaagaaccacttgtttatataggactactatgtcctaggttattatgtagcatgtggcttacagcttcgagccagtgctgccgcgccagcttctgcgccttgccgttcttggacagccccttgccaagctaaacaaaagcaagcgaacaaaacaaagctcacatgtcagccgctgcgatttcgatgtgattcgtaaattcgttcggcagttcaaacgcatctctagcagcattttcgatgaaaggacagctgtaaagctagcgacggcgatcgaggttgctaccttggccaccctagtcctggcgcgcgcccagcgcgacgccgccgtctcgggcttgccgccgttgaagaaggagacggagctgtgcttgagggacgcgaagtccagcgccttccaccacagctcctcgatgaccacggcgcagtcggcgannnnnngccgcgtgc

SEQ ID NO: 1159 - DNA, 356 bp, Zea mays
tctcacttcaagtcaaccatgcatgctcaagttcaaaagcgtacacatgcacttcatcgagacttttctccagagcgtctctcttctgtccggctactcatcggaatctcaggttattatactgaagatgaggggtatcacccaaggtctggaaccaacaactgcggtgaggataatcctggagcaaagagcagagtttggtcgcggcgtaggcattccagagatatatgctgcatcactaaagctcgagggcgaacttcctctcgtcagaagattgctctggaactggaggtggaccttttttgtctggagcagcacggggttgtttgtttttgaattgctgtttgggcttgtgt

SEQ ID NO: 1160 - DNA, 771 bp, Zea mays
atctgcattctatgttgttacagattatttcttgtggttttgtacaccttaacaagcatgtaccaggcatgagctgcagatcttgcttagaatggaaatgatcaaatctgaactcgggtctgccatagaggaaggttcaaaacagaaaatgataaaagacatctgctcgcttctgcaatttattgacatcaatctccaaggggattcttttcagtctgacggtattcttgagtatgctgaaaagaccataaagtcgaggtatgacttagtttctatgctttcagttcctctcattgttgtttagtgtactttcttttgttaacgttagtattaaattccatgtgaatagtagctgtaagcgtgtaaggttaaacttggtacctatgccaggagatgcaacttcatgttgttgcaatttaaatctggcttttgttttttttaaaaaaacagtgtagtatcagggcaagcattacacacttttgttacacaaattcatgctctatactgctttctttgccaggatcaagttttatgatttaggggaaaatggtatctgtacatgtcttctgcaactgcaagtagctaggtagccagagataccaataaaaactgactggctgagcaatgtttgcagttcagattgtgttacatgtgagtatgtgacttggataaattgctcccacttcccaaatgcttttcaggtacatcaactccatggaggatgtgatcaagaagatctacagggagatggagtttgatttatttgatgac

SEQ ID NO: 1161 - DNA, 379 bp, Zea mays
ggcggcggagcgagcgagacggccgtcggcgccggggaggagaacgcgagcgcttccaggatccccacccgcaggttcttcgtggcgctgcacgtgggcgccggcttccacgctccggcgaacgagaaggcgtaccgcagggccatgaagcgcgcctgcctagccgctgcggccgttctccgcgaggtccgttcaggcggtcactgagcgtttaccattttatggcccactatctccctccttgtcatggcttggtaagttggtatggcgtggcacctggattttagccgctgatcggaattgtcgagtgcgtagggtacaattgggatcgggagattggggcacactgtccatttgcgtcagtgagacgtggtgcatt

SEQ ID NO: 1162 - DNA, 357 bp, Zea mays
gctgcggttctttgtgaagggggaggtggcattcgtgatggcgcacatgaggcggtggaagcgcacggacaagaagttcttcggcagggcgagaaagctgttcgacgttgaggtggttcacgaggatccaccgctcgagggctggcggcacgggccggtggtttaccggttcaccgccaagaagcagcacggcaagaagtgaagaaactaccttaaggtaaaggctgcttgcttgcctatctgcatgtgttcatgttgcagcgctgctgctgctactgtttgtcctcgtttgttgagtgctagattccaatgttggaaacagaaagtagttccttggaacaatgtgcaactctggac

SEQ ID NO: 1163 - DNA, 433 bp, Zea mays
cgctagagtaaccaagaacaagacaccaagatccaagccggcaggcgagagatctgctcgtactcatggctcccggccccgatgcacgctgcagctagcgcgcgccttgtttggttcgatcgagacgagacggccgtgcagatcggcttacctgatgccactgcgccgcatccatgcatgcaaggatcccaataattccgctcctcgccagagcgactctgtctcccgtgccgcgcgcgcgcgcttgccagacgagctcgggacgacggcgcgacgaggggggaggacgaggacacgacgacgacgacgacgaggaggaggaggaggaggaggagcctactggagccggatggggacgggcggcggcggaggcggagcggaggaatgtcccgtggatggcctgagtagtggaattgctcccggctccttccct

SEQ ID NO: 1164 - DNA, 380 bp, Zea mays
atgtggtaccttgggatgcattcacacccaaaggttaacaagagatgtcacacaattttgagtgtctatgtgaaacatcaaaggacattgtgtggtaccaagagatgatgctttagcaaagtcactgacaccattattgttgaagaacacacatatgatcgatccatccacatgaatctatgtgtgatgcccctgcttagagcaccaattaattgttgatgttttaacctctagctagtaacagatgacatgcataatcaataagagaggtagcacacatgatacatatattatattagtttaggcaaggagtgtccaaactctagtgtataataatgttcttattgtttttgtgttgtatgctcatgtcagttgtgagt

SEQ ID NO: 1165 - DNA, 321 bp, Zea mays
ctgtctcggcggcaggcgtgcagggtgcacggaaaaaggtggtcctcgcgggttggtcggcctcggccgggctggctggctctgcagctcgccttgccgccactactctctgcgtcctcgtgaagaactgctgcttctgctgctacatctcatcagcttttacttctctatatctcctgtaaatcttagcttacttttcgggtggggttacggccggcgatttcgctatagattttttttgttttgttttgtaacttttgttcagcggagattattatttgggtgattcttgcagtaaaactggacgggtggttccgtata

SEQ ID NO: 1166 - DNA, 578 bp, Zea mays
actgagccatattactcgtattcgcggatcatgatgaccaagttctacatattcgcaaactttttcgatgacctttacgacaactatggcaccacagaggagagcgatgtcttcaccgcagccatggaaaggttggttacatttatttgaaattattacacagctagcatcatctcgggggtgaacaaaatatttaccatttccttgattaaaaaaatacataatgacgacaggtgggatgaacagatcgctcatcaactttcagcaggcttgaaggtactcttggtcagcatattgaatgctacaaacaagatcgaggaggagttaaaacttcaggggaacatgcacgctgaactggtcaagaaaatggtaaacaaaattctgctagctccaagagatcacagtacatactaagagatcattaccatccttacatatattttcacattttataggtgattgacactgccaaatcctaccacgctgaggtaaaatggcgcgatgaacactttgtgccaaccactgttgaggagcacctccaaatttctatccccagtagtgtttgcatggagatgaca

SEQ ID NO: 1167 - DNA, 471 bp, Zea mays
  misc_feature (465)..(466): n is a, c, g, or t
ctccggctctggctccagcgaggatggtgagcgaaccggccccgtgccttcccccgctcgtcgcgcgccgcccatccgcatcgacgtcgccatgggctccttctccgcatgtcgccgccacgagatctgcccgcgcgtctccttcggcagccgatgcccgacggccgtccgacctccgacgcatcgtcgccggtccggtcctcttcgccccctctccgctgcgtggcgccacccgtcgtcacctccgcccccttcaccgacctctcctgggtcctccacacactgctcgtcaccatcgtcatgcgcgaggcgctcaaggtaacaccatcctctccgtccgtccagcatctccctccttgcagatctccctgtttccccttccctaattccatttagtcccgccattatctgatccgtacacaagatgatgttaggtagttgaatttgatggcaaaatcgactgcnngctag

SEQ ID NO: 1168 - DNA, 389 bp, Zea mays
tctgcctgcccagattcatctcctccaggccacccctccctaggttctcttcccctggatctctccgccacccttctcgcttgtgcagtggtccattgagccagcaccacatgcgaggagctgggaaggaggatagaactggtaagtacctgttcattctcctctctattcatgtctattcatggcagaatcaagctggcaaggagttgggaaggaggacaaaactgagaatgatttccatctaaccattggttgattatcttgtatttgctagaatgttttgtcggttgatggttgctgcatcatgtattcgatggactaattttattttgaacttctctagccgatggtaactgctatttgaatttaaactgtgctaccaatcatgt

SEQ ID NO: 1169 - DNA, 498 bp, Zea mays
agacgatcgatcttaagctgtgtgtgtgtatcgtcaagtgaaaatcaggctaacatcctgcttctcgcggacattgtttgtgttgcattgcaggtatacattcggttcaggcagactaccacgagcagaaggtgaccgtgtgggggatctgcgaccgcgacgacgtgctcgctgccgtccggaagaagcgccgagccgcgcggttctgggatgatgatggcggcgaactgggtccacgcgagcgtgcgccgacgcccggccgagaagctcccaagcagtacctggcagccttcgccgcgtacaggtggaggaagtcgtggaagaagcttttcccgctgatccgcctctgaaattgaatctcaccgtgtgtgtgcttaagcttattggcttctagcttctccacaagtgagcagtgtgtgtgcctgcttcttgaggacgtctcaggaaccggaaaaaggggttggaacatggaacttaagttctaacagtagcccgtgc

SEQ ID NO: 1170 - DNA, 489 bp, Zea mays
cgcgcagcagccgtcggcaccccctgtggctgaggtcgcccaagacgctgcggacgcggacgagcaggccatttgggaaatgatgctcgcggaggccttcaaggccagcccgcgcaccgaagagctgagcgatccggacgtgctaagaagcctcgtcgcgccggtggaggcggagctggagaccgaggaccacgccgagcacacgctgacacagcagagatacgagcaggccgtcgccgctgagcccaacaatccgctcatcctcgccaacttcgcgcagttcctctacctcgtgcagaacgaccacgaccggtaggtcccctccgtccacgcccacacgctgttcgacgaattgccaacgcagccgcagctattcaccaataaaccctcgtctcttcgcagggcggagcactacttcgagagagccgtgcgcgctgagccggcggactcggaggcgctgagccggtacgctactttcctatggaaggc

SEQ ID NO: 1171 - DNA, 609 bp, Zea mays
cgcggctaaaacccgccgagccggaccaaatcgccgccaccatcggagatggcgtcgcaggggcaacggtcctactgtcggcattgatgcagccgtcgcggcagctcgagtttctcctccgtagcttcgagcgcgcctctaagatgcgcctctctcctctcgaactcgattcctactcaggtatgcaccccgttcatcctcgcgttggattcaattcaatgaaatcgagtttcgcatgcaagttggtggaacactacctgaaggcctcttctgtttgtactcactgcagagggctgcatggtgcagctcgcggagggagcagcccaggacgtcgagagcttcggtgatcatgtaaaaggggtgttcggctcttcgtggaaggaagagctctgtgagggaaatcacatcgatggtgagatcgccgtgggcagcccaacacttctggttatcagctcatctgctttgcgatctttagacctactgaggtagaatctgttgttccaaagtgcaagaacatgttttcagttttgcactgcatattcttttagataatgaagcaactggttgtaggggtttgaagatgtttactaaagaatgccgaccagtaaa

SEQ ID NO: 1172 - DNA, 332 bp, Zea mays
agtaaacagattttagtaacaaatagagaatgttcatcaactttttggttgtattatgttccctaacagcggtgttatggtgaaacagagttttctgcacgttgggaaagctggaagagtcttttctactcagttttctgctaacagtggtgttcatgttacgtttgcagatatggacctcggtggttatgttttctccacgttgggaaagtcttattaactataggtatgatgcattagtatgtcatgtgtgaactgtgtcctttgctaagccgattcagtagttgaattccccaaatctgaaaatttcctcacaaagacattaaagagca

SEQ ID NO: 1173 - DNA, 538 bp, Zea mays
gcgtagattctaacaggatgtagcgcatacaagtgatttgaatgtaatttaattccataatgtgcaggtatgtatcttgaacatcattaactgtgcattcctcactttaaggtgcatatttgtgtagaacagtagaatttaagttttgccaaccaaaatctctgggcaattagttctgcttttgtgtatctttttccatagtataattaatttattcttccatacctttcaaggaattaatggcaatcttatgaaaccggacaggactttatggaatcccttccgaactaaccagcctcatgcaaatgtcgtggttcaagctaaatccaaatcaatcaccttcagcggagataaagagcttcctgcaatggaaatgacgtacggaacacaggccaacagtttaccctgtcatctcatgtaatgagagtgtacaaaatactgtctaaattgaaagcacattccatagaagattacattgtttcctacatattgtgaacttacagctaggagttgagattgtagaagcccacagatgtgt

SEQ ID NO: 1174 - DNA, 817 bp, Zea mays
  misc_feature (681)..(682): n is a, c, g, or t
cggctaccgcgacggctccgagctgcggttcgacgccacggtgtcgggcacgctgggcgagggccgcctcacggaggtggaagggatcaagaccaaggtgctcgtctgggccagggtcaccgccgtcaaggccgacgccgccaaggtccacttcaccgctgggatcaagaggtcgcgcagccgggacgcctacgaggtcgtcaggggcggcatcaccgtcgacgagttctagcttagttttgctttcgcggctcacatggatggacgggcttcctcttgctcgctgcacgctgagatggacaagattgttgctttcagttgcaagaataaattctacacccattagctatgtgcaggggcggagccaggattacgatataaggggggccaatcaactaatcaatattatatgataaaaaatattatataatgttataaagtttaagcactcgctatggaataagaattctaaatctttataaattattttggtccatgagtccattttctagctaattgatatattgaactaaagttatgacgtaagacaataccaaaaaataaagacgataaaatgatgaatatccgactaatgagattcaacttttatataatggatctagtattcatgagacaactaacaaatgtatgagagaattcaaaaatccaactagccttaannatccatgaaaattcgtcaacctatgcaggtacatgttaaaatttgttgtgtacacaccaactatcagatgacaactttagttgaaatttgtagatttattatctacgagatctaatggagtatgtatataagttg

SEQ ID NO: 1175 - DNA, 1211 bp, Zea mays
  misc_feature (1145)..(1145): n is a, c, g, or t
  misc_feature (1178)..(1181): n is a, c, g, or t
  misc_feature (1206)..(1206): n is a, c, g, or t
tctgctcccgtcgtcgctcgctcaggtatgcacagcgtcggaccctcctcctttcactattaccttataggttcctgatttgagttaccaacagtgggtacagacgtatagtaggtttctaattcgacgaactccaccttgagcaaatcacactaaccctagcttctcgggtacaataggttttgcacttggattacttgaacaaatcagacaagaagtggctagatagaatacaactggaatgattctatgtacgggtatgattctacatttattgccttttctacaaatcgagttaaatagtatttagaatagcaacaatgtaattcattttatttttcattttcattttatttttttattttcagctttgacgatgatctttcattgcttgctatctgtacagatgcatgcaaagggttagaaaatgcaataaagcttgttttccctcaggttgaccaaagagaatgatttaggcatctcatgcataattttgtgaaaatgtttggaggtgacatatcctctaagatgtaccctacacctagggcatataggccagaagtttcatagtactttttcaatcaagttgtagaagccccccaagatgtaaagaaatggctagatacttaccacaagctgaaatggaggaggagtcagtttaaccctgccatcaagtgtgattatgtcaccaacaatctagctgaagtattcaacaactggattaaagattggaaggaccttcctgttgtggagcttgcagacaagtgtagtggcaagctcttacctgctattacctgataatggtgttgtgggaaaacggaggaaaattgggggaaagcttactgacaagatcttacctgctattttgcagcagttgaaagcaaggactagaggcctaggacatctatcagtgacaaaggcagttgaggacagcacaaacattcacaataggcatgtggtgaagtcatatttgcattagtgtacataccttgagtggcagcacaccgacaaaccttgcccacatgcattggccttgattacagcaggaggattttgtgcatgaatactactcagtccaaaggttcaaaaaagtatacaagagaataattaaaccactaccagataggtcgcaaactctcaatgancgcaagtggaacaaccctatgtggttggtgcannnncttgacaagagaggaagaggaaggntaaaa

SEQ ID NO: 1176 - DNA, 350 bp, Zea mays
gctaagggagggaggagcaggggacagccggtcccgcggtcaccatggcgcggtgcagggaggccgagtggaggacggcgttgcagccaatggggatgacggtcgggcgaatcggcggcacggatgtcagagcatggagctcgcggcggcgcacccatggaggacgagcgggaggaaggcgaggagcggcctggcgactggctagggttctcggccggtccaggacgacggcaagctccatgggcagggagagacgagggcgaccaccagggcgcggtgcttggggatggaggccgagcgcgtggaagggggaggcagccggcgtttgaagacgtggtgatatgttgatg

SEQ ID NO: 1177 - DNA, 400 bp, Zea mays
  misc_feature (347)..(349): n is a, c, g, or t
agctctggcttgccgtcctccgcccgtactccacgctactggatctctagcttgctcgtacgggatctctacgggatctttgtactccacgctactggcttgaggtattcaaactttgcgacactacagagattaaagtggcagtatctctgttttatctttccggaagcctgcatgcggtcaatcaagtcagttcttgcaaatcaaactttgcgacacttcaggcactcctcaagcatttctatgttgttgcaaatgaaaaccagcataagtagtcaaatgatatgttgcttctgttctgtgatttacaccattttaaatgaaacttctggacctgttgggttaannntgttctgtgatttacaccattttaaatgaaacttctggacctgttgggtta

SEQ ID NO: 1178 - DNA, 846 bp, Zea mays
gagaagaactcgcagcccaagtcctcgtggtagttatggaggccatggcaagcgccccacaactaatcttatggtgacgaatcttggtccggattgtaggtaagattctctctgctcctcctggatcagaagtagaatggattttatttggtgctgctgtcaatagttattgaagtggtcaagataaaatatgtactaatattggaattcatcaaagggaatacaatcaacaggcttcttaggattgagtttttaattttgcttgacttctagtatctttttttcttgcaaataaaaaagcatgttgatcttgtttagttttgaaattagtcccctggaatgtagctcatgtacgaacagatagaatttataaatatatgtacagttctatctagctattctgagggatttgtaatgcattgtgctttgtaagttatgtcttaatgaagcatacccctcccttccctgatttactgtgtttttcgttgaaaagttcttttcattttccaagtttatgatgtgcttcatattgcatataacgatgagaatggatattcattgacactacacaactgtaactttgctgttatcacaactgcaggagttatcaccttcgtgaaccattttggtttattttgtaggattccgactctcatcaagtgactcctcccctcacgatgactttgcggacagatgtctcaattatagtggtggagctacgaacaacaatccgatgtcctgatcgagagcgatggagctaatgtttgaacttgtgtgtttgaacttgtgaactaaaaatgtgaactatggatgtgaacttatgtgaatttgtgaacttatgtattg

SEQ ID NO: 1179 - DNA, 517 bp, Zea mays
tgcgagccaccgatttttcttttcatgaaaggaacaggtgtgttttcagatgcaaacatggccgtgctcccccatcagcaaatgcatataatctgtagaatgcaaatcagtctctattcctgtatttttatttagtgacacggtcatgcttaagtagactgtacaattttttttttcacttgcagcatggtgtggtgctggtgctgaccattacgagcctttgatcgccactgtcctccagcatgttactccagacaaggcagctgtcatcctttgagaatgactgcagttttttctacctcccttagcttttagtcagcggtggagttgagacaattttgttattggagctagagtgctgaattgaggagcgacatcaatatgcccaagagattagagagacggccaacctgagtatcttgctctgttgcggggttttgcctgcttatgaagctgtgtatggtgattttgttgttgtatgtttatgagtaggctctgactagcgaggatattctga

SEQ ID NO: 1180 - DNA, 344 bp, Zea mays
  misc_feature (334)..(336): n is a, c, g, or t
ctcacgtccgcctcgctatgacgcatgtcgttgtctttgatctcagtacctctttcgatacgcacctggccgtgctttgcctcctcgtggtcagcaccatttgggccatgagggcggtagatctcgacactgcttcacatgtctcttttagaggtttctgtcgtggatggttttcgccctctcgtcgtgttcgtgatcatcgtcgatcgtcgttgttttgagagaaattaccggaaggtatggagtaggaagcgaagctgcacaacacccgtatgatgttcgacgacaagcccgagccaggatttatctgcattcttacgagtattgagtcacnnntgatgcta

SEQ ID NO: 1181 - DNA, 751 bp, Zea mays
ttattcttttagcttatgatttgaggaatatatttttttatctggaatccctttactagtgttattgtattttaggaggataacaacaatgtgatgccggagctccaatcgacgagtgtaaggttttgatgctcctgccccaccagatattatctgcatatgcaagcttgtacattgtcacaagtaacttatattctaattgcatttgttgcaaaaccaaggtttcaattactgggctgctattgtgcctgcctggtgaacattgttaggagctctcctaacattgcattggttatagtaaattctatctgcatagatttttggttagatgctcatgacatgctagataggaaatcttgggaggcaggatgtgaatcaatgaaacattctggttgcatctgtacagtactgtcttaatcagcgaccatttaagagaaccacattttggactgagatttttttttttatctgcaggggcttgctgaacggcaaaatgctcgggggtaatatacatctggaacgtcctcttcttgacaacctagttattgaatagacacgtagcagcatgtatgtcaaaataattttgatagctagcagttaaccttgcactgcatgttgggacatggcccatgggtattatacttcacatgaatgatgaagcagcagtgagcggataatgcagcatggttttggattctgccgactgttgcgcatggatgttggcgttgcgcatcattttttgctccgtcag

SEQ ID NO: 1182 - DNA, 403 bp, Zea mays
tggctgcctgcagatttgagcattcgccatcgcaatcccttgcactctcaagacctgtctgcaagcacagccccaaagtcaaacagctgaactcgtcagcaattactgatttttgcagagaatgcttgcataactttgttaaagaagctgtcagtttggcattgtctggcgggcagatggatcaaactggtaccccctgttagattgtagacaaatttgggattctttcttgtcttatcattgtgaatatctcaaagcacaaactagggacaagttgtacaatttatggcatgttaatgcctgtcctgtagtgtagttgccaggtctaatcagtactgtaacaactaacaaaatattctctttaatatgccacgaccatgcctgaagtattggagcctaacat

SEQ ID NO: 1183 - DNA, 403 bp, Zea mays; identical to SEQ ID NO: 1182

SEQ ID NO: 1184 - DNA, 555 bp, Zea mays
ggaggccgttgtggatcaccaaggcgttggaaaaccctgtagtggtaagaatcgatcagattgacattcatccttgaccgtaccattaggctggttcgttccagataataatcctgcagaaaagaaacccaaacttaattgctgcacaagcacaacatcgatcatcatctaatcaaagactcttgttatcgcgtcagacagtccaggaaatgtcaatgcagtcgacgagcaacctgaccatcagatgggcgttgagagggaagcctaagaacccgttgttcgcgagcgtcggaggagacgtcatcgtccgcgtcgagtcacggttcgtcctgaaccagataagcgggcaggtgctggagcaggccgagtcctgggacctctccgcctcgtccctccctgcccaggcctacttctggctgtcccgaagggtctactccgccgtggagtccgggaaggacgcgatcgaagccgccaagagcgcggcgtcgtctgggctgacgaccaagggagaccagaatctcgaggcctatccggatccttctgctgatcctacaa

SEQ ID NO: 1185 - DNA, 360 bp, Zea mays
ctcgccgcggaccttctctccttaaccgtacggcacacctctccgacgacgttcctccgctgcggccgtagggttgcgcgtgcggagctcgtcggagtcgtcgtctcgcgtgaccgcagggagaagttcctccgcttcctggtcgacgacggcactgggtgtgtgccgtgcatcctgtggctgaaccaccagtacttgaatgctaggacgtcctctgggccatcgtcagaccatgatcctactgcagagatggcgctgaaaatgtcagaggaggtgcgtctaggcaccctcttgagggtgcgagggaagatcgcctcgtatcgtggtgcgatccagattactgttagagatgtggttccg

SEQ ID NO: 1186 - DNA, 345 bp, Zea mays
tcagtcagttgcagcagtaggacagtgcaaggcaggtctttggttcttggatccaaatgtaattagctggtggtttaggtgattttgttggactgtaggatcgggcgctcgaggaagcggcagggactccgcgttttgttcttttgccgatgttccaaggtctcgtctcacgtgtacatggacatggcacggatcgagcggtggaagaagcctttttttttaaaaaaaaaagtactagtttgtaactggatgcgggatgtgaaatttttgggcaaccaggccggcctgctgtaatgcaaatcttttgcttttgtttcaacaggaaagtgcaaagctgctattgaa

SEQ ID NO: 1187 - DNA, 387 bp, Zea mays
  misc_feature (376)..(384): n is a, c, g, or t
attttccttcatgatcctgtgagcttcactgtcgcacttcatccagagtacttcacattcaagaagggtgtggtgagagtagagatccagggcatttgcactggcaacactttgatggatcaaggattgaaaaagtatgtttttctctgagtaactcataaaagattgacccgtctgatgttttttagtttcagcattcttacatacacattgatatgacataaatctcaccaaattactttataactcttggagtaagcaaaccaaggcaaaagttaccccacatgatctatatgtttcagcagatttcacacttgtttcttcttgttcctcctatgctgcaggtggaattcagagaacccatggtcagggtatnnnnnnnnntca

SEQ ID NO: 1188 - DNA, 484 bp, Zea mays
  misc_feature (260)..(261): n is a, c, g, or t
  misc_feature (397)..(413): n is a, c, g, or t
  misc_feature (419)..(441): n is a, c, g, or t
ggccgccgccgccaccaccatcaccaccacgaccaccatcaccaccggcaccaccaccaccacgggcactcgcacggccatgaccaccacccccacagtcaccaccacgcgcaccagaggagaaagatcgagcccagccaccaccacgtcctacacaggcagcagcccgggacagcggcagaaggccaccggcacaagcacgacccggcgctcggcgtgcagcacagggaggccgggcacttggggcacaagcgtcggcnnggcaaagcggtggtcgcggaggacgccctggacctggagttcagggaacgaaggccatacgaggtcaggcatgccgggcacctgcaccgcgaccaccaccaccaccaccactcctgggaagtgtaggaatagttcnnnnnnnnnnnnnnnnntgcatnnnnnnnnnnnnnnnnnnnnnnncgaccatttaagagaaccacattttggactgagattttttttt

SEQ ID NO: 1189 - DNA, 590 bp, Zea mays
  misc_feature (585)..(586): n is a, c, g, or t
aacccttctccttctgcttgtataaagctacctatagcgcagaagaggctgatcggctgagctcatcgcacaaaagatatataagaaccaccaattggtaaccacaagcaagcaatatatagagagtcaaccttgcagcggcgatgaaggttcgcgtttaatttttcttcatccctccatcgaatcctcttcctctatggacttctcactgttttttctgcatctcatcgtcagatagtgcttaaggtggcgatcacctgcaagaagtgcaaaacctgcgtccttgggatcacctcgaaagttaatggtaagccatggccaatctttatttctgtgttgccattcaagggtgttcgatgtctggctgatcgacatgctagctgtgtgatgaattctgaatgataacggtgcctatactacagggatcaagtccctgacatacgacgacgagaagagcactcttacggtggtcggagacgtggacgtggtggtcatcgtggacgcgctgcgcaaggcgaagcatccggcggaggtggtgtcggtgaccgacgagaagaaggaggccgaggagaagaagaagaaggnngagg

SEQ ID NO: 1190 - DNA, 590 bp, Zea mays
  misc_feature (112)..(112): n is a, c, g, or t
  misc_feature (122)..(122): n is a, c, g, or t
  misc_feature (131)..(131): n is a, c, g, or t
  misc_feature (139)..(144): n is a, c, g, or t
  misc_feature (163)..(165): n is a, c, g, or t
  misc_feature (167)..(170): n is a, c, g, or t
  misc_feature (179)..(181): n is a, c, g, or t
  misc_feature (186)..(206): n is a, c, g, or t
  misc_feature (243)..(245): n is a, c, g, or t
  misc_feature (256)..(257): n is a, c, g, or t
  misc_feature (264)..(274): n is a, c, g, or t
  misc_feature (276)..(284): n is a, c, g, or t
  misc_feature (287)..(310): n is a, c, g, or t
  misc_feature (312)..(370): n is a, c, g, or t
  misc_feature (414)..(416): n is a, c, g, or t
  misc_feature (505)..(505): n is a, c, g, or t
  misc_feature (585)..(586): n is a, c, g, or t
aacccttctccttctgcttgtataaagctacctatagcgcagaagaggctgatcggctgagctcatcgcacaaaagatatataagaaccaccaattggtaaccacaagcaancaatatatanagagtcaancttgcagnnnnnntgaaggttcgcgtttaatnnntnnnnatccctccnnngaatnnnnnnnnnnnnnnnnnnnnncactgttttttctgcatctcatcgtcagatagtgctnnnggtggcgatcnnctgcaannnnnnnnnnncnnnnnnnnntgnnnnnnnnnnnnnnnnnnnnnnnnannnnnnnnnnnnnnnnnnnnnnnnnnnnnnnnnnnnnnnnnnnnnnnnnnnnnnnnnnngacatgctagctgtgtgatgaattctgaatgataacggtgcctnnnctacagggatcaagtccctgacatacgacgacgagaagagcactcttacggtggtcggagacgtggacgtggtggtcatcgtggacgcnctgcgcaaggcgaagcatccggcggaggtggtgtcggtgaccgacgagaagaaggaggccgaggagaagaagaagaaggnngagg

SEQ ID NO: 1191 - DNA, 230 bp, Zea mays
gtctctccggcgacggagccaacaagtccagcagcgtcaaggtagatcgagtgtcatgagctggctgctcatctgaatgtgcgcctgtacatactccatagcagcacctgtgctggaattttttttttcgcgatactcggagaaatatatagtatagacggagcaagaggggattgtttttgttttcatgtgtcttatattgtctggttctgttgccgtctgtgcggttc

SEQ ID NO: 1192 - DNA, 620 bp, Zea mays
catgccgcgttagaatatatactattataatgtgttatctaaaatatgaggtgatcttctttctatattggcattgtcatggcatcatctattgactacaattatttatattacaaaactagttgaaagtgttgtgagtctaatgcttttattagatgtacatagatatgactctgatgttttctagatatgacactacttttactctaatgttttagtagatctactatttctctattatatatagataggactctatgttgtacctgtgtatatatactggtcttagggcctcatttgtaaatgcttttcaggacgcccattcagttggcacattgacgttgtgtgcatgcaccacaattgcaacattgacgatggagctcaataccaccacacgtgatgtcatggacgaagttgtcgtccaagcacatgatgattattctttcctcgctcatcgatcgatttttgtatattgtgtttttcttggtggttccctcattgcttggaagattaagaagcagttagcagtttccctgtttgagtacagaggttgagttgtgtgctattcctcttgctacggtagaggtgacttgggtatggtggttgcttgttgattttgg

SEQ ID NO: 1193 - DNA, 311 bp, Zea mays
catgtgcaagctcaggtgcaccaaggagtgggtggggtgctacctgctggtgatcctggtcatcgtcctcctcgtcggcgtcctcttcggcctcggcgtcttcaggcacggctacgacaggatcacggagatcggccgcaaccacacctgcttcgactgcaacacaacaggtaccaactgaccgagccaccggccgtgccctgctcctgcctgcctcggtcgggatcggtgccagcgtgcgtgttgatttgtacgtgtgtgtggtagctcctccgtggaccgtacgtgtgtgcaaactcctgtcgcttggt

SEQ ID NO: 1194 - DNA, 321 bp, Zea mays
ggagtgatgtattggctaacagaagataaaggaacaagctgtggcatggcagttgtatcgtttgatctcagggaagaaatgtttgccttgattcatcttccagcattggaggtgaaagagacagcctcttgtgccaccatcaaagttgcttactatatgactgagatagatgacaaagtgtgcgtagtgactatgccataccaaagccatgcaccgaggtggcgccgaaacaacgcagagctttcaggcaggactgacatttgggctcttgaaagtgacaagtggttcctgaaatatagcatccagtcaccatctctatct

SEQ ID NO: 1195 - DNA, 512 bp, Zea mays
acgggacgccgtgacgcaccccttccatggtcgagttccatccacagtgcgagatgaagcatgccaccgcagggtgcgagagcacgcgctgctggggagcccacccgacgacgagccccgtgtctccgacgcggcacctgaacctgtccagccagccttggtcgacgccgttggcaaagttcggccggaccacccacagaaacgggcgtcccgtgagcgccaatccgtcggcgagctcctggagccttgcggtgtcgaagactgtaaagctcccgaaggccacgtacacaactgatccgggggcctgtgcgtcgagccaggcgaggcaggccctgtcttcgggccagagctggctggctgaggtccaccttggcgcctcaaggggcccgacggccagcgccgccgtggggaggagggccagcacctcggactcgatagcatggaacgtgttagtggcagtgaaaccagccgattgtgtatctgcgctgtaatttaagcaagcatgagagtag

SEQ ID NO: 1196 - DNA, 155 bp, Zea mays
gggtgtcgctatcactgccgacggaatcacttctccattgccgctcagcaccggtgacccgatcccgggcgttcgagtgtgggtgcggggcattctgggggaaaatctaggtgtgtgagtccttagggcgatagaaatttctcaccatcgttgaa

SEQ ID NO: 1197 - DNA, 542 bp, Zea mays
cgccgccgtcgctgggtcgagggagaaggcagatcgcggcagcggattcggcggaggacggagctacaactgatgatggatctctcggagaaggcgtgatcagagatacgattcgcagcgccaggtttgtgtgtacgtactacttgccgatgccgatgcaaaagcagcacgtagcgcatctgttgagcgcgtgttcttcttagagcttagtaatagcttaattatccttgtttttccccctgttgtacaaaacaaaacttgcaggcttttttagatggttgatagagttttgttacataaatgtaatgttagcttcatagcttgtgtgaggtcatgtaaagttccttttgtataatacgtacatcttgcgaagtgaaagcttgttacgtttacattgaagagaacgacatgtgaagacttgtttcacaggggaaaaacataaatcagggtggcggcgaccctctctgccaagtcacagcattttgttctcttgtgttttgtttgtttccatgctgatcccgatcaatgttgttctgttaaca

SEQ ID NO: 1198 - DNA, 324 bp, Zea mays
ccccgacgagacggtcagccgcctcctctcccaaggtccgggcacggcttgcgctgtcctctccccactcccacgattccgtgcctgttttgctgttcgttgcagggcgcgttgctaggatttagacgggtctgctctcgtcgatccgggcgattcgtcgacgtgaaggttgtagtctgagcgctcggcccggttagtgggaatcagacgcacctgtgttgtttctttgcccccctgggcccctcgagttcatactagttttagttatctttaagtcggtatatcagatagttgtgaaagatggagtccaagtagtattagacg

SEQ ID NO: 1199 - DNA, 1251 bp, Zea mays
ctggctgtttggcatttcgcccattcatttctacagagttctggtgcctttgaagtttattgcaacgggcaactggtaggttcctgtgaacacctagttttgctgcaatgttgttctcaagtacttttacttttgtttgcaacattatatttttttcgaaatcatttcatttcttgccgaatgttttctgggcactgaagctccctgagttatctgatttacttcattgagctattcgtatttcctctttgatagaagctagtaacattttggaaccctaggtaaactagtttcttttcctggatctctgaactgaaatgtggaggtcaggtcacgtcacgtttatgcatacaattctccatgtggtggtagaattatcaattgttggtcgcgaagctttggaaaaagagcaagttattctagaacagtatgagagagcagggtttgttatgtttgcttgtatggcatctgtgcttttctttctcttggtggagtcaaagtactaatatgtccaaattcataattactgaagtgcgtattagttgtacttatgctgcatagtattgtaccaatagccaaacaatgagactgaaagtggtactgtaaatgcaacaaaccaagtaggggaaattgttgagttggtaatagtagacaactatgcagggcaggccgttccaaaatgacaagtggtcggtgtttgtaaaaatagcctgggatctaggtctttccttcatatggaactgcaagcttcaagacatcttgttttcttatatatgcagtccatatggatcattcattcaaatggtaaatatgatgagcaatcatagttctttgaagtgaaactatagttttactctttttcatatacattgtttgaaccattcctgcatttcccttttccgtaactgaatttcttatgcagccgacctggatgtgccttgcttatgctagcaattttctccacttttcaggttttctccaaactgtctgagcagaggtttcctagtgaacttgagctacaggagctcattggcagtaggataccggattctcagattgtagaaaatctggaaaaagatctggtcctagaaaaagatctggtcttagatgatgttgatgccgatgatgccatgagagactagcttcgcctgtttgtttgttactaaatagacagaacttgagagtttcacaacttaattgtcaaaaacatattgccttataatttacactttattttcctcacttatgtac

SEQ ID NO: 1200 - DNA, 436 bp, Zea mays
cgtgaacccaccgttcttggcgttgcaaggttcaggagtttggtatgatcaggggatatctgggagcttttggggagcacagcaggaacggaatttcggaggttgtcaaatgccatggcagcagctaagggccccaaggcagcagcagcaccaacaggcgcagcagcagtttgggaattggaactacgggatgcaggggcgtggcttaagacacgaaagactaagtaatacgaggagcattggcaatgtgaggtatctggatagaaggcaggctaactgtgatgggggtgatcggtacaaagagaatgattgtgagaagggtcgtcatcaggagggcatcttggacaaggaaagggagcaggagaagcactggaatcagagggatagacatggtggcgacaatcagatggatagaagagtacgtgcaaggtcaaga

SEQ ID NO: 1201 - DNA, 206 bp, Zea mays
  misc_feature (61)..(62): n is a, c, g, or t
tcgccgtcacctgctcccatatgccccgtcatctgctcacggagcgtcgccgtctggtctnnggcgccgtcatctgctcccgcagggacttggtctgtcggcggacgcacctcccaggtctgcttcctcgtcttgtgtcgcgatggacccaacgaatcagagctcctcaggtgcagggcggcaccgctctatcgctgctgcgaagg

SEQ ID NO: 1202 - DNA, 646 bp, Zea mays
aattcactcgaggaaacctcagctctatagaactcgcatatctgaagagttccggggctctaaccgcatagttctcgtaacgtcagatgtttctactcgtggggtgaactatccagatgtcacccttgtgattcaggtgaaattcgattcatgatgatgatgtagttgaagtttacggcagtatgtacggtttatttgcctaagaagctggagaattgatgtctaactcttgaaaatgcagttgcatggcatgattaaatttgcttcagtactgacacagatgtttctcggattaggttggtgttcctcccgatagagagcattacatccatcggcttggaaggactgcaagggaaggtaaatctggcaagggaattcttttgcttgcgccatgggaacaatacttcttggacgagataggcgatctcccgattgacaagtatccagcaccagacattgaccaggagatgaagcaaaaggtcttcttctcttttaggacagttggctgtttaattgcgctgtagtgtgtgtcatacatttgtttattcgtgtttttgcaacgcaggttgacgattcaatagagatggttgacatgagcatcaaagaagcagcataccatgcgtggctgggttactacaactccatc

SEQ ID NO: 1203 - DNA, 646 bp, Zea mays
  misc_feature (108)..(110): n is a, c, g, or t
  misc_feature (284)..(284): n is a, c, g, or t
  misc_feature (378)..(378): n is a, c, g, or t
  misc_feature (456)..(456): n is a, c, g, or t
aattcactcgaggaaacctcagctctatagaactcgcatatctgaagagttccggggctctaaccgcatagttctcgtaacgtcagatgtttctactcgtggggtgannnatccagatgtcacccttgtgattcaggtgaaattcgattcatgatgatgatgtagttgaagtttacggcagtatgtacggtttatttgcctaagaagctggagaattgatgtctaactcttgaaaatgcagttgcatggcatgattaaatttgcttcagtactgacacagatgnttctcggattaggttggtgttcctcccgatagagagcattacatccatcggcttggaaggactgcaagggaaggtaaatctggcaagggaattnttttgcttgcgccatgggaacaatacttcttggacgagataggcgatctcccgattgacaagtatccagcaccagacnttgaccaggagatgaagcaaaaggtcttcttctcttttaggacagttggctgtttaattgcgctgtagtgtgtgtcatacatttgtttattcgtgtttttgcaacgcaggttgacgattcaatagagatggttgacatgagcatcaaagaagcagcataccatgcgtggctgggttactacaactccatc

SEQ ID NO: 1204 - DNA, 545 bp, Zea mays
caatgaagttgttgaaaattcagtatgtctatttccgcaaaattttattgtctatgaaaataacctggattgcgttgtatgcctaccaaatcatttcatgatatgtttttattctcaaatgtctgcaggaagaggagagtgcgcaacaagttggacgtaaaagagcagctcctaggggtagaggtagaggtagaggcggaggttccactgcaaagagggggcgaaaaacagatattgcttccatgcaaaatatgatgagcaaagatgatgatgattcagaagatgaaccgccaaagaaaactcctcgggtcagaatttcacctgagtgttctcagttcacatattgtagccaaattttgtgatgcgctacacctgaaagcaaacatattgtgtaaaatgagttgactcagtaagattttcttttttggtctttcgcaggtcaccaggaactatggcgctgtcaggaggagatgaccctttaaggagttcttgctcatgagagttataggctaggtgttttgtcttgtaaagttggaagagccgac

SEQ ID NO: 1205 - DNA, 497 bp, Zea mays
aagggataccaaagtaatggtaatttcggtcttggagatgcacttaagcttcggtaaaataggtaacagatgtttgttttctctagttgatcttgatattttgtttctggataacattggtatctgattgattattgctattgcagttagtttgttctatttactgtttgtattgttttacaggagcagatgtttcccgttatagcaaacgtagcattcagcaactaagaaatttggaccaaacaacagctccaaaagcttgtaccatgccagtacactggtcaccaagatggcaagattcaatgacgccctatcaaaatccggggtcgctgaagcaatctaggaagtgtgaacttttgccggaacgcatcaacctcacagaatgaacaatagggtcctcatgctcaacatgtcatattctgatatccctcctttctagtttacatgtagtggcagtgaaaccagccgactgtgtatctgcgctgtaatttaagcaa

SEQ ID NO: 1206 - DNA, 525 bp, Zea mays
tcagcgtctgggggagcccactccgcacctccggtctcctcccaagagcactctcggcgcggcacctcaccctcctctccggcgagatcaccgaggtaagtaacagccaagaaccagccccccttcctcgccgtaactaagcaccaccagctcggtgaactcccccagcgtgtgtctcttttgcgtgcagtggtccgacggaaaggtgtggccgacggtgcgggcgagcaacgggagctcctgggcccaccggaggcagagcgcggcggcggtgcggctggaaccggagacgtgggtagtcgagtaccagaggagcgcgcttttcgagggcacacggctgctaccggccgccgcggagctgatcgcgtccaggtgctcgacgatggcgcggcgagcgcggcgcaggatgcagggtaggcggcgacttttcggtggtgcacaggcgaatccaacctgaatcgggctcgccggaggtcaaattgctctcttgccgaagaacaaaatgctctctaggatggcttatat

SEQ ID NO: 1207 - DNA, 395 bp, Zea mays
gcatgaagtgccccgagaacctcagacgctggataagttctccaactcgttggtatatgatgactgcagcgcccatccctcattcagtgaaagctattacagcactgtagatcccagcatgtccttcgacacacaagatcttggagctgcactgaaaggcttcattgcaaccatatcgaagcctaaggcggcatatagaggatggagaacattgtcttatgtgctaggatggattttctataccaagagaattgttgcaaggagaaagaaacatgggaaataagtgaacacaagtctttgtgtagttaaatgcgaatataagcttagagaacgagagattatgtacattagtttgtttcttgtcacagctggtaagctctgctggtttcttcagc

SEQ ID NO: 1208 - DNA, 357 bp, Zea mays
acgcaattgtgcggcattggccaatgtggtgccgttgaaccttatgtattatcgtgccccccatcaccatgttattactagcccccttcggcatttcagctcagcattcagcagttttgcatgttcaactgaggtcagcggccagccggtggtagctgctactaatagataagctaaaacccaaagctggggccaccgaccggcgcgcgtgcagctgttcgatcagttgtagtgtgtgtatttctccgctttgtttcctttcagtttcaggtcatgtcggtcagtgttgtgcattcattgtaggttcatttgtatctattttcagattgtatctactcttgtatctattttcagatt

SEQ ID NO: 1209 - DNA, 499 bp, Zea mays
ccatcctggcatccttttaagatggttgaggttaacggagaaaataaggtacttgctcagttctgtccagctatggtgttatctttaatgcttatagaacctctattagtatttgtttggaaaaaaaaatcatatccaccctcattcgttgcaggaaattctggatgacgatgacacaaaactgaagttcctgtggatcgagtacggcgatgatgtgtgcaatgcggtgaagaccgcactgatggagattaacgagtataaccccagcgggaggtatgttgtgccggagctctggaacttcaggaaaggccggaaggcgacggtgaaggaggtgctcaagtacctgttcagtcagatggacacgacgacgaagcgcaggaggggctgaggaggtgcctgatgccgagtagtgccttctatgttgttgcatcagtcgtgtgctgctcgatccccaagtggcagtctggcataggagatgcccctcttgtgtagtgaaatc

SEQ ID NO: 1210 - DNA, 649 bp, Zea mays
gccaatgaaagatcaccccttagcagtaagaacattctgttgcaaactaatgcttatattagccatcagtttatcagccttttactactttgcatgtagttggagtgttcgaaatctgatgctcaagggcagcttggcagaactttggaggatgcacagaacataactgaattatcaaatcaggagaacctgttacccacggtgtctcctggctttatatcaacgtctaatgggaaaggtatgaacttcagaaactctacccatggtcaaaatgggcatagtttgctacataactgaggcatacatgaaagtagaagattgatgattggatttctgtgtgcaggtactaacatacatgatactcaatttgaggaagagccgacaggtatgaacaacagccttattgaacctaatggaaatgatgacatgtgcacagaccatgctgctaccaaattagctaaaagcaaccatgttatggaaacagctaccctacctattgatgggagttcacagtgcatcattgacatttctccattgaggagctgctctgctttggagagatctttgccttcaccaccgcaggcttcgttcgtcaagaggtcacctgtgtggcatgtagttgacgcaaaacatgtgtttaaggagttac

SEQ ID NO: 1211 - DNA, 220 bp, Zea mays
gggctctctccccacgctcgccatcaggcttgtcaccatggtagcgtcggtggtgggactggtggctgacttgctgagtggcgggtgctctcgtggttcggcccggtggtggcagatccggtgacgccggatccggtagtcctcgatccgatccttcgttgtggacgccagcgtggattagcacggaaaagtctcctttgctccactgacaatgagcttt

SEQ ID NO: 1212 - DNA, 449 bp, Zea mays
agcgccttccgccttcctggcaaggcaacggatcagacgccgatgtcgaagtggatcatcatctgtggccgtcaaaagatggccctcttccaatattccttaaggtgttagttgtgctacctcactcctgttttttttcttttaggctgacgtgtgcaatgacttgctgaactccaaaacccagtttgagaacgtggagtacagggtgaagatgaccttgaagaaccccctcacagcggcgagagtggcgtttgcgtcccagacgagggcagaccagggcagcagctgcaagcacatcctcaagggcatcgctgggagtgtggaccctggcgagatcctggcgctgatgggtccatctggcagcggcaagaccaccttgctcaagatcctggggggcaggcttggtggcggcgtcaagggccacataacctacaacgacactccctaca

SEQ ID NO: 1213 - DNA, 486 bp, Zea mays
gaccatgcgattccgctccagctatattattatgtaccctttcctttccgtgtatgatttgggtactgatctggcttggtaacgtgcagaagaaagaagcgaagaggctggcgcttgccagggtggacgagaacgtttgccgatcgatcccacgcaaaggggcagggcagcagcggaacctgaatctgcaacaacactaacccagggaagaagctggctctgaagtgtgtgcgtgtgcgtccatctagcacagtagcatcatgcacctgtggtgaaaccatggtttctcctcctttcccgtcggctaggcatctaacttatgtgtgaactgtttttgtgtgtgtttgcgtgttcgcttggagacgaggcctactaaaccgattcggctgtgttttatcaggtccaatcgtaggtcccagtcccagtacccagcattgttttggcctgtgtgtgaggcctgcttgtgtgtcggttgacttgtcttat

SEQ ID NO: 1214 - DNA, 310 bp, Zea mays
  misc_feature (297)..(303): n is a, c, g, or t
tggcactctattttcccttgggaaatgaagtaatttccgttggtaaaataaaaatccttggaaaaaatagggttgccaaactagccatttatcgtatttaaaatatcgaacttggtagtgtatatatattatatctggaagtgctagattagcatcaccctcttggataatgttagcatttagcagggttacacacgatgtactagtgtatgtattctcattctagagatgctgtagagtctcctgcttatccgggtatagacgttacagtttcacatctgttgtgccgagatggtnnnnnnnatagtaa

SEQ ID NO: 1215 - DNA, 605 bp, Zea mays
gccgctctcaatggcctctgccgccttggcgaggccatcaaggagtgcgaggaggcgctccagattgatccgtactacggccacacgcaccaccgcctcgcatccctacatataaggtgaatggattgcttgggtcttgggctagccggcacaaagattccatctcagatctcaagcaacttccagactgcaggtatgtgatcgccgggggagggaacgctgccggttacgtcgccaggacgttcgtcgagcacgacatggctgatggccgcctctgcgtcgtctccaaggaggtatcgttgcttgctctatttcaatagatgctctttttttataacacgatagatgctctttgcgtgttactttgtagaaatgatcatgtgtttttttatttagtcgaatttcatacttttcttcggcagattgcacccgccaagcgtgaagggctacccctatctcatctagaaattctggatgctgttgttatcccgtaagtttagtcacctaatcattggggttgatagctacttctgtgtgtgtattttagaaatctgttttttgctgaagtttctattgcctacgtcgtaaggtcccctgagacttct

SEQ ID NO: 1216 - DNA, 564 bp, Zea mays
tggtcggcggatgggtcttgttcctcacgcgcagctgctggtactccttgtacaggaaccccctgtacagcggcgcctcgccgatcttggccgtgaactccggcagcggttcgacccacctatctccgtgcgggttgaagaagaaggagaaggagtgcctgtgcgcgggcttcctcaccacccggtgcgtcgcgctcttcagactgttgttgctcagcacctacattaatttcgaacaagggagatttttactacgtcgtcgtgacgtcgtctaagggttcatgttggttgcatcaacaactcgtcgattctcagttgtcgtgtgctgcctgtatggcgtcgccgatgttgacgatgatgctgccgtcgaggggctccgccgggacccagtggccgtccttgaggacctcgaggcccccgacatcgtcctgcaagatgagagtgatgcagctggcatcctcgtgctcgctgaagccgatgctcgtgctctcctccgccgccgccgggaagtagcgcctcaccgtcatgaggtcgaagctgcggtcatcgttgtagttcttgagg

SEQ ID NO: 1217 - DNA, 357 bp, Zea mays
  misc_feature (60)..(60): n is a, c, g, or t
acctggagaagttgcttcagaagatggatgagtacatccgagccgataatgattttcacnagagaaggtaagaggcttataggttttctgagatgactaggggcttcgaaggaagaatccaccctaggcatgtcagatcaatccacagctctagtaagagtgaggacagaggaagccaatttcaaaggccacaacacagctcacagtctttagggcaacaacaaagctcctttaggccaccagctccaaggggcagaggcggcaggggcttcggaggaagatatggggatcaacccaggaaaatctattgcttattctgtggtgaagacaagggccacactacaagaacgtgccaaa

SEQ ID NO: 1218 - DNA, 447 bp, Zea mays
ttgtgctttggaatgcctgaagtctatcgtgtcctttttgaggcatttggaatggatccagatgatgagagctgtcagccaaaattgcgtcgtcaactagaggatgttgattatgtttcagtggagttcgaaaagaggcagctcacttggcaggatgttgctgcctacagggtaacggttcttactattgttttccctatatcttcgctttttgctcctatcttaccttgtcacatcttatgcagccgccaccggatgctctttttgctcatcctaggcttttccgagcttgtgtgccaccaggcatgcatcggttcagaggaaatatttgggattttgacagtagacccaaggtcatgactaccctaggatatcccttgcccatgaatgacagaattccagaaatcacagaagcaaggaatatagagcttggacttggtcttcagc

SEQ ID NO: 1219 - DNA, 893 bp, Zea mays
  misc_feature (59)..(59): n is a, c, g, or t
  misc_feature (61)..(63): n is a, c, g, or t
  misc_feature (767)..(768): n is a, c, g, or t
  misc_feature (772)..(773): n is a, c, g, or t
  misc_feature (775)..(779): n is a, c, g, or t
  misc_feature (781)..(782): n is a, c, g, or t
  misc_feature (787)..(787): n is a, c, g, or t
  misc_feature (790)..(793): n is a, c, g, or t
  misc_feature (795)..(797): n is a, c, g, or t
  misc_feature (800)..(801): n is a, c, g, or t
  misc_feature (806)..(810): n is a, c, g, or t
  misc_feature (822)..(823): n is a, c, g, or t
  misc_feature (825)..(827): n is a, c, g, or t
  misc_feature (836)..(836): n is a, c, g, or t
  misc_feature (838)..(841): n is a, c, g, or t
  misc_feature (850)..(851): n is a, c, g, or t
  misc_feature (853)..(863): n is a, c, g, or t
gttcttgcttattttgctaactcttaattcatatatgagtgggctgtgggttcattgancnnngttatcctttagtctctttttttcattaattgaagtatgtatacaatctaaacttcatggttgcagcaaaaatggagaccaagagaaggattttcgaggaatgtattgtgcactgttaactgcaaggtggttcttttccgtgccatgcttttcattattatgccattttgttttctagtcttcatagtgatgcctctggcgaaagggcctctagcctagtggtgaagggctttcgagtaacacctccaagtcctgggttcgatcctcctcgggacgaattttcaggattggttaaaaaatccactcatcgtgctccatctgctctcgggttacgatgttctatgcgccaccctccggttgggccgttacagagtggacggttgactccggcctattagtgatagggggtagggttcggggattttctggtccgggaccattatttcggttcctacttaatataataccgggacgacggtctttccctcctcggctgaattttatagtgatgcctctgttatgcatttaatccttgcatttttatggttctgcgtgcagagtttacaaaaagagcacacataaactgcaaattgttagtgtcctcaaactgaggtttttttgttgctggtattcttacatcttcccattttgattttattgcagcacacatgttgtctctgctgcgattctgaaagtgcgcatcnnacanntnnnnnannttgtnctnnnngnnnctnntaacnnnnncaaaaaaaaggnngnnntgacttganannnncactctatnncnnnnnnnnnnntgattctacatgaccccctccttaaaaaaa

SEQ ID NO: 1220 - DNA, 704 bp, Zea mays
  misc_feature (669)..(674): n is a, c, g, or t
tgggtgggtggtggaatagcgtcgtcttcgctggaacccacctgcctgctcttgctccgctcgcgcagtcgcgctggaggtgcgtgattctttttcgccgccacgtcctcagttcatgctgtgttgttcgcctgcgaccgtgaatccgtgattgccacgcacatttcattcgtctgcatttatttctatcttggggataaaagaatgtcgggagctcggaactctccgtgttatttgaatgccaagacaaatgcttagcaccagcgaactcgtggccttgacctgaagaaaaatcgtttttttctctcactcgtagtattaaatatttactatcattatttcttaagtttgcagctaaagctactgattggttcgtactgaccagccaagccaaagagggattctttggaggcaaccagaggtgtttggtttggtcaagctcccttcttttgtcttgcccatggaatgcttgctgtgaactgcttgtattcatgcttgagagaatttcagtgtagcatcttgtggtcttgtcctctctgattggaagagaaaacgtgctgtcttgtggcttgctatgtctgtctcggagaaggtggtgccatcatcatcagtttcttcgtcgtcagatttagatccgttgctgaagggtctaaaaaaaatctgacgacnnnnnntctgatgatgatggcaccaccttctccgag

SEQ ID NO: 1221 - DNA, 455 bp, Zea mays
acaagagtaggtcccgacatctgctaccgaaacattggatccagccgaccagtagtttgcgaacttcagtttcagtactaaccctttccgcttgagaccggtgcaggcgtggtttacggcgtatacagcgagcttccgacgtgggctgagccagggaaggactgcatagaggagacatgctgctgctttggcctcagcacggcgcagggcctagtggagttcgagtgcgagggcaacgcgagcaagcaggagtggatcgacgacgtgcagaacctgcttcgtcaggcggctctgcatgaccgagtaggggataaactgggattagtaaaactcagctagtgcagtctcagtatataaccctctttcatggtagcagcagattgctgtgtcctgctgctcctgcatcagcgatgcgaggggtacattaacatatattggtcgtactcttgtcactg

SEQ ID NO: 1222 - DNA, 413 bp, Zea mays
  misc_feature (115)..(115): n is a, c, g, or t
gacggcatgtcccacccacggcagccgggcgcagccgcagcgcaggcgcggacgcgaaggcgtgccgccgaggtggagcgtagggtccaagcacgaccgaatcactcatcccatntctgaatctgaatctgcagggtgtcggcgacggcgcggcgggcccaagctgcagctccgatcaccagaagccttcctccataagcggaacggtggaggcggcgaccctgcagcaggagcaagagcagcagcagcagcatcaggggcagcgggaggagggagtcaacatgtcacttgagctcaccctttccttcgcctacatgtagctagcacccttctgctctaactaactctagcgaccagccagcgtgccgtagtactgtcaaagaatattggaaggaagttgtaaatcacctcag

SEQ ID NO: 1223 - DNA, 410 bp, Zea mays
tcgcgcgctgtgcttgggctcaaggcggatgagatacacctctgcggtgaccctagcgtgctcaagattgtccagaagatttgtgcagatactggggatgatttggtggtgcatcaatatgagagattcaagcctcttgttgttgaagcaaagacacttcttggggacctcaagaatatccgctctggtgactgcgttgttgctttctcacgcaaggagatattcgaggtgaagctggcaattgagaagtttacaaagcacaagtgttgtgttatctatggagctctgccaccagagacacgacgacaacaagcaaagttgttcaacgagcaggataatgagtatgatgtgcttatagcaagtgatgcagtcggtatggggctgaaccttaacattaggagagttgtgtt

SEQ ID NO: 1224 - DNA, 513 bp, Zea mays
cacattcctttagtgtttcgctgtataattcggagccaaagttttaacgagtttagaatcttccgaaaattctgcccacagggctatctgattggcaatccgttaactgacgtggactacgatttcaattccttcgtgccatttgcgcatgggatgggcctcatctcaaccgacatgtatgaggtcagtggttcagattgtataattaatccagattgttgcataccgaaatccatcgaccgaccagatacaatttgtttcaggatgtcaaagcgtcctgccgcggcacattcttcggcgccgtggatgatctgtgccaggagaagatcgacagagtgcgctgggtaatgcgtctcaggactggagccacagaacagaacacattaattgagtcgacagcatcgtcgtctgatgggttgggccattgggtgtctgcaggaactgaaggacctgaacaagtacaacatccttgcgccttgctaccatcatcccgaaatccaagaggtagagttc

SEQ ID NO: 1225 - DNA, 636 bp, Zea mays
gctatatacatacatatagtacaaagtattgctcctatgttgttagattaaatttttttgcatgtattaggtaacattaggcagcccaaatacgggcacctgaaagatctccacgacctgatcaggtccatggagaaaatccttgtccatgggaagtacaatgacacaagttatggcaagaatgtcactgtacgagctttcacaactgaagattgtcttttcttctcttttttttgtcttggtaactaaaaatgttgttcatgacaatatgatttaggtgaccaagtacacgtatggtggttcttcagtttgcttcatcaacaaccagttcgtcgacagggatgtgaaggtgaccctcggcggcggaactcacctcgttccggcatggtccgtcagcatcttgcccgactgcaagactgttgcctacaacactgcaaaggttcttttcctttctgtttgtttatttatatatacgcagtatataatttgatttgggtgtgcattagatcacttactgatcgatttgagtttgtgttgaattgaatggcataattagatcaagacgcagacatcggtgatggtgaagaaggccaactcggtggagagggaaccggaggccatgcgatggtcatggat

SEQ ID NO: 1226 - DNA, 877 bp, Zea mays
gagtatgaacagctctattccatcttactatcccactatttgtttttttcttgcaaatgacctgaagttgtcctgagaacaaagtgtaatggaaaccaacattggtctgacattttaaacaatatatctgtgtttttttcttagttattgtattgctgtattatgtcgtttactaaacttgtatgcgcgtggagtgggctagccattttgcggatctatcagttaattttcatgcaattactcttcagatcataattgccctgttctttttaccaaatttcaggttggccctacccctgctcttattaaggctgaagtgccctggtcagcccgaagaggcaatctctcggagaaagaaagagtcttgaaaacggtgaaagggtaatataatgattttaccttcctgatcggttatttaagcgtgttgattgccttaaaacttcctagttccttgtttctccattatgttttgtttaattgctcttaattatgcagtatactgaacaaacttacaccagagaaattcgatcttttaaagggtcaactaatggaagctggaattactactgctgatatattgaaggtatgttttatttaccaccatctatttacagccttttcccttttgttttttgacgtcttccctactgcttttgttcaggatgttatatctctcatatttgagaaggcagtttttgagcccactttctgtccaatgtatgctcaactttgttctgatctcaatgaaaagcttccgacattcccttctgaagagccaggtggcaaagagatcacattcaagcgcgtgatattgaacaattgtcaggaagcctttgaaggtgctagcaacttaagagctgagattgctaaattaact

SEQ ID NO: 1227 - DNA, 506 bp, Zea mays
tggtggaaggcggcggcgcggtcggagccagagagccggcggacggcgacgaaggagccggcgctcccgtccatccctctggtagaacagcgacccagctggccagctctggcctccccacttaactttgttggtgcctaactttgttccccgctccctctctcccagcctctacgcgcgggggctcatggtgtcgtgcagccggagctccaaccgcgggggcggggcggcaagatcacacaaggcgggcgggcagatcccgagaaggcaggagaggaacgggtagagtagaggagggaggcttggatttgctcggcttcgcggcggccttgcctcgccacgccacttccgtccgttggttagttggttcgttggcgctggctccgcttcgtcgttctggttgggcggcgcggcgctgctcaggcctcagcaggacaatgctggtgtgtgctggacggtgcagtgctcctgccgctgctgctttggataaatcaatcaatataggg

SEQ ID NO: 1228 - DNA, 327 bp, Zea mays
atggacagggacacgtacccgaggaagtgggggcttggtccagtggcactcaagaagaagaagatggtcgccgagggcctccttgataagcatgggaagccaaacgagaagaccccagctgagtggctccgcaatgtggtgcttcccactggcggcgatgtatcgatcgctagcatcgcagctgctcctgagccagagaaggtgaaggtggaacaggatgcagttgccggtgaaaaggtcaaggagaagaagaagaagaggcagaaggatgaaaacaatggcgacgatgcttccgttccggcgaagaagatcaaggtcgaggaagat

SEQ ID NO: 1229 - DNA, 277 bp, Zea mays
acgtgtaagagtaagtagagcggttccctctattgataatcagaggctttcaagtaggcgagcagatggagacgagtttattgttgacaaggcacaacgtatcgccgccgcgaaagacaacatggaaaaaagtgtttttcaaagtgtcttagtggcttagattctggaggttgttgcgaaaggaggagttacaccaagatatcaaaaatgtttgtcgtgcaatggaagtggtggcaatggacatcttcgcaacatatggttgacgatgcaatgttaa

SEQ ID NO: 1230 - DNA, 710 bp, Zea mays
ggcgtgctcctggaggtggcgcatgtgcccttcctcaaggaccgctatgcactgtgcctgcagctcgagtgcatccagttcggcatcattcgctcctgctccgacctcgtcacgggcaaggcgctggcctgcaagtccatcgccaaggttcgcctcgtgtccgccgccgacatgcatggggtcaagctcaagatcgaggtcatgacgctccttggtggccagcccaacgtcgtcgcctcaaagccgtgtacgaggaccgcgattccgtgcacctcatcatggagctctgcgctggtggggagctcttccatcgcctgcaggagcgcgactgcttctccgagcgagaggttgtcttactgttgcgcgacctcatatatgctgtgcatttatgttgtttattacttcactcgaattaattgatgagtggttagtattttgtttgtttgttgagcatttatgttgtttattacattcattgctaacttgatgcatcttcgatttgtctagagagtcctcaatggagaggcaaaatacgacaggaaaattgtgaccatatctagcattgatggaaaagataataagttatgctaggccagagcaccaactgtaagtctgaattcttgagagtaaaagtttcgagaaacatcattctcaatcaccagtcagtatttattccattattttgctgaagtagagaaaaggcagtgatg

SEQ ID NO: 1231 - DNA, 355 bp, Zea mays
gaagtcccggccgcctctcccttcccacttccttcccacttccctctgtaacggttgtgccattaacgacaataatagctgcgggtttcttccttctccagctctctctctcctctctataagtacggatgccgaaccccatggatctgaccccatccacacagcttctctctgctcgtgagttgccaccgtccgacatcaccgtctgtcgccgtgcccgccggtgatctcgacgccgcttgtgttatccttctccgtctgtcgacctcctactcccacaaccgacggtcgtccgtgcctctgcttcctcaccgacccattctgcttgttggcatcgctgcgcaggaactaagac

SEQ ID NO: 1232 - DNA, 410 bp, Zea mays
gctacgagagcagcgacgccccgccgtcgtcggaccagcaagagaagcggtgcgcccactgcctgtcctccaagaccccgcagtggagggcggggcctctggggcccaagaccctgtgcaacgcctgcggcgtcaggttcaagtccggcaggctgctgcccgagtaccggcccgccaacagccccaccttcgtgagctgcttgcactccaactcccacaagaaggtcatgcagatgcggcaggccgtcgcgcagcagcagtgaggccgcgatggccggccggccggccgagaacgtctcccggaatctatcgttggaagcgcgttaggggatctcttagatcgtagcttagtcgatgctcagagaggatgagaacagagactttggttatagtagtagtaggcaatcgtc

SEQ ID NO: 1233 - DNA, 371 bp, Zea mays
ctcttatctgacaaagatgataattttgcatgactacccacttcacattgctcaacagtcatcctttattaattttattgagagtctgcagcctcgtttcagagttgtagatgtggagacaatggaaggagaggtgtatgctgttttccagaaagcaaaaggaaacctgttgcaagcattcagcactatgccaggaaggatcagcctcactataggactctggacaaccagtcagactcttggctatgtttctcttgctgggcagtttattgactccgattggaaagtgcaccgaagaatgctcaacttcatgatggtgtcttctccccattcagagaatgcacttagtgaagctattagctcaagccttt

SEQ ID NO: 1234 - DNA, 351 bp, Zea mays
tttattttgattagaaatatctataaaaagtaattgtcttaaataagcagagttatttggttttagtaatgaatttagcaatgccaatgctatttttatcgttctatataaattttagatattcatggtcaaacttaaaaatgtttgacttggacaaatatagatagacctacacatgcattgtgattttaggaagtcctacaattctcctccccaaagtctgctatcaacttctaacagttagtccagttttcatgaacaaatttagttttaatcattctatgttgtgccaaccgccagcaactaataatcagagctgggtcatatcatcatatcatagtagattgtata

SEQ ID NO: 1235 - DNA, 781 bp, Zea mays
gcttctagtggccgaaatcagcaaaaaaagctaaaaacaaacgggaccttaaaaggtcataaggattgcacagtgtcttttcatcatgagcgattgtaagccaaggcaggtcggcactaacatattctcattcgagccaaacagtcctcctttgatcattttgttcttattccagcatccaatttggcattaaggtgttgtttggttcacatatttctaatcgtaataggtaactaataacgttaaatcatgttgtttaagtccaatcgtaatcagataccacactagaaactgataccggcatatttaaatttgttaccactggtatccgagtgtgaattattaccgttgctatttattacatttcatgaaccaaacgacacctaagatattatgttattattttggaattctactttttcatattagaaggtatttcatcctcaccctctttacttcatagatatatatttctgttcttttcatgtacgtcgatggttttatttcccttctcacttctgatttttgctaggaactaccagatgtgattatttggggacacttcagtcatgatgttggtgtcgatctggacgctaaacataggaaaggaccgcctagtggggctctcttcggaggcgcggacggtccgtgtcattgggccggacggtccgcgacctggcgccggagcgactcctcatctgtttacgtccggacggtctgcacctagggctcagacggtttgtgatggcgtagagggtcttcttcttcgcagcagacctag

SEQ ID NO: 1236 - DNA, 751 bp, Zea mays
tgcagaagtgtcagattcacagtcaacaagttcacaactaaacctgatagagagatcaacagagcatctagcctcatgtgaaatcaacccagtgagcgttgatgatgacaacgacaatgaacatatcgatgccaatgaagaaactcaccttgttattcaggacgttcctcaatgccggatttgccttgatagtgaaggtttgctctttgactatcagtgttcttaaggcgcctaggcgagcaagtgcagcagacaaccgccttagcgcctaggcgacgcctaggcgggtaaggcgagcaaggcggccagttttgcccgagcgcttggacgcctaggcgttgcctaggcgacgccttaagaatagtggtgactattagaacttttcttagatagatagttgttaaggaatttgaaatgccttgttattttttaatatttaattcatgtttgttttgttgcatacctgccacggagtaggtgatgacttgattgcgccctgccgttgcaagggaacgcagaagtatgtccataggtcctgtcttgataactggagatcaacaaaggtctggattctagagcatctattctctaaactgcagacttaaaagatgcttcctaatcatcattattagtctagttggctctaacctagtatgtctgtaacacattacccaggaaggttttgcattttcacattgcactgaatgtcgagctgcattctttcttcgtgcaaatgttcctccagatcgat

SEQ ID NO: 1237 - DNA, 425 bp, Zea mays
aaccctagcgacctcgattcctcaccagcatggccgtcggcctctactctctcggcctctctccgccgccgcggcttgataccatcctcttcccacagctgcggcctcacctacgctgccgcgtgcccgctcgggttgctgcagccggcaccagctggtctcccgccgccggtgactccgaagacggggtcggcggctggtggtttcccgagtacgagaaatcgatgaaacaggcgagggggaggattggtaaacttatcgtttctagacaagtcaatggtgaaatattattccttcgagcagatgttctgtttttatcgcgaatattgttgttgatttgtagggtttaagagagctgtcgtggttgggttgggagcttctgcggtgatcgccttggctgggctggcgtggcgcttcccatcttc

SEQ ID NO: 1238 - DNA, 300 bp, Zea mays
gccttctgctctcttggtctccgtggttttctctgtatcatcccttcggcgcgtcgcgtttctgctgctggccgagcttgatcgctcgcgcgcgttcgatcgatcgagctagctccacaagtttcggacgccaacgacatgaatctggaagcagtggcggcgtccaagtccggcagcagcagcacggtggccttctcatgggagcacgagcccggagtgtccaaacagagccacttgggggccaacaagcccaccaccgccggcggcgcgccccgcgcggaggctgtaagcaggaggacg

SEQ ID NO: 1239 - DNA, 1267 bp, Zea mays
gattgaggtttgtgctgttgtttttctagtttaccgtttatttttttaactgagcactctgatatcagttaacttgtcttatcatttcaggcaaatgagatattgtcatcattcgatgttcggcttaggcaatatgctacaaagcaactaattaaggttaacagattcttctctgcataatgccatatcacttttgcctacaaggcttccacagaccaatgttttgaaactgcagatttccaaatatagcacactgacaatcacatagcatatgaatgttatatatctgctaattgtttggatgctgttatttctcatattatttggcatctgaaaaataagatgtttgtgtatgttcacccaccagtcaggtgttaggcttgtgcaaggaattgttaaggatgtgcagcccaacaaaataattcttgacaatggagaagaagttccttatggtttactggtatggtccaccggagttggtgcttcaccattcgttaagtcattgccatttcctaagtcacctggtggaaggtataattcttttgtgtctgtaagcatcagatatcgagtcagttatgcatgtttatgcctgtgtacacacatttatacgagtaactgtatgtctatgtgccattgtatactgactgggatgcaagttagataatctgcacgcaaattatcttatgtagtttgtgtgggtattatgtgtttgaactttgaagcaaataccgatgtcatattactgtcctgttctaggatctttacaaggtttttcaatgttgacaggatcggtgtcaatgagtggttacgcgtcccttctgttcatgatgtttatgccattggtgactgcagtggatttctcgagagcaccggcaaggaagttctccctgctttagctcaggtagtctcatccttcttgctgcagtacaagtcagttacagaaatgtgcacagtactatggcggtatggtcatcctgcattgctttctgaagcactggggaaaacaggtttgggaagggaacaaatgaagggatatacatgaaaaaaaatgagttgcagatatttctgttccacttccgtatttatatgattcggttgtttacattcagaagaagaaatgctgttgagcaagattttttttttcactcgcccttgtaagattctgtggtttctttgtttcagaagagatgttaaataagataactcttttactgatgagcaggttgctgaacgacaaggcaagtacctggcaagcctgctcaaccat

SEQ ID NO: 1240 - DNA, 1218 bp, Zea mays
tggtcctatatatcattaggctacttcaagcaggtaaactaaaaagggttgacaccacagtttgggaggattaaacttgttctgcaaggaaacaaattgatggtttttgatttttggtttttatcttccctattaactttcaacaccttccaaaattcttttcttttttcagataccaaaggctggtgaagttggttcttccactatgcctcataaaatcaaccccattgattttgaaaatagtgatggcaatttatgtcaagcgaattctatattgtctggtataagcatgaaactaccaatatcccggttgcaggtattgtgtctaatccaattttatgcctaaatttcagtttttctagcatgaggtatcaggatgaaaacctggtgcctgtattcatgatacctatacgagattggatcttaaactatagttatcatctcattagtatgtacttatactgatgaaccaccatgttgtatcattgacagcgtgacctaacagactcgactgttttgagaaacctgggtatgggattaggtcattctctattggcttacaaagctaccatgcgtggaatcagcaaggttcaggtaggtgacccagagcttgtcctttgtctcgttacagatgatatagttggttacagatgatatattcgtatcttcaatatagttgatgcatacttaatttttagcttatggttattaaatacttgcagaatgcttgatgatcaaagcagatagatgtacctcaccacttgctcttttcataagtgttggcctaacaggggaaaaatacactataaattagtggtgactgctaggcgtaggtatttacccaactaaaagatcacaccactcaaaccagctgaggattactgacttggtaggataaggaagttcctttgtgcagtgctcgactgcacacacttgcattcttggacaattgcatgggaatgtcagacgtttgctcttctttactattgacctgaaacatgcgttgtatgtaattatgatcaggctagaactactatgctgaattggtgcctttacagttgaatgaatcacgtttagctgaagacctggagcaaacttgggaggtccttgctgagccaatacagacagtaaggcatctgtttccttctgtccatttccccttgaattctgttttggttgctgtcagcaagtgcttattgtgcgtgcatcagacgtatc

SEQ ID NO: 1241 - DNA, 398 bp, Zea mays
gcggcggcggcggcggcggcggcgacgacgacgacgacgaggaggaggaggatgaggaggagggcggcgaccgcgctgcctcgcaccggaggcacgagtgcatcgcgtcggtccaggaggccctgcgcggcgtcatggaccgcaggacggccagcagctgcgacacgtcgtcgtctggtggcggcggcgggagcattaagcggcagcgcatgaactacggcgcgcaggagcagtgttcggtgtagcattcatgcatgcttgcacacacacacacacggcgttttccagcagcgtggcgtggtatcgagctgtgcgtctttatgctttgcattgcattgcatggatgcatgaacgcatatatatctgcaagttatttagcgtagctacttgctagtata

SEQ ID NO: 1242 - DNA, 372 bp, Zea mays
gagctccattccagcagggacgcccaggtcccgacggcccctgcgcagctcctccccgcggccaccatggtgctcgacgcctctccccttcaagcgcagcagcagcttccctagtctcccatggcgcccccttcaatttccatgaccggcacccaagctccagcccctccccgcgagccctctccccttgctgcctggccgagctcgctgttctccctgctccacggcgagcagcagctcgtccacctcttcctcccatggtgcccagaaattccagcagcaaggactcgacagcagcagcagctcgaccctcctctcctcgctggcgcaaacctctcccatggcgcgctgcagcagacgccctagagcatc

SEQ ID NO: 1243 - DNA, 251 bp, Zea mays
tggaacaagatatgtgcatgctaattccttaattacttcataggaagagattatattgcaattataataacattaaccatggtccatggagatggatgaacctgcattttagggagacatgtactttatatcatcaagctgaacttaagaagttgtggactactaaatgggcacaacaaaattcataaattttcttgctagatgtacaaatgaacacgcaatatttgtttttttctttattttttccacag

SEQ ID NO: 1244 - DNA, 216 bp, Zea mays
cgggacgatgaacaggccgaggagtgggagtggccagaagaaggggaagcgcgggggaggaggaggcggtgggctcggcgcggcgctgaggaagcaggtggccaggctctgcatcatccgggagtgcgtcatcatgctcctcttctaccacgactgatcccactgacgatgccctttgcggttcttcctggccattgactacctttatcttttttt

SEQ ID NO: 1245 - DNA, 446 bp, Zea mays
  misc_feature (433)..(435): n is a, c, g, or t
gcagcagctcctcatgtagcagcagcagcgcctctgagaggtcggtgagcccgccacccaggagcaggtccagagatgtaaggaggaaaaagggcagagggaggggcagggagagggatcgtaaggggagaaagttgcggagatcggcaagttcatctagcatctcagcaagcagtggcagtagcaggagcaagagcaggaagcggatgactgttggtggcactaaggatcgcgctacaactacaagggataagatggaaaagggctacactgatcgccgttcttgtcggtctgtcatgaacgtggacgagcacgttgatggggatgaagacaggctcgccatttccaaggtggtggacaatgatattgacaggcacaagaagaatttggaatcggagagctcaccttccaagaatgccaatacaacagaagnnnaagtacctgca

SEQ ID NO: 1246 - DNA, 775 bp, Zea mays
tcttgattgatggtaccatagctggttgcgcattggatggtgctgaaggtccacagtggatggaagcatgggtatgcaaattagaagcagaatattaaacaatgtttgcaaatggtcatttaggatcaataaatctatctaaaatcaaactcaattaaggttctctctgaataaaggctaataggctatagaaacgttccattatctacgtgtcctatgtttatgtattgaactttactatttacacagtgcagtatctgcttattatttcatataaaaattctcagtttgcataagtggtattttaatcaggagcttgctttatgtactgtaattggcttacatgaccagcttctggacttttctgtttaatcggctaatagttgtcctcgcagataaggacacgagttgctgttattttaacaccgttattgtttcattacattttgttcagcaaactggtgactgatcattgctgtgtacaggtgcgggagatgccaaatgttttaattcttccgcggagtgcagactacagcgaagaagtgtggatggaaataagagagaaagcaataactatgttacagtcctttttcttcgatggtgttcttccaagtagtgcaatttctgatgaagatgaggaaataagtgaagctaaaaatgaagatgactatctaggcccacaggcaaaggatagccagtcacagatttttgatactgaaatagatcaaagccacataacgctggagtctgaaaagaaaagagccatatcccacca

SEQ ID NO: 1247 - DNA, 928 bp, Zea mays
tgatggaggcggcgtggacctccgcggtgaatcgggccaccggcatggccgactccgccaagcgcttcctcctccccttccgccgcccgccgccgccgccgccgccatgtccggaccccgaccctaaccccgtaagcgaatccacacccttctctgtcttctcgcatttcaagttcaaagttcaaaccccacgacgtagcccgtataggtagggctctgtcccgttcgcgttgccggggattaggatgccggcgggtctagtttgagcgtgtctgtaaatgccaaaagcttcccctttttttcccgatcgatgtagggttctgtggaagctgtggcctatttgttgcatttatgtaccattctttttttcttttggaagccacattaggacaggaaggcagtgagctgcaccattttgtgttgcccacgttcataaactatctgatgtgtatgaacattgtttgacaaatatttaagtctggaatatttcaatgcacgtttgctaaattgagccaatttgtacatcacccgtgacacagatatttttctttgtaattcatgttttctccaatcataaaatgggatagacaagtgtggtgttctagttccttaaatacattcagaaaatagaatgtggcctttttcttctcatgtgcccttaacgccttctctattcgtgacatgattttgggtcaagggactggcgtaaacttgatgttcaattacgggctctgctgcttttggttttgtttggcatttccttcggggcctctgattcatgtgccttccattctttatttacttcaggtacagatcttgaaacgtttgcagcgacaagcgttttacgacattatgcagctgagggagagacaagagaaagttgaaagagtgatctcgttgttcaaagctaccaaagttggtccgtcgc

SEQ ID NO: 1248 - DNA, 568 bp, Zea mays
  misc_feature (483)..(489): n is a, c, g, or t
  misc_feature (493)..(512): n is a, c, g, or t
  misc_feature (523)..(531): n is a, c, g, or t
  misc_feature (540)..(556): n is a, c, g, or t
  misc_feature (562)..(565): n is a, c, g, or t
ttggttaatgggacacatagtttctagccttacatttctgtgtctacccagagcagtccacactaagttaacaccatttgaactgatacaatcatgtactgcaggtggattatgcttgcaccccagaagaagtgcaacagcatttccaagcttgtggaactgtcaacagggtgacaatcttgactgacaagtttggacagccaaaaggttttgcttatgttgaatttctggaacaggaaggtgttcaggaagctcttaacttgaatgaatctgaattgcatggtcgccagattaaggtgcagaaatgcttatgttgcatggtctcaagagttccttttttaaaacacttgtcaatagtgctttacttctgctttaccttcttgctctgtgctctacaggtcgccccaaagaggactaatgttcctgggatgaagcagcgtccaccacgtgggtataatccataccatggctacccttatagannnnnnnttcnnnnnnnnnnnnnnnnnnnntttcccttctnnnnnnnnnttttttctnnnnnnnnnnnnnnnnnattatnnnngga

SEQ ID NO: 1249 - DNA, 342 bp, Zea mays
tctggcactgagcagagagaatccaggagcgtacttgtagacaggacatctgggatacaaaatgcggccgagaagccccacgataccaaggtgatcaagcctcaggatccgtgcgtctccgaagagcaagctagcgaggccgagaaagagaatggacctcagggatgtcgttgcagcggcaatcagggccaagaggaggcagcgaaaactgcaactaaccacccgccagcttcaggcttgaaggcggcaggtgtggaggggaagcagcagcagcagcgctggaagaaggtcgaaaatccaaagcagcatgtggacagcgtccctgcccagtgctcacaggaa

SEQ ID NO: 1250 - DNA, 361 bp, Zea mays
  misc_feature (352)..(355): n is a, c, g, or t
acgacaccattaatggcggccaccgacctctcccttcccgtctctctctctccctctcctttctctctataaatattgacgccaagcccccatgaatctgttcccccggccaccctagctcgccccacaccctctcctctctcgccacgctcgccgacgccctgctaatcgccaaccggagccaccggagcgccgccgccgtccaggaccgccgaagcgccactatcgaggaccgaccagagcacgccgaccgcctgccctgctagccgcctgccctgccgctagccgcgcccctgctccctggccgaccccttgctcttcgatttcgtccctgtgcaagaattagtggagnnnngttgaa

SEQ ID NO: 1251 - DNA, 313 bp, Zea mays
  misc_feature (304)..(308): n is a, c, g, or t
cgggtatacagaagcatggtcaagacgaagcttgactaggatggtgatcacgacgaaggataagatgatcacgaagctatatgctgaagagcttcggtatcacggcgggaaggggaaaccgacttaaagatgaaaagccaaactagacctcgaagaattactatagagttattgataaatgtaaagggcattaatgtaatcttacatgggctgcgacccgtgcctataaataggtgaacagtattctcgtactgttcacgctgacttggcattcacttttgcctcacgcctgtattcctttccnnnnngtcga

SEQ ID NO: 1252 - DNA, 365 bp, Zea mays
ctgatatttggatggagacattacactgcgagtggtaccaaactgtaggaaatggaaagttggttagaggggaatcgagagtagttccactcacatggtcgttccaggcgtgatccctgttgtagatgatggcagcgccaaggctcctagctgggttgatgccagtgccagtaatggggatggtggcaaggtggaccaggaacaccgcgaacccaattggcagtggggcaaggatctgttttcaccaaataagggtttcattcatcgtaagtcttaacacaatatgaaaaatatgtatcgaagagtatgcatacattttcaatttgttgaaacacaagattaaggaatcagctaaattccagtcc

SEQ ID NO: 1253 - DNA, 800 bp, Zea mays
  misc_feature (19)..(19): n is a, c, g, or t
  misc_feature (785)..(786): n is a, c, g, or t
tggagctcacttctatcgnccttttcagggtggagaaaaatatcttgcttcttcaatgtctcgtttgaaatcaaggatcactccattgagtttgatgaaaaccgcaatgtcaaccgtgctgaatttcttgttcgagcgtcaatgacgtatgctgttttttatgcatttgcgagtcatttttatgtcactttcacctgctattttacttctattcatgtttttttatcaggcattattaactctatttttttaacttttttatttaaagaggtgggagattctcagacggttggggctcctgcgatcgacgagagaaaaaattcaacaaacctaaccatgacattcccagcacagctgaaaccagagctaagaacaaggcttgccaggtaaggaagacttcaacacttatccgaaccatttatcttgtttacatgatgcacctatagtttatgctgtaatctgaaaagaagtgcattcttgacatgtccatcatttcttaattgagaagtcaaatgcatagttcatgttttatttcataactcaagtaacatgtgaaggttaaatcgttcttacaatcttactgtaaattttaggatcttcttggaattggacgtccaggatgagaagtggaggtcactggaccccaaaggtggagtccatgaggtgtttacctttagatcagctactcatcgccagctcccaaagtggaatccacaaattttggttatagtcaaggttgtctgcgtggctgttagctcagtgcaaaaatatactggtacgtaggnntcttaacatttgaa

SEQ ID NO: 1254 - DNA, 362 bp, Zea mays
atttagaaatgtacaacaaagtctagtaatacattgttaaagataaatcaatactcaataagttcctcatgctttggatttggggataacatacctgttttatttacatgctaatatttggaccaacaaaaaataccttaggaacagccatttgagaaaaaaacaaagccttttagtcctaagcaagttagcatagcttagagttgcaacttctacatgagcacaataaacagaaaagaaagagaaaaggaaaataaatatatatggcaccaaaagctattaccatgttataatataaatttaatgaccgaaattataaacatttttacaatcttagcaaacctctcaacgtgtagtctgaa

SEQ ID NO: 1255 - DNA, 570 bp, Zea mays
  misc_feature (375)..(417): n is a, c, g, or t
  misc_feature (537)..(546): n is a, c, g, or t
gcatgggtcgttccaatcagcagctagcacatggtttaggcttactcgtagtcattaaaatagaattaggagtccaaacatctaatggagtctgacgtggcaccgtcgcgtcgagtttaggcgaatgcagaatgggatgagtttctcgctcgagaaacaccggtttcctgcctttaaattttcttgttcccgctactgacccggaaaccaaaaacggttccgttttcagtgttatttaggtttagaatttaataatacaagagtcaaacgaaaaacggttcggttttcagtgttatttaggtttagaatttaaaaatacaagagtcaaactttggtcacaaaacggcatccgaaaaatgcagaatcaaattgtannnnnnnnnnnnnnnnnnnnnnnnnnnnnnnnnnnnnnnnnnnagacttcaacacttatccgaaccatttatcttgtttacatgatgcacctatagtttatgctgtaatctgaaaagaagtgcattcttgacatgtccatcatttcttaattgagaagtcaannnnnnnnnncatgttttatttcataactcaagt

SEQ ID NO: 1256 - DNA, 1199 bp, Zea mays
gagtttgttcttaatcatggatgtggcatttgggtgtcacaatcttctctgagaagttagcttcaattgctgctgccatgtcttgcaaaatattccataataactcaattctacgatgtgatcaaattttgcatcaaccctgtttcttctgttagttctatccttttattttttctacatatatgttgaataattttcccctaatcataagtgcagttaagacttctttctgctgtgtggcatgagaatttagtcccacttatcggctattgctgtgaaaaagatcaacagatattggtctatccgttcatgtccaatggctcactacaagatcgtctttacggtatcaagcttcgcatagtttttaagaaaaaaacagttggaagacccttatttatatgtttttccgttctgtaggtgaggcatcaaaaaggaaagttcttgattggcccacaagactatctgtttgcattggtgctgctagaggtacttttttttaaaaaaaaaaactcagtccacttctacaatgggatgaactaaataatattcatgcaattgaaggacgtgccatgttactttatgatcttacctttgctctgtaaacaattgaacagcgtacatacttccttttttatttgtacattcacatattacatagtggacggcttgttttgcttgttcagggctagtatatctgcacaattttgccgggcgttgtatcatacacagagatattaaatcgagcaacatacttctggatcacagcatgtgtggcaaggtagccgactttgggttttccaagtatgcaccacaggaaggtgacagcaatccatcaatggaagtgaggggaactgctggatatttggaccctgagtaagttctctcatctctatcactttggaaacactggaggagggtcgaaagattaagttgaaaataatggaatagcggtgattcaaacatatagaacaatatattgtttggtgagaaagttgagtgaaattaaaatgttttctattaacgtgaacatagcattatgctgggagtaagttgtcctttgtaccacaatattatgtgttactagttgatatgctagatcacctgtatcaaatccttcacatttttgttcatcatgttttggtgttgtttttgttttcttctagatactattccactcaggtgttatcaaccagaagcga

SEQ ID NO: 1257 - DNA, 888 bp, Zea mays
tcgagtttgtacagaaagcaattgtaagtgattgtttacttttattccttctctacataaagtatacatgaataataccatgtaagaaacatttgctactgtcattttgctaggatgatatggaaggcatcatgagtgaaccagtacaagatggacatgaaccaaagttagcaaatgaagctgtttctcaggttgtcaaaatcaactacttttcttcgtgttgcaggtgtttgttcggcctccaagagtacctctagaggcacaatatcgtcacaggtacaagtgttttacataccaattatgttcccttctttctttggataagttgtacttgcaacatgtaccttgagaaagcatctagaaaaaaaattaaaatgtatggaaacaatgtgtggtatattttgatgcaattgaaaaaacattgtgcttcaccttttgcccatgctcttgtcatgtacgcatccaacaacactcccttgtccttggctctatctatgcatccacctttcactcttcttttcatccttgtaatagaaaacagtaggaggtagcagacaaagaaatggaaaagtaattagcagtcgtttaacttgttcgatgctttgtgttttgcttggttcttgttactgcccatatatatagacgacttgatgctttagtgtctaattacatattaatatattatttattaattatgttcttgttcttgcttgtatgtgtgtgcatgatatgaagtaataggttatgtttatttataggtccaagatctttagattaccttgagaatgagaagcaataaacggcagaacttcgacaagagttggataacatgaagatggaatcagaaactttggtaaaacattctgaggaaatagaggattaaagaag

SEQ ID NO: 1258 - DNA, 783 bp, Zea mays
cgctcagcgcgggcgcgacgtgtccaaactcaaccacgcgctcaaggcacacgccgatcccgcccagcgcgccactcttctcgaagcccgaaagtacgtttccttctccagtctttcgcccagcaatgggggaaaaggagttgtggttttgtaacttttgtttgctctggatttctttttcttgggcctgggtctgtggggaggagacaagttgctgcagtaatgcaaatatatatcatgtgtgttcatcgttcggttcatttgcttgatccaggaagatgattgaggcaatctacgagtaccaaggcgaggatccgctccaaccgtggctggagtaagtttttctcatagcccctttaactcgcctttttcgatttcttggttcgtgccaggactggtagctgttctagcagatagattgttcatttcttctctgattcgtccgcgtgcagctgcatcaagtgggtgcaggagtattttccgaccggcggcgagtgctcagggttggtggtgttgtacgagcagtgcgtgcggaccttattggacgacgagcgctacaaggacgacctccgcttcctcaaagtgtggctggaatacgtgagtgatgctttgccagcttgattgtttttctctgtagtttgtgtcagtgcagtggaggcacctcatatatcattccgctgccgatcttgtcctttttgcaggcggggaactgtgctgatgctgaggtaatatacaggttcctggaggccaaccagattgggcagggccatgcgatctactact

SEQ ID NO: 1259 - DNA, 690 bp, Zea mays
  misc_feature (383)..(384): n is a, c, g, or t
  misc_feature (540)..(540): n is a, c, g, or t
  misc_feature (542)..(544): n is a, c, g, or t
  misc_feature (569)..(575): n is a, c, g, or t
  misc_feature (586)..(591): n is a, c, g, or t
  misc_feature (598)..(633): n is a, c, g, or t
  misc_feature (638)..(648): n is a, c, g, or t
  misc_feature (653)..(686): n is a, c, g, or t
ggccactgcattcaatagccactcaaaggccagaaagaaaaatgctgccaaaaactcatgccacacaaggtccgtcacggagcagatacttcaaacgaaatttcttggtaagttcaagcgcaagagaggtagaagaaacaggcctagctataagcatgataattccagtgagcacggggaagcagaatacaagttatctgatagatctgaatctgacggaaatggctgcttgctgctacttcaggcacttgaacaggatctttcacctccaaagttgtccgctgaacatgatggggaggccttaactgacctgaaggaagatttcgaaatgagcgggggggatgctgagttaagtcggtgtactgctttctcggaactggtanntgtacttgagatatattttgatgcaattgaaaaaacattgtgcttcaccttttgcccatgctcttgtcatgtacgcatccaacaacactcccttgtccttggctctatctatgcatccacctttcactcttcttttcatccttgtaatagaaaacngnnngaggtagcagacaaagaaatggaannnnnnntagcagtcgtnnnnnntgttcgnnnnnnnnnnnnnnnnnnnnnnnnnnnnnnnnnnnncccannnnnnnnnnngactnnnnnnnnnnnnnnnnnnnnnnnnnnnnnnnnnnttat

SEQ ID NO: 1260 - DNA, 376 bp, Zea mays
gcatgcaaggcccgacgtcggatcggagtcgggcatgcatgatgcgtcccaggaaaaacaagcgaacctggcaaaaagcgtcgtacgttttggtggtggttggtggtgcggatgatggcgcggtttgaacggtggcgcgtgcctgcctgcctgcctgcagtgtgccccgcgtgccgcgtgcgtggctgtgcctgtgttcgctggcccccgtcttttggattgtatatctgccaccactaatattgtgtgggctcacgttggtggagctgactgtgcttatgggctttatttgtgtgggctgtcgctggtatgcgctgggcctgtttacatatgtgtgctgggccttcagttgcggtatgcatgggcttcacttaat

SEQ ID NO: 1261 - DNA, 762 bp, Zea mays
agactcgagcgcacacgattaacccaggcattttttgtaatgttgatgcaagaacactgacttcattatcagaaagactttctagcattgatggtatggcttctagcaactggattttagtttttgtatttgtggaactttgttcaacacagtcgttgaagttaacagtagcaaatacaggtctattatcctgatgtttttattctgcacttgcaggcattagcacaaatcatatgaaggaagcagattcacaggcacctgtgaagctgaagctacagttatttccaataaatgaagctactcggaaggcattggagaaggtaaagcatggtttcttgctactagcaagctgcatatgaatcacaattttcctcagtcgctgtatttttaacttgtcagttattactggtgaattattgaccaagcactcgggttcttgttgttgaattcatgcatgttatagatgaatgatgatgaatagattacttgattagtgtccctttgcattttgctcaaacttttctttgtatctggtttgggtctgagttgttttgttctgttctccaatctttgagcaatttgaacattacatggtgctttttctcctcttatcaggatgaccataatcctcatctagagctcacattaagctctagaaagaaaatatcatctgtgctagaacatctaaaccgaaaatggggtaactcaaacatcgcatctggagagcttattctttttccatattgtgctaatcaagaggat

SEQ ID NO: 1262 - DNA, 344 bp, Zea mays
gacatctcgcgctggtcggtgaagacgcggacgcccacgcaggtggccagccacgcgcagaagtacttcatccgccaggccagcgccgccagccgcggcgacaccaagcgcaagagcatccacgacatcaccaccccgtgatggctcctgctcgtggaggacaaagctagcaccgagagatccagacctggctactgctgctacctgcattttatctttacctttgcgagacgggaacaaaaaaaaacaaacagccgtccctgtggttgtagaaatgtaggcaaagctaagttagcctggctggaatctggggtctggtataactgtattaagcggcactacaa

SEQ ID NO: 1263 - DNA, 868 bp, Zea mays
gttgttttgtttttctcagatctgttatctgcaacccttttccgctcaatagttttcttgcaacaggcatatgcgcacaagattctcacaggaaggcgctctctcttccatactattaaacagaaaaatggcctttctgggttcacgtcgcgttttgagagcgagtacgatccctttggtgctggacatggatgcaatagtctatccgctggccttggtactgcccttatttgttcattactgtcttgcatggcaaattgaactgttctctgcaactggaatggaattgaaatgatgctcggagttatttcttagtgatatttttcacctatatgattttttattacttcaataaagttggatttagtttccaaatccaattatttatgcggcgctaagagattttatttttaaggatagatcctaatctaaattgttctgctcagtactttcagtttctattctttattttcatatgaaattgcatggaatcctcacagtaaacgatgcttacagcccacagattaatcatcgcaaaactttacacatcatgataaaatccaagctctattcagtatttcttgaatcttgcttcttttatagccttgtaaagtttcatttcgtttctttagtttttgagttacttcttatcagggatggcggttgcaagggatataaatgggagaaaaaatcgaatagtgacagttataagtaattggacaaccatggctggccaggtgtacgaggcaatgggtcatgctggcttcctcgattccaacatggtggttattctaaatgatagctgtcataccttgcttcctaaagcagatggcggggcaaagatgtcagtcaatgccttttctagtgc

SEQ ID NO: 1264 - DNA, 368 bp, Zea mays
gcatccagcaagcgaagaagatgatgaagaagcagtaacagcggcagtaccactagaactagctagatctcctctcttactagctagaagcttgtacaaacagtgcaccacacagatgttgccgtaccctaacaaccctcaccatttcggcgtctcccaagaactcccacacccaaaccctacggccggcttccccatgcctccaccgggcgcgcatctggatcagcgctactacgtggaccatcacttctttcccggccacggtcactgcttcaactccgagactctggaggcggtgctgaggccggcgcgcgctgccccagagtgcgacgaggccctagtagtcacggcgccgcaggcgggtggaa

SEQ ID NO: 1265 - DNA, 265 bp, Zea mays
  misc_feature (258)..(258): n is a, c, g, or t
ctatttatgcaccactacataaattttaaatatttatgataacgaatctagtcaaaagataactactgctgaaagttttttcccttcatgtgatctcagtgagatcgggattaattgaagttttctgccttgagttaaatgttgacctgtgcatcagagaaggattgtccaaaacaccaaacatttgtaatttgtgtagtttcttggtagatatgctttctgcgaccttgtttacatgaggtaaagtgcaaactatgnctactgt

SEQ ID NO: 1266 - DNA, 694 bp, Zea mays
ctatttttttagggttggtcggatatgaaattaataatgtttgttgagcataactttatgtgatttttttacaagtttaagctcaatttcatattcctatatcccaaccaggacaccataattgcttagtactcttcactttatgctttataatatcccaggttctggagaaagttattcaactttatttagtgccagttgctgaatccttattctatataatgcatcctctcttggtagctgaactgggttttttttcaaatgaatcaggcaccacaaggcaaaagaagctcaggtgagaatgttgtgatggttgatccactggaagctaagcgcctagctgctaaacaaatgcaagaaattagggccaaagaaaagctgaaggtgcattgttgctgtattggagtgtatcattccttagactaaatcaaataatcaatcatatatactaatagatggaaccttggtaataaggaaaagcggaaaacttataccttttgtttgggccaattgttggtgctgaatcgttgtttcagaaaactggaaacagaactaggcttttccctgttcatgctgtcctgcaatatgagaacaagaaacaccattgtagtagtatttgtttggtcgtaatttttgtgttccggagctgaatcagaacggttcctaggtgtcaaatgcaccctaaattaaaaaa

SEQ ID NO: 1267 - DNA, 602 bp, Zea mays
  misc_feature (542)..(553): n is a, c, g, or t
  misc_feature (576)..(591): n is a, c, g, or t
gtagatgcggtcgaatatcttcattctggcaagagtgttggcaaggtataagttgtctgtctatctgtgacagcatgagaatctgtcccaatcttcgcaacttacaggttttcatcctgaactttttcaggtcgttgtgtgtattgatccatcatacggtcagatcgttgcaaaattataatccatggacatgatgcgcattgtcttccatggtcacgtaggttactgtcttatagttacacatatacctcaagaccgtattttcccagcgggtgacaaatgaataagggaacatgttggtgtatagtttagtttcatttttccaaagtgtaagatgcacaactatactgaagggcaagcatgggcatggaaatcgattaagtttctaatcccgtgcagtaggatatgcattcgagtggcctcgttccacgttgtatgtatacaccatgctcttgtcatgtacgcatccaacaacactcccttgtccttggctctatctatgcatccacctttcactcttcttttcatccttgtaatagaannnnnnnnnnnngtagcagacaaagaaatggaaannnnnnnnnnnnnnnnttaacttgttc

SEQ ID NO: 1268 - DNA, 409 bp, Zea mays
tgttgaaggggctgatctaggtattgtgggtgatgatacacaggtttccagtgatggacctttaagtcctgctcctggtgtagagacagtagttgtcttcccaaaaaatgctggcaaaagtgagtatactttcaagtagcatccattacttatcttatagtctaccatggcctctgtattgatcacttgcaataaactctaaactaaactgaaaattttcatcatttacaagtaaggactccatgaatatatccacagcatgtgattttcctttaattatatatagtctatctcatgattacagcaaccaataatgcctatatttttttaatcttgctgcagttgtactagcaggtgaagaaactgaattactagttggtctgcaaaatgacggtaaccattattttcc

SEQ ID NO: 1269 - DNA, 383 bp, Zea mays
accacaccatattcattgattttttttgacctagtgaatgcattctaggtatatcaagcagttaatgcaaatgcttatgatgagatgttagagttttagttaacgtaacaccaggggtgttacaattttcatatgagataaatttgcaaagtttcttttcacctgttgatttattgctctttgattctgtgtagttttttaagaaaaagtactgaagtagcatgtactctgctttcattcagttgttaatccgtctcatttagcctatataaacttaagtgaaaagcattaaaaactcccttttagtttagtttcctaattaattagctttcttttgcaactctagggttcagtaattggttcctgttcgtctacattccctg

SEQ ID NO: 1270 - DNA, 400 bp, Zea mays
caatttcagtctgttgatgaatgccgatatctgattaagttgcttttctacttgatttgatatatatgtttggttgcacctgaatacaatttggttttgctgttttgtgcataataagtttgttactttgttagatggataattttggtggcccggtcacttgcaatcagccggatcagtttctgtatttatcaattttcgatgtacatgtaatgctgattgtaaatgataatggtccatgattagctttgacaaatatgtcacgactttttgattgcttttctgaaggtttttatgggtacctctgttattatgtgaaaatgagcattccggtttgactagcaatcaagatgagtttagctaccttgagaaaactaccaacttcgtctggattgtgcta

SEQ ID NO: 1271 - DNA, 385 bp, Zea mays
tagccttaccgctcttgttggtccatcgtcttcaccgtctcgcgccactggataccgtgcacccgaggttattgatccccggagggtttcccagaaggcagacgtgtacagcttcggtgttctgttgcttgagctggtcacaggcaaggcccccagccaggccgctctcaacgacgagggcgtcaacctgcccagatgggtgcagtcagttagtcgctccgaatggggttcggaggtgttcgatattgagctcatgagacacgaggctgacgaggagccgatggctcagcttgtgctgcttgctctggactgcgtagcgcaagtcccagaggcccggccctcaatggggcatgttgttacgcggatagaggagatcaggaagtca

SEQ ID NO: 1272 - DNA, 308 bp, Zea mays
cgtcgccgggagcgtccatcatcaccacgaccaccaatctgacccaccagaacctatgcccatatccggtggccgctggtgacggccaacacgggcgtccagctgcccatccccgccgacgacgaacagctagcggtgtggccattggacggcaacggcgagcactacaataaaacgacagagttccgatggctctgttatgtctgatggcctcgtaggcagccgccagagataacattatatccgatggcccagagcaaccgtcggacataatatcctacgctcgacgactggcagaaggaccgtca

SEQ ID NO: 1273 - DNA, 431 bp, Zea mays
tgtggaagcattcactgtctcctgataaaggtgagcttcacatctttagaacagacacgttgaaggaaatgagtattcgagtaccaagaacgaaagaagagcttttggatataaatggcctctacaagtaatgcagctactctgccatttttgaatgaattatgtatgctgccatccttttgttttcaaaaacggcttggtcccggtttgttcctttctttgttttttctcgaacgtttcttgtcgcggtctcatggtggttgctataactcaacctccagttcatagcctccagttcatagtagggttgaacaaagtatgcttaaggggcaggttgactcttctcacttgaaacgaaatttgcaggggctatgttgtgtaatggtaatatagtgtcacatcaaaccattgtccctgactcagttcatgct

SEQ ID NO: 1274 - DNA, 881 bp, Zea mays
gcccccgatgcatggctcctcattctcctctcggaatcgctccctccctccgcgttcggcaccgtgcacccccctcgcctcgcatggccgccacgggggtcagccgaggctggcgggaatacacgggccgcgtctggcatgcggctgaggagctttgcctccgcatcctcacatcctctgccatcagcctcctcttcgcgttgctcctgcatccacctctgaatcgaaaggtgaggtaccctggctgatctcatccggaatagtctgattcttcacacgatctgggcgccgatctcacctccacgctgctcatttgatgtgatgccaagtaattggtccacgtgtaattcctgctattcaactttggttaagggaagggatactataaatcactagaatattatatgggcaaaaagttcatatttttgggtgactcctaaagtagcataagatggatgaccgacctgaaatctgtcgttggagctgtcttggtctctgattggcatggcaatacattatacaagggacatgacctgtacggaatatttgtgccctctttggtttgtgcgagagctatactatgcatatattattttcatgtgtcaatcctaatggtctatttgcatgatgttgatcagtttactatctaattatttgatccgttgtggctctgcctgatcgaaatttggtgattggttacaaaagtttgatcatttgttattcccatgcttttatgttttggttctatcaccaaaaaacgatttagttctaagttgaactattttagtaatagtaacaaactactgcagcctactttgtagtttcagatgtactgtatgatacagacttggaatttaaggtaaagccaatgtgtgttcttt

SEQ ID NO: 1275 - DNA, 489 bp, Zea mays
  misc_feature (446)..(449): n is a, c, g, or t
  misc_feature (456)..(458): n is a, c, g, or t
  misc_feature (475)..(479): n is a, c, g, or t
ccccccaacatacaagtactcgaacaattcggacaagtacgccggagacgacatgaaccagaaggagaagaggagaacccctgcatggtaatttttttttaatttttttgctgctgcagattttggcgcagactatctctgccggactttgactagaagccaagaagtaacctcagtgacctttggcacgcaggtgcgaccgtatcctatggtacggagcaggcctcggtcaactgtcatacgtacgaggtgagtctcgcttttcggaccatcgacctgtctacagcgtcttcagcgcggaagtggaatcgatcaatcatagccggatccagaagatgagctgctccagctctcagctggacatccaagaactgctgccttactcatatggatacaccgacatcaacccgtacggatacacggacctgaacttctactgaaacagnnnncaagtannnttgtcatttcttctttnnnnntgcttgcttg

SEQ ID NO: 1276 - DNA, 1013 bp, Zea mays
gcaggtgttcgtcggatatctcagcgtcgcgtccctcgtatgcatgttcgcgtcccccatgtcaatcgtcgtgagttcttattcttacactttgtggagtatatttcaggtgcctggtctttttagatgatttcagacaatccctactttgctgtttggcagaatctggtcatccggacgaagagcgtggaatacatgcccttctacttgtcattatccatgtttctgatgagtgcatccttcgtcatatacggagtgctgcttggtgatggcttcatatatgtacggttcacgtttcctatttgcttggattggaagagtgtctaactgcatgtctgttagctgtgctcatctaattagtttctctatatttagattccaaatggcattggaaccatattgggtatcgtacagttgctgctgtatgcctacatcagaaagggatcaagcgaggaagccaagctgcccttactaatcacacatacatgagcatgccaaaagggaaaaaaaacaaggttcgataacctgcccatttgttctcgctctctcatctctttctcttaactttataaccatttggtaacgttgtagcagctgcacattaaagcaacttcatctttacacgtcatagataagttcttcaattaaatactgcttacaaaaagtctgtatatatctaatgttcggataacctgcaagcaatcacatgttcattttgaaaatgtttgcttcaatagactttgccaaagacatactagaagcaacctcgtttttacacatatgggtggtcaataaagacgcaggtagcttttttttattgggtgtcactttcttgcaagatattgctgtcttttggtacggctcaaacgctttggttttcttggacgcaaggcactaaacatggtccccatccaacaaatattatattatattatattagtctgatttcagctggagaataatccatgttgctggatctgagctggcactaagtcaatctagtctctcctaat

SEQ ID NO: 1277 - DNA, 374 bp, Zea mays
tggtgttcttctgcttcctggtggagcagcggcggacggtgcggagcagcaagccggcggcggggatctgctcgcgctgcggcgggtgcgccagcgtggcggacatggagaccgccaccagggtctgctacctgctcaccgtgcaccgccgcacctggcgcgccatcatctgcaccttctgcggcgccatgctcaagtcctaccgccactacaggctctactgactctcggccgatcgatggagttgttcgagtcggtgggtggtggtggaacgcgcgccttcattcttcgcgggcctcgcggcttgctgtgaggtgtagtgatgagctacttacggtactagctagtgatctgttcttcctgatgagtcctca

SEQ ID NO: 1278 - DNA, 429 bp, Zea mays
gcgtcctcgtgctccttctcatcggcctcctcgtcggtccggacctcaagcgggtcgtccgacggcggtgtggggccgacgctgaggaggagcagcagcgcgagctcggaggtggagaaccccgtccaagggctcatcgcctactgcaagaggtcctagcagctggcctccgtccggaagagcgccagcgacgccggcttccacttcctgtcgtcgtccgcgtccaggatcgccgccgagtccgagtccgagtccgacggcctcgacgagctcaccgagatctgcagaggatgacgatacgatagtgctccacgaacgatgaatcccgatcattgtacaatgatgcaaatgcgttctggagattttgtgaaggaaaaaaactgaaacttgtggcgttgaccgcgcgccctgtgtcaagtgtcatgatga

SEQ ID NO: 1279 - DNA, 393 bp, Zea mays
gcggcggcggtggaggtggctgaccatagcgccttcgttggagcagttgttgggaaggaggtggaggtgcaggtgcaggtgcaggtgaaagaagaggaggagcaggaggaggaggaggaggaaggaaacgaggaggagctgcacacgagagtggaggacttcattgcgagggtcaagaggcaaaggaagctggagctcaagagcttcttcgatgttgatcgatgatgactatatgatatgtttggcaggtgcaaaattacagtaaggttgcgggcgccctaaaaaggatctgtaatggtttgtgctgctagctatccttttgattaattctgtcacttgtagttgtagtaggttaaaatgtcgaaggtaaaacgataaggagacgaacccatc

SEQ ID NO: 1280 - DNA, 367 bp, Zea mays
gcctccggctctgcccagttccggcgctgtcgttgtgcgcgtcctcctccacgatggccagcttatccggggcaccttcgtggccttcgatcgcgccatgagctctgtccttcgtgactacgtcgagctccacccctagaccgccggtcgtcacatggatggaccccttgtcttccctcgtgcagtgatcgtctccttggcaatcgagccctcattgtccccctcccctcctagtagccatgtcggagcacctcctctggctctttccacgcaccctgcgactttcctaagatctcccttcccattgattgggtggtcgattctggagcctccttccacactacttccaccactagctcattattcc

SEQ ID NO: 1281 - DNA, 253 bp, Zea mays
gccgccgccgtcgcgcaggccgccatgttcaagaaggccaactacgcctgcagctactagctaggcctcgcgcatcatcagcgtataacgtacgcacgcaatgttcgttatataattccatacgtatatgggtgtgcaaggtccagaccgaccagctgtatgtcttcatcgttgccttcgtttctgcgtcgtcctcccatgcatgtttatgcatgatgccgtgccgtctcgttgtcagctggttcagtagtga

SEQ ID NO: 1282 - DNA, 364 bp, Zea mays
gctcagttagcaaaggagaagatgaatggaaagttaatctgcggacgcccaatggtagttcaccttgctagtgagagaagttctctaggctcttcaagttcacatagagcagtcaaagacaagaaattggcaggtggttcaggtgccaaatcacaatatactgatacagctgcaaagatagctgctataaaaaataagttgaaatctctggaggatgggggatgtagcacaaaaaaaccaagacttaatccagacaacttgacagaaatcagggaacagtctcataagaagttttgaagcgaggattttttttcgttctctggaacattgagtgcttttgccctctcatactggtgacacttct

SEQ ID NO: 1283 - DNA, 364 bp, Zea mays; identical to SEQ ID NO: 1282

SEQ ID NO: 1284 - DNA, 510 bp, Zea mays
atactcatgtgtcagttatctccgaacaaactggtttcattgtacgcaaggtatcacgatcacactaaccaatctgaaaaaactctcttgtttcctttttgaaccgagccagctccgagtccattgtgcggaggttctgggaacacccatcgttggggattacaagtatggacgccaagcacaccagaactggatgcctctccccatgccacaaacaatcgacaaggaaatgctgaagaagaggaagcttccctttggtcttactttgggcggtggaagcgtagctgagcagcagcctcagctgcatctacactgcaagcagatgatccttcctgacatctcagcagctatgcaacagctgcggtcttcagatgctgaccacgatttctctgatctggagaagctgagctttgtcgcgccattgccattgcacatgcagttaagctggaagattttgttgtccgtaggcaagtagtgttgtcatttcttctttaggcatgcttgcttgct

SEQ ID NO: 1285 - DNA, 257 bp, Zea mays
gttacatgtaccatccgcatcatattgcttaggcatcaatctttgttgtaccatataaaaaataaactgctcatgagatagatgtctcattaaacacaaatcactagcaaaaacttgtgagttatcatttccaatgtttcataagtatatgccttgacacatgtcaatgacttattgctcgcctatagatttttttttgtacgccataggtctcaaattgggtcatataatgtatttatcaggatttgtgaaggttt

SEQ ID NO: 1286 - DNA, 257 bp, Zea mays; identical to SEQ ID NO: 1285

SEQ ID NO: 1287 - DNA, 389 bp, Zea mays
taaatgaggattttggataaagaaatgagtaaaaattatataagcacaaattcattcattgtattaagtctctgcagcaagttgctttgggattatttcccgcaacatcatttcaatattcgaagcagctaaaaactcattgttgcttatccccaaggttcctacctgtaccaatttggtacacaccagtgtggcgttatgtcagactgttcactgttggcctagggttgctagcatatgtgtgtatcagggtccatacatatatggtgaggttgagtgtggtttgtgtgagctatgtgcatctgccttatatctccaaaaaacgcaccaaaaaatcatcattgatcaacctagctatagctgggagactgggacctaatgttaagcat

SEQ ID NO: 1288 - DNA, 419 bp, Zea mays
cgtcagcttgcgccaatggcgactgcacttctctgttacctggtggctcctgctcaggtcttgcctggcctggcaatgtgtcatacgcgttcaacaactactaccagcagcatgatcagagtgaggatagttgctacttcaatggcctaggtttgataactactgtcgatccatctgtcgacaattgtttgtttcctctcacaattcacgtttctgccgccacttctttgcacctaacattgcccgtgtcgctgttattagttttgtggttttgcattgtctgtatatagtctgatgaggctatagattgagccttcaaaagtgtttcgttgggcctcttgttgaatgtactccaaagtctcggtgcaccatcagacgtattcctagaatggcacaatctggctatcagaactggtagg

SEQ ID NO: 1289 - DNA, 358 bp, Zea mays
cgcctctgagctcatcgccttcccccatagcccgaacgagatatttgcgtccgacccgcccatcgacgtggacgccatcatggagaacgagctacggaagaaggacggcggtgcggatgtggaacatctcagatctgtcactctatctccggcgacctgggtcgggcgaggcacttctttgatgtgatgcctgagtggaacttggtatcctggaacaaaatgttgggcgcgtatgcctgtggcaggatgctcaccgaggcgcgggacctgttcgacgcaatgcttgccaggaacagcgccaccttccgataattattagctcgcctcccctcccattttctcagtacaatctactcca

SEQ ID NO: 1290 - DNA, 509 bp, Zea mays
atgtcatgcacccttcctgtctcgttccctgccacggggccagcgcatgcatgatccagccatcaccatcagccgctcactcactcaccttgcgaggaacttgtgcagagtcgtcgtcgacccggaagagaaagccgcgtggcagcatgcgggagcgggaggaggggaagcggagacggtgggcgagtacgcagccgccgggagggacaaaggacacggcagacacggccatcgagcgcgcccaacggtgcctggagaggatccgcgccttcaagcagagcttgcttgccgcttggattcactgacgggatgcgggggtggagaaagaaacgagagcaggaggaaagaaaaactctggcgatggaaagggaaaccaaaaaataaaacaactttgatcgatcgagaacccagaaccccttttttttagtattggaaagtgagaatcataatgttcttggacaaaaagttggctcttcaagattacacagacctatgtaagtacagctgcc

SEQ ID NO: 1291 - DNA, 382 bp, Zea mays
acgtttgagatactgatcacagcactttgtttccacagcagagcagatgaagcggtcaagctctttgataagatgctgcaacttagatgctcccctgatagcagcttccatgctcaagtgatgcccctgttttgcaagttcagtaaagttaaggaggtgattacgttgcatcgaataatgaaagaaggcaacattcagttgagtctgcagttgtacagtgccttggttagatgtttatgtgagaatgaactactggatgacgctaccatagtgttcaaagagatggtagcatcaggtcatgctccaatggcaattacatatgtggacatgataaattgctactgtacaaaatccaagttccacaacgctatgatctttctag

SEQ ID NO: 1292 - DNA, 752 bp, Zea mays
ggatgattggagactttgcagatgacaggactctacgggcttcgattgcatcattcacagctgctgatggacttcagttcccaagggattcaggtttgatgaagtcatctagctactaatggttttttaacttcatagtaaccagctaacgtcagactgcttaactgacattttaccatcacatattcaatcgaggaagacttctatacgcgcactagcaatttcagtgactttgtaagtattttcgcctgtagcgacatcgtatgtttgtgttctagacgtcactagtcttatgagtgcatgttgctctgaaggcttggagtgagcagcctgaaggccaaatggcaggagcatcagaagcttttcagacacctggggtctgcattttctttgttccactttatgcatttggaaaaaaaattgtattccattgcatttctatagcatcatgtttcccaagtaaatgcctgctcctggattgcgtataaacatactccttcaacaggctgtgagtaaccggctatcctgtggcatgacacccaaaactgtgaggctacccaagaatggtgagatgctcctatctgtgcatggttcacctcttggggtctataaagaagaaaatttagcagccattgaaggtattgctcttgttctcttgctagtttccctggcagaagccccattaggtgttttcctgttaaccacttttcttattccagaatctggtaacggaagtgaagatgctccctgat

SEQ ID NO: 1293 - DNA, 434 bp, Zea mays
cgtcgaccgcgccaaccacttcgctgcgaggggtgccgaggccgcggtcgcggagacggagatccgacaggcggcgccggagctcctcctcgtagctggcctcccggaaggcgtccccaacgccgctgcgaaggcggcgtcccttttccaccgcaccggcctgttctggcttgacctcggccgcgccgacctcgcttccgcctgcttcgagaaggccacgccgctggtctgcgccgctgacacggaggaggatcgggacatcctgttggacctcaacctcgcgcgtgcccgcgcggcgtcgagcgaggggaaacaagccctcgccgtcgcgttgctaagccggtccaagcccctcgccgcggcgtcttccgtgggggtgaaagccctcgccgaggggtaccttctcctcggcaaggctgctctcgccactaaat

SEQ ID NO: 1294 - DNA, 350 bp, Zea mays
tatataagacggggtgctttgcattgcgtgcgtgcgtgttcatgggatcgtgttaagacggaggatgcactcatggtcccagagagagagagcgagagagagagaggcagcatatatgcatctttcatcgttaaaagaagctaggccatggacagacaccagcagcagcagcagccaggaaaaaggattaaaggtgtagcatcagcagcagctagctctagggtggtagtggtagtagtggtagagtgaggtgatcgttcgaaagccagctaaacacagatgcaatgtgtgtaatggatggagttgttgtgttagatcgagcgcgtttgcgtttaggatcggaccatctg

SEQ ID NO: 1295 - DNA, 234 bp, Zea mays
agttcagaaacgtgttatgctgcgctactgctgctagcagttatgatgtggatttggcatcatgacaaggatattacgtaaatatacttcggtccccttgaacgcaccacccatcgtgttaccatgaatcggtttgttcttaggagacctgatggttcatgttcagtaaatttgatttgatgatgaggcagggtttctctcacctgcacagacacaaagcttcaaatcgcaagt

SEQ ID NO: 1296 - DNA, 404 bp, Zea mays
gagctcgcgtgcaagtgctcagctgcggccattgcacagcgcgagccgcgagcggaagggacaaaagcgtcttgcccgactggcgcggccgagaggaccgttcacgcaagcacagggaggaagagcagcaaagcaagcgccacactcgccgcgcgcatcccgtgcagcgtgcgcagcagaagcacagcagcacgaccccggctaggcggctaccacgatgggtgggcaaactttactaagaaagtcgccacgggcattgacgcattgttaacggcagatagctacatggatttagttaagaaagcctataaattttagtgcgagttgaaaggcggttcctcgtgattttgccccatgattttcgatacgcattactagtatttctcatgtatacattaagtagc

SEQ ID NO: 1297 - DNA, 263 bp, Zea mays
catccccgcttcacctccagatgtccagttctccacccccacttcgcccaccgagtgccagtggagcgcttccttgacctcgccacctcctatcctccccctcccctaccggcgcccgttctttctttcccttgccggatgcccgccgccggagctgaagagagggaatgcagccgccacagcactacccaccaacgcctgaggcggggtcgcaggggccagggccggccccaccaccgtcgacgaggcgtccatggaactca

SEQ ID NO: 1298 - DNA, 466 bp, Zea mays
ggatgggccgcgccgcgccacagcaggtgtgttgcgcttcgtcagggcgttcgccctctgcgtggctacggcatgcctcctcctggcggccggcatgccctcgcctgtggcggcgcaggacccgtcgaagctgagcctgcagtactactccaagacgtgccccaacgtggagcacgtcgtccggacggagatggagtgcgcggtgcgcgccgacacgcgcaacgccgcgctcatgctccgcctccatttccatgactgcttcgtgcaggtgatcagtcggtccctcctatatatatcagctaatgcagcagcagcagctagctgatgtcatcgtcctaatttgcagggctgcgacgggtcggtgctgctcgacgacacggcaaccatgatcggagagaagcaggcggagcagaacgtcaactcgctgaaagggttcgatctggttgacaagatcaaggagaagctg

SEQ ID NO: 1299 - DNA, 908 bp, Zea mays
  misc_feature (573)..(576): n is a, c, g, or t
  misc_feature (579)..(579): n is a, c, g, or t
  misc_feature (662)..(905): n is a, c, g, or t
gagtgactccgccgcgggccgccatcttcgtcggtgatcttttctcctgtgagtttgtcatttacttctttctcctctcctctcccatgtctatgtcctacggtttcgatttcttgctgtagtgtcctgccgaggcgtgccggatggcgttcagccgggcagaggtgaacgctggcgaggtcgcggcgctcacctgcagcactcagagttgcttagccgcggcgcgcgcacgtggttttgcggctgggcgtagtgagtggtgaaggcgcggctggccactcacctttcgaaaccccaaatcctcccagacccaaaacgattcagagatggttcagagagttcagagcacctgaatgatttagctttgcagtatcttttttgagatctttaattaaagatggcatctctctgaattgaacaactgtctttaggatggagggagtactacaaaaccacaacatcttgtttgtagacaaggagtgcgatgcatttatattaggaagaaaatggaagaatactagaggcaaggcaccaagttggccagattacccaggtcgatacaaattaaaaagnnnnccntgcaggtcatagtaacgaagaaggaatagtatagtaaaatggatgtaaagaatatcctctccccctgccctgactgctattgnnnnnnnnnnnnnnnnnnnnnnnnnnnnnnnnnnnnnnnnnnnnnnnnnnnnnnnnnnnnnnnnnnnnnnnnnnnnnnnnnnnnnnnnnnnnnnnnnnnnnnnnnnnnnnnnnnnnnnnnnnnnnnnnnnnnnnnnnnnnnnnnnnnnnnnnnnnnnnnnnnnnnnnnnnnnnnnnnnnnnnnnnnnnnnnnnnnnnnnnnnnnnnnnnnnnnnnnnnnnnnnnnnnnnnnnnnnnnnnnnnnnttt

SEQ ID NO: 1300 - DNA, 345 bp, Zea mays
  misc_feature (334)..(334): n is a, c, g, or t
atttcaccatctcatctgcatagttccctttgtttttattctgttattcacatggtttttctagtgatgttattatcaaagcagttgacgatgcttacctgtttttccatgctaacgtggcttcgatattatcatgtttttttgagccctttgagaattgtagcccaccagcatgcctctctctctctctctctctctctctctccaaagtcgtgcgtggagattcaaaccggtagtctagtggttgccgtcaaaagcagccagatttgtgaaatcgtcatgtgtgttgctctctagtttaccgatctgtgggcttgtaaagaacactgtaggnatgcatgaaaa

SEQ ID NO: 1301 - DNA, 367 bp, Zea mays
cagtgacacccaggacagggtcgtggggtgttcatccttgattgccactgctagctactgatgagagggcgtcaatcacacaataaatgtgttcttttcaaggtctctaggagactaattaaaaaaatataagaagcgagtttttcgcgaagaattgtctctacacgactctctatatatattattttctgcatctaggtttagagtctctgagttgaatcatatagttttttaactgtatcttatacttaaaaaatcagggttgtacataccatccctgtgtctggatgatccaaacacgccgtccaacgaagaatgcccgtggtgcacaaccgtgaatgaaggtcaagattcaagaaccagaagg

SEQ ID NO: 1302 - DNA, 462 bp, Zea mays
tggcaactccacacccagcaaaaggcaagacccctgcaaacaatgacaaatcaacggagaagtctccaaaatctggtgggtcagtcccttgcaaatcatgcagcaagtaagtaggcactgatttatttggtgagcctatttggttatctggtgaaaaatcgatcaatgtattgatccttggtctctgtttgctgtctgtccaggacattcaatagtgagatggctctgcaggctcactccaaggcgaagcatggggccaaatgagttgcaggtccaactgagtccatgaaggagaagcatggtggccaagtgagtcgaaggtccattcgagtccatgaaggtgaagcatgggagatccaagcgagtctggaaagattgtcgatgttagtaggctgtccttattttgtttagagacttgtggctatgtgattgatgtagcgaaacaaggctgtgatgtgttaa

SEQ ID NO: 1303 - DNA, 526 bp, Zea mays
  misc_feature (509)..(517): n is a, c, g, or t
tgcgtttgctccgccggcgctccactcgcctcccccgcgtctccggccgcgtttgcttcgcggcgctctaaggttccaggcaagcacacttcctccccagctctcctccacccccacacttctagttcccattgctagggttcgtcgtgctagggtttagggcttgcgaccgcctgcccaataagtctgcggcctcctccgtcctgcagaacccgccgtcgcggcggtgtcctcgcgccatgcccttcttcctggaccagcgccgcgacccgcgcctgttgtcggtgccaccgccgcagtcccactcccgctgcagcaactggtgcagcgcgctgccgttgtcgctcgagctcagctgccccaggaagtgctcgcagctgctccccgctgctccccatcgatccactcccgctaccgccgcgaggtgcgtgtgcgcgtggcttggtgcgtgcgcgctctgtggtggtgtcgagagctgggcttggctttggtgcacatcaaatgtgttnnnnnnnnncatttgaag

SEQ ID NO: 1304 - DNA, 447 bp, Zea mays
accacaataaacttgtatgtattcactgctggtggggagcagcttagcaaacatttgactgtatgtcaagctatccaacgtcgtcgacttatgcttgacgaggatgatgaagaagtgtttaatggatcttgtatacaaaacgatggaaaccactactgggatgatgttttcacaataacgtaccagaaggctgataaccaagggacttgcacctcattgaacataaaatcagattcttacaggtctatctctgaagcacaaggggtttctcttcttgatagcatcttgtgtgaaatccgaagtgtttgtcaatagcaattgtgtgaaatgcgggttccttgctcttgtttgtagattcagtcagaattgtcccctgagcagcagcatgcgtttctgccagtttgtaaccggggtttccacttggtggattggctgcccttagtccca

SEQ ID NO: 1305 - DNA, 325 bp, Zea mays
acttcccaaagcctctccaaacatggtgcgtcgccgcaacccatcggtgattgagttcagcagcgactttgacgagattcaggaggaatcaccggttccctctcctccgcctcgttgttccctctctaagagaggacgcggctctggtaggatggaaggagagggatctttgatgccctcgcagcctgctcataggaggcgccaaaaggttggcgccaatcgtcctcgtcgcagcacctcctcctttggatacgctccttgccaggaggaggatggagcattcgacgacgtcgtcgatcttccgtcgtctgacgccctctacatc

SEQ ID NO: 1306 - DNA, 330 bp, Zea mays
ttccggttgggaatccgatactgtagtcttcaactaatagttagggtgcaactaatagttagttgaactattagtttggggtgtttgaatgtcttcaactaaaaacagcaaatagttaaactattagttggattgtttggatgtcaccatgtaattttaggagctaactattaattaactctagtgcattcaaatagggccatagtaggtaaatgtaagagcaaatagcacacgctttagtaatataataaattttacaataatatacggacaatggttacaaccttttagtaatatccccgattaggattctttcaatatgtaccttgc

SEQ ID NO: 1307 - DNA, 396 bp, Zea mays
ttccaagcagctaggacgaacctctgtgttgggatggtcggatgaggaggaggccattccgtcggtgtttgttctgataagttcaatacttggatggttaggatgaacctcggctgcatgtctataagctgcttccactttctgcacctcacacatgctggcacccgaacagtcgtaggaaataacggctttctgaagatgtcgatacaaccgtagctggctgatgaagaaagcgtcaggtttatccttcagctggagcacgccgccttctagttgaatgtgctgctgaagctgagaagtacacaaacatagaggtgagatagtagtacccatgaacatatatataattaacacagcgtattttctttagcagactcaaagagaacagactcacca

SEQ ID NO: 1308 - DNA, 671 bp, Zea mays
tttgttagtatttactctcctccctcccttcccacaactatgcttttcagtttttaatcaaacaggaaagtgatgctcagaacaagcccgggaaactctacacacaactggtgtcagctcagctcaagatccaagacatcaaatcacaaagatcagcgcttcttttagaaatcagcagagtatatcaattaggacctaagcttctttattattatatgtacctagtgagactaacagacatgaatatacttttgcagatcaagcagattctggagcaagagaaaaacataattcctggttttcccgtaatttcattgctcatgtttaaacattgatcatgttaaattcttcctatatgcattgtcatctggtccttgcaggctgcactacagcagatggatatgaagtcattggaggaggaatacaaagctctgcaaggtgataaatcgggggaagttgagtacttccagtctcttgatgaaacaattaatgggatgaaggtactttgctcgtgctgttcagtttggatgccacatcatgactataccattaggaattattcattttgcttttctcatggccatacttcgtgcaactcttagcaattttaacatgtgaacttcaattcctccattcaggggattttggatcctgtcaaatgccaatgtgga

SEQ ID NO: 1309 - DNA, 515 bp, Zea mays
cagcagcaccagccgcgccctcttcctcctgcggcaggtcggcgacccatgcccctgctcttctcatggccgcctctcctccatcccctatccatcttctcccatggtgagctcgccctagccctgcatttttttattttattttcctacagcacgccacctccatccctcttccatggatgacgattttctttcctgcagcaagaagccatggcaccccttctccccttgttttccatggaaaacccaagaacctactcctccccatggctgtgtctcctgtaggttttcgtacaatcgcagcagcagcagatatggaatcacctctatgtcgtgcccacggcatgctcgatgaaatgtcgcagccagttacacctagatctatgcagccccatcccacgatgtcgtcgacccttggtgagatcccacaatgtttctcaacttgtttcctcacccgacggcgttccttgctaataatcagtgtatatgtgtggatattgtgaggagagatctga

SEQ ID NO: 1310 - DNA, 819 bp, Zea mays
ttctactactatcatgctggcatggcggggacacggtgccgtggttggcacacatccgagaacgtgatccttatagtttatgttttagtacaagctgtgtaaagtggacctgtgcttgcgacttattttcacaagatcttattaaagaattatcatgctgtcttgggttggaaatatatcataaaaaaggcagcctgccaatcctttgttttttatatatactacaaacattacgcagggtatgcttctgttactgatttattcatcttcctgtagggtgctgagttcgagcttgataccatcaaaaaattgtcaaaggagtatgcagaagcaaaggaactggcccttgcaggtgcctgtccattgccattgtgggatatgtgcattttccttctcctttacgtaagactccggacacaacgccattcctaatccaactgctatctgtttgcccctatcacctggacagaggcaagccaaactgtcgaagttgaagatgctaagcacctccttcagagtgagaggctgttgggcgacaagatagatgaagtcgtcaaagaatgggatgtccagaaggaggggttctacgagagaactggattatcctcatcccctggtgaccagctcatggcagtcgacaacgatgaatcaggagctcgagctcaatgtcacaaggatggatcctgtggcgatcagctcatggcggtcgacaatgatgaatcgggagtacaggatcacgaggacctcgacgacgacgacgatggctttgccgagttagaactgctgctagagtgaagaacatatacaagtctgtaaact

SEQ ID NO: 1311 - DNA, 407 bp, Zea mays
gtatgctaaggctccgctggaggccaaagcccacgcaccaagggccaaggttctgagagatgggaagtggagagatgtacatgcagcaaatctggtcccaggggatatcatatttctcaaagttggggacattgtcccagccaatgctcgcatactccgatttcagaaaatcgacacaatgacttgctgggccaaaaggtctgttgattgtgcgcatggcttcctcctatactatgcttggactgtttcctgtggccaaggaactgccgttgtcattgcaactggacgtggcattcccagaagtacattgcggctctacccacaacgttatgctcgacctgggcagcttaaagaaggagccatgcttactggctgcttctgtgcttccctggtacttgttggtactt

SEQ ID NO: 1312 - DNA, 377 bp, Zea mays
acgtttactgatagccaaagtaacgtttctcttttaacaaacagcttgagaatctaagaaattagctaaatcttgcaggttcttcatcatcacaggagtaatactgcttgttagttcaacccgattgattgcgcgtctacctaggcctgttcagaagtttttgaagagcaacatagagcgcacccacagcatcaggaggcctggttcagcacgagggaaggatcccatcccaacaacaacgatccatacgtcgtcactgcacttgcttgcttctccaacaaaggagaaggcctagaaaaatgttggcactagagcaacttcgtttcggcgcctcacgtttgccatgtcattgattgattgaatggttccgtgaacgt

SEQ ID NO: 1313 - DNA, 607 bp, Zea mays
  misc_feature (562)..(571): n is a, c, g, or t
tggtttggtgtttcagccacagcgagcacagcgctgaaggccgtcaggctgatcgaacgtgtgtggtcgggcggtcgtcctaatactgtgtgtgtgacgctggctggactggacagcttcctggtgacgatcatggggctggtcatcccctggagctgcacgctggccatgatcgacgtgtactccgtgttcgtgggttgccctctgcgcgtgccgggcgtcatggtcatcgtcgtggtaggagactgcgtacgtatctctctacagtcttcttctgcgtcccggcgcgccaattcaaaaccaaaaaagagttcaaacctgaaatctctcaggccctgtcgatagtctcgttcgccgccgcctgctcgagcgccgcggtgatcgacctcctcctccagctccatggatcccacagctccccgacgttctgcgggaggtaccagctgtctgccatgatggcgttcttgtcctggctcctcatggccgcctctgccaccttcaacctctggttcgtcgcctcacggtggtaaagctgcagcaggccactcttttttgttttgtnnnnnnnnnngcgcacataatttggctttggagagcgtatgctact

SEQ ID NO: 1314 - DNA, 659 bp, Zea mays
acttcacctgtcagtaagcactgcatcatcactgccactgctcaagctttagcttcacttccccctgtatctgcaaggctatatctgaggccttcatcttccatcatcacctgcagatattgttcttgtggtgacgacttgacaattgaccatgttattccgatctcgcgtggcggtaaatgggaatgggagaatttggtaggcggtcctagtgctcctattctaatctactcgttttttttccccaagtttgttaggcatgtccatcttttagttttaactgaatctgtgcaggtgactgcctgtgcaagatgcaactccaggaaggggcagaagacactggagcaggcaaacatgaagctgcgcaagatccccagggtatgtcatgtggcatctctgccttcctcactggatcctgattgattgtttgctcttgctgcaacaaggttgcctgtgattgcggctgttgctgactgcatcgcactgcaggcgcccaaggagtacgatatcatggctgtgcccttgacaaaatctgcgttcagaacgctcaagaggaaccatggcctccctgaagtgtggctgcagtaccttgccaggccatctccatgaccaagacccccctcctcgccatcgccatacgggccagcaacagcaagcaa

SEQ ID NO: 1315 - DNA, 425 bp, Zea mays
gccaggacaccggtggcggcggccgccgctccctatgggcgaacgggagcatagcgaccgagggcggccacttacccaccgacggtgagcacgacgacgaggaccctacggtggcggcggcgaggcggcaggaggaggaccgcaagttctgggaggcgtgcctggcgtcgggttacccatgaacccttcagggcgtgcaggccgacaggcagcagggcatgcacatgcgcgacgcgcgcgctcgtgcttcttcttgattagtggttttgtttgtttgatcgatgccgacggcgacaagaaggagaaggctgttgttaggatgaagttaaaagttagtgcatgttatgtatggcgtgtaaattgcaatcatgaaacaaagatggatggccaaacagctgcgctactggtagattgtcacattgctt

SEQ ID NO: 1316 - DNA, 370 bp, Zea mays
atggaaacttaaggcccctttgaaaatcaaaatcttcttatggtttttgcggcatagagtaatcctcacaaaagaaaatttagctattcaaaactggaaagaaagcttagactgtgtcttttgtcataagtaggaaactattaatcatctgttttttgaatgtcgcttggcccggtcggactagggaattttgcagttggttacaggtttttgtcaaccaaaaaatgtggatcatttatttgggtcttgggctcacaacttcaataaaatggcagatctttgtttttacttggagcagcggtcttgtgttggcctctgtggctctgtaggaacgacttagtttttaagaaaaaaactcttttgctctcct

SEQ ID NO: 1317 - DNA, 390 bp, Zea mays
aatagaagtcttgtggaaaattatatggaggagccctgcaaattgacgcatttacatgacaatctcgatgcatgctacacgtctctgcgtactaatgtgaaactagatcaaaatcttggcacgtttaggagccagtgtccctgcccaggccatcgataggtcgactccatgttgtatattggctagctctgtagcttggctcactggctcttaaacgtgggaaggcttgatctagtttgagattggtgcacaagggcatgtggcatggatcaagatcgtactataaacgcgtcggtttgcaggacatagattttattttctaagtcttgggtgatttgatcatgggcaccgggtaccggatccgtggactgatgtacagtgggtctattg

SEQ ID NO: 1318 - DNA, 365 bp, Zea mays
agggccggcggtcaagcttgcctggacccgcaccgcgcttgcgcctcgtgttagttagggcgtcgcgtcgcccccatgctaaggagcgccggctcacggagggcatcatcggcgtccagcaaaatgccttctacatgcaacatcctcatgtttgaatctgaacaagcgaatccaatcaggttctacagtcgtcgtccccttcgatgtcggcgcagcagccgccgaaggggagcagcatggacccgcccacacgtaagcgcccttagaagcaaatcctggagtgctacagccccagccaagcgttgaaggtccctctcattagctacttcttgcagtactaccaggatgcttgattgtgcactgtt

SEQ ID NO: 1319 - DNA, 337 bp, Zea mays
gtggcggcagctgcaagcctgcgcaggcgtaggaccacaagcggtgctgctgctggcggaggtggtgccagctcgatgctccagttttacaccgatgaggctgcgggccgcaaaatgtcaccaaacaccgttctgatcatgagcattgggttcatcgctgttgtcgctatgctccatgtttttgggaagctgtaccgcacctccaactaggttggtactaccataaccaagaaaacagaggccaccaagagaggagccttatagagccatttcaatggatagcaagtgactatcagagaggaaccttgtagagcgatttcaatggatagcaagtgac

SEQ ID NO: 1320 - DNA, 377 bp, Zea mays
tgcgcgagaggcggacgaagcgctcagcccggaatcacggccgtcgagcagcaagcgccatcgctccggcaccgcctcgccgtcgtccaggagcagcccctaccgcaacatcctgcaggtgttccagcagtgcaggcaggacgtcgtcggggagactcccaccaagaactactgaagcctacgagcgcgacagagcagggtcaggccgcgccgcgatatcacggcttttcgtcgcttgcttgctcgagaatataactcttgccattttgcccattcttctttatgtgactgaaaagggatagggagttttttgttcttgtgtaaagatcaggatataaaagttacaggaccttagtaaagaacgccatagaaatgca

SEQ ID NO: 1321 - DNA, 407 bp, Zea mays
gtcgcgccgcgtgagctcccgcacgcagacgccacgcctatccctgtgtcctcggcgcccggcctcctcgcctccgcaccacctcgcgtcagtggagcctgcagccttccactatcgcggctgtttctcgtttcccccactctgctctaaagaacgctgacgccattgatggcgtcaatggcgctgtctgctctcttcttctccctccgacccctctgctatcttcccctctataaattgaagccccgcgcatctgtgattcgttacccggccacgccgaccttccacgtgcctccagctctctgtacgcgaagctgtcgtgccgaccatcgccgttcgccgccggcaaggacgctccaaagcccgacgttgtgcttccgtcgaccttcctctgtaacgtcctctgt

SEQ ID NO: 1322 - DNA, 728 bp, Zea mays
gtttatgtacttcctctgtttttacatgttatattaattttgtcctaagtcaaacattactatctttgaccatccattaaaaaaaatcttatattttcatagcatacaaattatagattatgaaagcatttctcatgtagtgaatctaaaaacgtaaatcttatcatgaacttacatttttcttaaaaaaaattgatggtcgaagatacacatgtttgacttaggactaatatgacatgtaaataaaaacagggtatgatggatttctagcttcacaaacgatactgatatgtcaatattatctatgctgtgcagttttctatggtctatgtgaaacccttttcgagcttgacctgggacttgtttgctcctcatcatgcaatattggaaagatgaaaattggaactcttcagtgttactacctactatcttcttgaacaatctgaaaaaggaccagtgctccccctgtcagggacggatctagcggtggggtgggcggggctcgagtctccctaccgtttcggatcccatgaagccccactacagtctcctctaatctaaaatgtatacaatataatgtagaatgagcttttatactgcagcaatttagttcagtccctcctaaacttttttctggctctgtccctgcccctgttctattttgatttgtgatgtagtgagagacatattttttatttttgtgaaatgtatatttcaccgcttgtagt

SEQ ID NO: 1323 - DNA, 698 bp, Zea mays
tactcactcagacaagcatcttctgcaacaggcaatttttctgtttcataatcaactgggtctgaaatgtctcataccaactaatggccgtgagaatgttatttaggcttatataagttatacagaagatgtttcgttatgataatgcacaaaagttatggtgtgcaatgaaaggtatatttgagagtaatagaaatagactcattgtgctgcatccttaactgtaagtttcttgtgtgcgactcatcgtaatcgcaggtgtttcctgtttccaatttgcaggtgcaaaatgtgttttccaccctggataggtactgtctttcacttattttcgtttgttccctgaactggcttttctttgtgcccccacccttttaattcatttttttataatatataacatactgttagggcaacccctcctgtttcctaaaaaaattattgacatctctaacatcaagattggagattgttcctgcgcttcctgaagtcttttttttgtcatgatttgcattttcatgagttttagtttcctcttaccgagcttcttatgttgtttctgtatgtgatagattgtagctactagctagcagcttcttaaggacccacactataagttttaatattcttggttttcttgttaacttcaggggtcgtggatttctaagtcttgaggaggtgtaccaggcattaatcaa

SEQ ID NO: 1324 - DNA, 213 bp, Zea mays
gattcaaaggcttgggtggcctaggtagagcatttacgtagactactggtatacaagaggagtcggttttcttgggtagacgtagtgattgctgagggttgaaaaaaaatggaagcgatgattcttttctcttatctaattatggggagaagctgactatcgtagagtgcaccaccaaaattattttttgtgaaactgcagaggtgacaaata

SEQ ID NO: 1325 - DNA, 585 bp, Zea mays
tgggtgggtgcttgcaccaccctctggggctagggctgacaatgggctataatttttgcactataagatttaaggatcgaagcgagttaggatcgggctttatttctagtcatttttgaactataatttatttagggccttgatattttgtgaagaactatttggatcacgatccattaccacctctatctggggccctctgtcgggttggggggactcgccctatgctggcggacgtttccacggcaccaccgggtggactgggtcacctactccgaccgaatcgctcgccagagaatcaaactcgccgcggttcgtcctacgcgcgtgggcagtgtcatccgtgtcgctagcgccggtgagtattcgatctttgtgtccgcctccgttttttctttgcgtagcacacttcagatggggaaaacaggggcaggagagttgttttcgtcgtctgctgttcgtcggtggggcgtcatgatcgtgggctcccctccaccatgtggcgccatcaggtaaggaagaagcacctaggagcattgattccacgaatggacgaccgagattgaagtagcgtactggttcatg

SEQ ID NO: 1326 - DNA, 570 bp, Zea mays
aaatattttgccatagacgaaaaatatgcaattagtttttgatctgttgcactcggagttagcgacaatctccgcggtcgtagagttggtgccccacaggtgctgtgctgcgatgtcgaaaccggcgtagaagggcacgaagacatcggcggcgtgggaggagtcgcccgtggggcagtcgtacttaggggtgacaatgggctctaaattttacactataacatttaaggatcagatcggattaggatcgagctctatttctattcatttttgaactaataattatttagagccctgccattttgtgaagaaacatttggattacgatccattaccatccctagtcgtactactgcctcatccggctgtggaagatgacgtcgaggccgaagtgctccgtggcgtaccacccctcgtcagctgtgaggagcagcagagcagctcccattgacagcaaggggtcggctgcccactgcggcactgcctcccagggtctgctgtaaatgtgtaaataaatataaaatatccccaactccatcccatggctgctcagtccaacagagagaacgt

SEQ ID NO: 1327 - DNA, 357 bp, Zea mays
agctgtcggtgcctgcctgcctgtatgactcgccgtcctcaaaaaggccctcacggggcacgggttggtgcaacgtatgcgctatgtgcaaagctagaagacatcttttgctgaccgtgatccaaagcaaagagcggcactgaccaccaaaggcaaggaaagggggggagatgggctggagcctggagtccaacaaagtgctgtgtgcctgacgtggatgagctcaaactctgagccacaccaattgcgcgggcgggcgcctttcatcatctcacgctgctttgctttctctcaaatcccgctgcatgtgccaccacactagcgtacatacgtatgtatgcttgtgtaatcgctttg

SEQ ID NO: 1328 - DNA, 507 bp, Zea mays
gggcgatatactcacatgtcagagctaaccccaccccccctggtgggtgtctgcagcagcaaggcgtgagcagcaacagcccgacgacggtgcccgcagccgagcccctcaagcccaagctgcaggtatacggagagagagagagagtgagggcaaataaaaaaattgcatcctctacaaacctttgctacgtacttgtgagtcgtggctggctctgatggttttttttttcccgtctttgatgaaatgaaatgaagcggacggcgtaccaccagcttccccctcgacggcccgcgtacacgtcatcggagtagctcggcgagcggggagtcgctgcagtgcagcaccgtaggaagccggaatccacgaaggtggcgccaattgggttgtacatgttgagaaacactgatgaaggattacgtggtaaatatcgaatatatttctaaaggatatcacgtctctatatatatatatatacatatacaaattaaatgtatcgtctcgtgt

SEQ ID NO: 1329 - DNA, 662 bp, Zea mays
gaggggaaagaggctggagccggctcaaatggactgcggaagcgattccgacggcgctcccgaggagctcaccgccgtccaggtacgtctagtcctctcccctccaggacccgaccctacgggaggtagattcaggattaggtacggttcgcctgtgtattccgcacaagcagacggtaggtggggtggacgcgcagatagccccgtaagaggattctacagctctgtgccgtcgatttggttgaccgagaactattttattttttggttggattagagctgttggcctttttagccttgccggtcatattgtttcttcttcacgcttcaagctctatgttgagatatgcaaaaggtactgagccttgttatcgtcttttagggtgttgagaagcacgaagagatcagtcaagttgagaaggatagtgccatcaggtgtgtttcttatgcatactttacagctgagctgactggatggacctgggccctctgctgcccaatgtgctacgttgaactgttcttgtttctgtagaatgcacgtgagtagtagttgccaattgatgcttgctatggagactagttttgtcttgtggactatgctagatttctcttgctcggtgctgtgtctacacttattcattctcttggtttcagtagatgca

SEQ ID NO: 1330 - DNA, 163 bp, Zea mays
tcatgaagaatgagtactttaacactgaaattgtactggaagactagagttatgttatttacctagaatggctagctaccactgttgaggaataccttgatgcaataatgtggcatcctttttcaacgttttccacattaattgattgtttacttgactcaat

SEQ ID NO: 1331 - DNA, 1099 bp, Zea mays
  misc_feature (949)..(953): n is a, c, g, or t
  misc_feature (1009)..(1012): n is a, c, g, or t
  misc_feature (1046)..(1058): n is a, c, g, or t
gctgctttggccagcgacgccttcttcccgttcggtaagagggaaaaaaaggggaacctggaagtttcagtgcttgcttagagatttgagtcaaagcattcattgatcttagtcgattcttagggcttgtttgatggagcagagctccatgattctctagacccgaaatagattttctgatagagtaattctaagtgatactttatcggaagtgaatctatttggcgaaaaccgtttgacaaataggctgtgaagtgatttttgaggggttaaaagagtgtggtgtaggttgagagtgatgggaagcaggtttttttggctcccacttcctaatacaaagtagagactaaatttacttaactcccaccatgaaatagttcagatttttttcgtcggcagtagttctatttcagagaatgaaaggagctctgtcagatgcccctaactttctcgtgaactgtacgtggaagcacgcccgtagttgctggctgtgtgaatctgattctggatgcaacgaagaatagtaaaaatgcagcgtctgttatttattagcgtgttgctgaactggactggaatgatgcagcttggaacgacgcggtggaggaggcgtgccagcgcggcgtggcggtgatcgcagagcccggcggcagcatccgggaccaggacgccgtggagtgctgcaacaagtacggggtggccctcgtcttcaccggcgtccggcacttcaggcactgatcgacggcgacggtggcagcggagaccgtgacgacggacgatgggagggacctctatatagctgcgtcgatctggccggtggctggaaggaaggatctggcgtttcatcccagcgctgatgccggctggcgtttcttggctactagggagactctgatggtgctggatactcagtggcaaagagtagagaaagatacaaatggcagaactgttnnnnntattgcaggaactatagtttatatacaagaatataagtgatttttaataatgtgtnnnntggaaataactgttagtagttgatcacatgagannnnnnnnnnnnnccaaatgtcgcctctcgagaggatgggtcggtgggtcccgg

SEQ ID NO: 1332 - DNA, 726 bp, Zea mays
tcatcttctactgaaaaaaccaggagaagtggccatcgcatggcatgacacacaactttgtccatcccttttactctggcatccagcctctgtgacctggacgagctaccggcgcgtggagcccagaaagaacggagtgtcattctcttacgccactgtgaccgccctcaaccccccccaaagccaatgaaaggcggtttagtcgcttcctacctcacttggtgatcgttctctctttccggttgatggttggcgctgtttatttttagcatcggttggactatcagactaggctaagggcccctttggtagggcttatttttcagcttcggctctggctcatgcaaaagttgtgccaaacacctctttttcaaatggcttcaccaatgaagtgcttttccaaaatgaactagagggcatgagccaaaaaaagtggctcacccggcttcagctcacgtcatttttgcacaatagccctcccaccagtccaaattaatttttttggtcatgccctcaatccctagccacgcacaatagccctcccaccagtcccaactatacaagggtctttctaaaaaacaacttataagccgttttgccaaatgatttttcagaatggctttggctcatctaaagaagtggcttcacctcgtgagtcagagccaaagccgtttttgtagaagccagagccctgccaaaggggccctaaaccttgccttagtttaa

SEQ ID NO: 1333 - DNA, 393 bp, Zea mays
agttccccagcgggcacaagatcttcaccaacccgacggcgctacacaagaaggggttcatgttcatcaggcagacgctcatggacggccaggacatcaccgttgacgtcggccgcttcagggaggtgctgctccaggtgctcaacagcctcgcacagtagccgtctgcgtgctcactgctcagcacggtgctacccccaccttagtagtactcctgaagtatatacacacagctacgcactacacagccatgtatacgtacaatactttagttgcaactttgtactggagtatcattgttacggatgtacactctacagagagacctttgcgtggtcaacggtccatgggggcataatactgtactacaatgagagagggaaatcttagggt

SEQ ID NO: 1334 - DNA, 330 bp, Zea mays
  misc_feature (318)..(324): n is a, c, g, or t
gctacgacgactatggcgacggcggcgagtgcaagcggcaagagagacgacgacggcactgccctcggcggcatcgccaccacttcttctctgatctggctccttttcttcttgttgctgtggtgaactcaactgatcgtgaccctgcttttgtattatggagtgcccatagatagatataacagcttgttgaaccttgcagccacattcaataaatgcatgcgatattgcagatatatatctccaacatatatcttctatttctgatcggctagactatatgtatatctgaaaacggtgggctcagagcttgtggannnnnnncataca

SEQ ID NO: 1335 - DNA, 269 bp, Zea mays
aaaaaactaattttgcttgctccaacagctcctgtacccaccgaaaaaaatctgcatccctaatcggagacctcatctcccacaaattttcgcgtgagcatttctccccaatccatacgtactccccgtgtttttttttcctgtgcagttgttgtggtcgaggcggcaagcggcagcggtgacccagagaggaggcggcggcaagcgcggcgatcgatcgaagaggaggcaacgacgtttgaggaggcggtggcgggcgatgtgatgct

SEQ ID NO: 1336 - DNA, 319 bp, Zea mays
cctcagatcccggcagcaagaccacaacgacggctaggtggagtagctggcgaatgcggtgatgtggacgaccccgacgtagaccacgcacatggagtcgatgctctcgacggcgaccttggatgtggcgccgcgtcgcgtcgcgggcatgagcagccagctcaccggcggtgatctaggccacccgcttcactctttgaggacgacgcaggacacatgtttgatgaaatgccgagccaacgtccagtaaaatgatcgttcttgttttatttgtttattttttaggaattgctaattgaggtctgttacttgataatga

SEQ ID NO: 1337 - DNA, 763 bp, Zea mays
  misc_feature (742)..(742): n is a, c, g, or t
  misc_feature (751)..(753): n is a, c, g, or t
cagtggtattgctcatcgtgcagcgtggagagggcagaagaggggatgagacagtacgagaggaggacgctgaagctccaccggaaggaggatgctggactacaaagttggaattttgatggtgtggacctgctgctatctgccgcggagcagctcaggatagatgagcagctggagactcgtacagattagcgtgttaaagtgagtttgttgtttgaagagcagaggcctgcctcaggatcagaaggctcgggcaagggcagttaacaacatttgctgcagtcctctcacgaactgatgaaaatacaaggatcttcaaacagcattcgccttttgagatgcgtgcatgttatcatatagcacgcatctcaaaaggcgaatgctgtttgaagatccttgtattttcatcagttcgtgagaggactgcagcaaattttgttaactgcccttgcccgagctctgatcctgaggcaggcctctgctcttcaaacaacaaactcactttagcacggcaaaaggaccagagtgtaggtgcaacacgctaatctgtacgagtctccagctgctcatctatcctgagctgctccgcggcagatagcagcaggtccacaccatcaaaattccaactttgtagtccagcatcctccttccggtggagcttcagcgtcctcctctcgtactgtctcatcccctcttctgccctctccacgctgcacgatgagcaataccactgccccttggntattgaagnnnggcgaggtgt

SEQ ID NO: 1338 - DNA, 402 bp, Zea mays
  misc_feature (391)..(398): n is a, c, g, or t
gtgccccaagccctcatacagtggcaaggagctcaactgcatcggctacatgggaagacacggcggcattccgcgctaagtacccggcgttccagctcgaggacgagctgattcttggcggggagggagatgtcatgttcgggcgcacgtacaccaggcgccgccgagccagggacgtgcgccgtgcgcaggagcgcgccaaacagctggccgacgctgagaaggaaagagtatcagcgcgtggctaagaaggaaagaatgggaaggaaagagtagcagcgcaagaaggaaacaatgaataaggaaacaaagattagggaaggaaagcagtgcaagaaggaaacaaagaataaggaaacaaagattagattgctattttagtcctaaattnnnnnnnncctg

SEQ ID NO: 1339 - DNA, 288 bp, Zea mays
gctcagcggggtggtgtagcgtggatcgggctcaagggcaactcacacaccaactggaacaagatctgcaacatctacagcaagttctgccgtcacattggcagctctgttttcctgggcctcatcgcctccgtcgtcctcgtcctgcttaccatcctcaacgcccactccttataccgccgcagtcgctagttaaggaattgatgaatatgcatatatgcatgggatgtgatgagtgacatggcatctattttgtattgcagcagtagtctctgcaatcgaacaatg

SEQ ID NO: 1340 - DNA, 483 bp, Zea mays
tctctgctcaggatcgtgctcgcgagttctctctgggcccatggccgttgccttctccctgctcaggatcgtgctcgcgagttctccctgctgtctcctcgcacttccacttggtaaatccatgttgtcctgtaaacagctttctcaaagcattaggaaaggacattaaagcatcatcagactagatcacctaaagacatgtaatccaactttgcaccacctaattctagtagatttacccacactgctagtttgcccaacacttggatgatcaagctcttgttgaacatgcagagaagtcccccagaaacaacaacctcagtgtttggtggcaagaaccgatgactccaagaaacagggtatgtaaggggtaataaccacatagccattttcaagagtgcagagaccatgcagttcctgagtatccatgttatatgatacaagtttctggttccagtgctgaacaaggatgaacgaattgtg

SEQ ID NO: 1341 - DNA, 368 bp, Zea mays
ctctagcattcttgttttcatctcgctggtggaaaagataaaggtggtgctgatcttgtgcagtgagatttacctgtgctccttgcttcactttgtgcgcctgtgtggtgctgtgttcgtctgattattgtccaccgtggcctggtgcttgggctccctactgcgtggtgttcttcttctcgggttggtgctgtggacgtctccaacggtctcaacagcggctctagtatctccgtcaacctcccgctgtgcaggcccggacgtgggcgacggaattggttttctgggacagaacttcgtgttcgctgagttgatctttccacgtagacaatctacatgttgtgagtagtcggttgcctcactttatt

SEQ ID NO: 1342 - DNA, 369 bp, Zea mays
ccacccgacgcccgcctcccttccttcgtgcatcggcgatccacgctacccaccggaggtcgcctccctccccactccgcacgacgaacccccatatcgagcctacacccgcatccttcccatctccccaggtgccatggtctcgttccgcacagggagctctgcccccggacccgccggccgcctccctcaccacccgcacgacgaggcagaccgactgacgtgccacctgcacgatgagcccagactcatcggcgcattcctccccacccgccggtgcgtccattcctagccgccggtgcaccacgctcatcacccggtcggcacgccaatcaactacggccaactcctcagtgaatgttccaaagt

SEQ ID NO: 1343 - DNA, 398 bp, Zea mays
gtcgctgcctccgccgccaccgctgaggagggtcacggtggccgggtcctggacttgttgggcctcagagaggcgatgctccccgccacgtacaaggtcgaagtgagatcagttagacgccaaagcaggagctgagtatcctccgccggttcctcgtcgctacctccgccgccaccgctctgaggaggggcatgatggccggatatccgtggggcctctgtgaggcgatcctcgccgccacgcataagggcgaagcgagatcagttaggcgtcgaagcaggaggagccgcagccacacgccatcagggaccaactgcatttcgtctcctgctgcctcaccaacccgccccatggcgtacgcccttccttccctgtctcctctgcctactgttctcata

SEQ ID NO: 1344 - DNA, 374 bp, Zea mays
agcgcacgcacggcgcgcaggctgagcaaggcaaccgaagcgagcgaggtcctttgcttctacccgcggcaacgccccaggcgcgcgcgacgcgtcgagctccggaggccgagggcgagcaccagtgcgggagtggaggagaggaggtctccgctggacgactgcacccccacccactcggggtcagggtccaaagccggatctgccttggggctcgcgcccgcggctggtggaacggactgctggctgacgagggctccgataatcgacggcggcggtggaatgccggtggaacacctgtttttcatttttgatgaggtggaatgcggcttcccaagctccattctgttttccatttcaatgaggtgaacgat

SEQ ID NO: 1345 - DNA, 578 bp, Zea mays
  misc_feature (471)..(472): n is a, c, g, or t
  misc_feature (494)..(494): n is a, c, g, or t
  misc_feature (565)..(568): n is a, c, g, or t
tgctccggtatggcgccgccgtgaggtgtgcgcgcaccgccgcctggtctcgctgggtggagaatatgtgccgctggccattggctgttggattggtcgccaacggtgtggaacaaagagctatggtaaaatcctgtgcgtagatcggcaaagcaaggatgtagattagaagcatccatacccattcgtgatattaaatcagagccgttggttggtagttgggatgatcagatttgcgggtggcgcagcgcaatctcggccatggatcagagatccgagggccagcattttcgtaccaggtcatgtatggcacgatctaatcgtggtcgtgggatttggatcctatggatctaatcggtcgaaaccccttcgccatgctattttttagaagaaaccccgatgaggcctagtttgggtactcttggattgaagtggtttgtagggattgaagagtgtttaaatccccaatanntcaaaaactctcccaatacatntcaatccacttcaatccgtctcattcctagagtacccaaaccaagcctgagtgattaaataaaacccgcannnnatagctatta

SEQ ID NO: 1346 - DNA, 442 bp, Zea mays
gtttgttgaaggttccaatctaactggcaaggggaagactgttgacaagggcacccctggtgactccaatgatagcaagcctatgtccaaattagggaagaggaagaggtacatgactgataaagatgttgttgtgttcaatgggatgaaagaggttgtatctgatgttgctgctgctgtccgtgaaagcatccatgctgaagcagcacctaggatctacaatgttgtaatcatctatcctaggttctcttgggaggctctcatgtatgccctgaaccacatgatgcagcacaaggccaccttcctgtgttcctggacaagactcctaatgatcatgacctatggctcaagactttcctagccaagcactaccacatctgatctgtctatcctatataatgcctaagaacagatatgctacacattctcggatctttctatc

SEQ ID NO: 1347 - DNA, 741 bp, Zea mays
gtacgtaatttattaattactgaaccgtacgtatatatatgtgcccatgcagcaatctaactccaattaaggactaaaattagctagattttagctaatagttcagctattagttatttttaataaatttgctactagctgatatctatttattagctagctaatttcaccagtaattttttagcttaactaataaatagctagataactagtacctaatttactaaaaatagctaataactaaactattaactagagtgtttaaatatctctagttaattttaataactaactattaactttattacattcaaactctttctaactcttagttctaatacattcaaccatccgacgacgatgagaatattgcatgcatgcaggcccgaggctgagacggagtggcagctgatccacatgctaggcaaggacaggcacgggtacctccacaaggacaccctcagaggcgtctacgacggcaccgtcttccccaagatgcgcgaccacaccatcgaccctcatgcccgtcacagcgatgcctgatgatccgatgagctcagctccatggatgataacatgggttctcgtctactgccggtgcaataataaaacagtgtactgtacatcgtcgtatgtaatgtacagaacgctatatacaccacgtttatccactgccagtgttttgtcgagtgtcgcaggcactcgttaatggctcgataacactcgacaaatgctttactg

SEQ ID NO: 1348 - DNA, 430 bp, Zea mays
tgattcgagaatcggatggaaccaaatctgattgcaaaaaagcaagccaagacttggttttctccaatatctcatgttcagttggtcagatgatgtgtatgtgtactggtgcactgcagcttggacatgacttgtctgaagaatttgaagctgaaggtgagtgttggagggaaccaaatctccagctgcatgcacagcacaaggtttggtttcctccaatgtctcatcttcaactgtctcaaatcaatgcaactttgcaggcattttcaggatcattatccttatccttatccttatccttatccttcacagagtgaccaaatacagtattttcagttaaccaaatagtgagctacaattgattggaagctaatggtatctgagttgatgagttgctccatatcttgttatacaattgattggaagctac

SEQ ID NO: 1349 - DNA, 434 bp, Zea mays
cccaattgggtgcacggactggagattctatgctccaaaggtgaggggggattgattgatgcgagtttttttgcatgcctttatttttcccttactttgtcttttgaggttgatgcaggcccgaaacaaggcttcttatcttctgcaaggttcaatcttgaaaaaaagcagtggcgatggtaaaagttgtgtccggtaatcaaaggggaccaaatgtctggtgcagcagtgcccaggttgtggttccattcgatgggcaacggcgaagtgctcatatcattccatgttttatgtacaattcttttttagttgttgtgttttagttcaaaaatgaactagcgagcgacaaatattcgagaacagagttagcagccagatttagaggggtgttgattgatgtatctgtgggggtgcttctgcttggttgattgaca

SEQ ID NO: 1350 - DNA, 255 bp, Zea mays
catcacagatcgtttttttaaaagcaatcttctactaatacaccagttacaaccacgaatgaaaatagagggaacgtccagccacatatcaatcctaccatcagcaggtcgaagacccgaaatgtcgtagagttcggcagctccagtgaccctcaaatgccactgaatttcttcacagctgatctttccaacgcctcccggtccttttttttttttggcgaattgcacacaggaccaatgtcgcaataaccacag

SEQ ID NO: 1351 - DNA, 283 bp, Zea mays
  misc_feature (272)..(276): n is a, c, g, or t
tgctctgccacctctggcgcaaggtgctcgacaccgagcgggtgtaccgcggccggcgcggccagcgccagcccggcgacatcgaggtcggggacctcagcacgaaaagctacggctacagtggctcgttgtcgccgtcgtcctccgattacaatggccaccgtgggggcgccgtgccggccagatccaaatgggaatcgtcggcggcgcgggagaggaggaaggacaggctgcggcagtccctgcgcccgaggagggccagctccaaggtnnnnnacgccgt

SEQ ID NO: 1352 - DNA, 332 bp, Zea mays
  misc_feature (323)..(326): n is a, c, g, or t
aagcttcttttcgattacgtgaacatggcagtggtcgagattggccatgacaccttactatgcgcctacccctggaggcagccgtgctccatggcctgggaggagaccctctatcaagctttggcggaggaagtgccacgccatatgagggattggctccatgggtcaggaaagtttgcaggaaacgagaacgacgacgccggaacgttgttggagagaatcatgcggcaggaggtggaagggagaggctgggtgaagtccatgagatgggagttggatgagatcacagagcagattgcaggaaaggtgctggatgaaatagnnnnagaagc

SEQ ID NO: 1353 - DNA, 431 bp, Zea mays
gggtaaccactgccaaaaccatgtattgaatcatcatcgcattgcagcagccacccagtgagaaatctggcaagagagacgaaacgggaaaagaacccatctgagagacgcgtcgaaaggggggcttcagtgtgtgtaacaacataaggcgatcagcggcggacgaatccgcctcaccgaaatccgctaagatcctttcggatccaaatcatcatcagcccgagctacgaaccaatccctcgcaccgttgagagaaaaatagggggaaaaacagagaagcacggaacgagcaaacaggaaaagaaaatatcagcacgcagatgcagaaccaccgtaaagaagcgagctcaagtaatcggcggcggcggcggcggtttagggtagcttcgagcaggatctgtagatcaggtcaggttatatagagggagaga

SEQ ID NO: 1354 - DNA, 361 bp, Zea mays
ttgctgaatctcatccgacgccccccgattcgcccagcggcatcggagaacaagtcgcatggaagcccatccgaccggcgccgccatcccttcccccatggcggcaccacagccgccaccctcttccaccaccaccccgcccccaaccgctacaccacaggagccagccgccaccgccgtcaccgctgtgcgctctccccaacccgtgcgtttcgcattcctcgtcgtcgccgcgctcatgtccgcgtcgtggttcgtcgagccgttcagcgcggcggcggcggccgacctccgcgtgccgtggcccgctgtcgtggccactctcgtctgcttcaccgcgttattctgcgcatcagttctc

SEQ ID NO: 1355 - DNA, 470 bp, Zea mays
tcagagaaatgactttgattttgtcactagagatgttcagaagtctttgtgcaagaagccaatcttatttttcttgaaggatgtctggaaggatggaagcataactacgggatcttacacacattcaagtgctagggatgacctcaaaagaaaggtgttttgcttccggtcaccccctctatctgacatagatgagatccaagtttcttcgtctccattaagcaagcgctggcatctggtttgtactatcatcccttaacagtattccactgcctctcttaattatttacaagtgctaagttaccattctgctgatataggcaccaagaaggttgtgtagtgcacttaaaggatctattgatggtactctgtttatggttgttcggcaatgtggacgcgggacttttggtttagcttctgattccttatgactgattggaaacaaagatgtatattttctgtccaaatga

SEQ ID NO: 1356 - DNA, 413 bp, Zea mays
  misc_feature (362)..(363): n is a, c, g, or t
  misc_feature (371)..(386): n is a, c, g, or t
gttgagaagcaggccgatggcaagttgactggctacatcaggataagaagcaagacccaaggaattgcgctcagcttaggagacaagatcaccctaaaacagaagggaggcaacagctagctcagctacgagtcgttgatcactgtggtctgtggcaggcacatatcacccccgttaactcacctgaacacaaaatttgctagttagccaccaattttcagggttgcctcacctgatacacaatttgctggttgcccaccaatttttaggatagccaattattttggatgcgctgttgataatagaaaataaggatagggcactagtctaagttgtagtatttttgggtcatttcatgtgcnntatacctnnnnnnnnnnnnnnnncaacagcgcatccaaaataattggcta

SEQ ID NO: 1357 - DNA, 413 bp, Zea mays
  misc_feature (66)..(66): n is a, c, g, or t
  misc_feature (177)..(178): n is a, c, g, or t
  misc_feature (203)..(203): n is a, c, g, or t
  misc_feature (213)..(213): n is a, c, g, or t
  misc_feature (221)..(221): n is a, c, g, or t
  misc_feature (237)..(240): n is a, c, g, or t
  misc_feature (252)..(252): n is a, c, g, or t
  misc_feature (333)..(333): n is a, c, g, or t
  misc_feature (338)..(338): n is a, c, g, or t
  misc_feature (342)..(342): n is a, c, g, or t
  misc_feature (362)..(363): n is a, c, g, or t
  misc_feature (371)..(386): n is a, c, g, or t
gttgagaagcaggccgatggcaagttgactggctacatcaggataagaagcaagacccaaggaatngcgctcagcttaggagacaagatcaccctaaaacagaagggaggcaacagctagctcagctacgagtcgttgatcactgtggtctgtggcaggcacatatcacccccgttnnctcacctgaacacaaaatttgctanttagccaccnattttcanggttgcctcacctgannnncaatttgctggntgcccaccaatttttaggatagccaattattttggatgcgctgttgataatagaaaataaggatagggcactagtctaagntgtantatntttgggtcatttcatgtgcnntatacctnnnnnnnnnnnnnnnncaacagcgcatccaaaataattggcta

SEQ ID NO: 1358 - DNA, 471 bp, Zea mays
tatctctgaagtatgttgcattgccgctatgtcattctcccctcattgatggaaactgcgactgacatatattctattgacatcctgcagatgtcgtgggccgagtaattttgtgttttgttgctcgcatggaaatggtatctgattccccattttgacctgccaatgaaattagccatcaacaaggtagaggtagatacagtatcaaccggaggccctcgaatgacaggtcaactcttattcttgtcaccattttggcacacttaaatctttgaagtcgacatatgcaaagctgaaacaacacgttcgcatgacaaattttggttgaagatggaggccaacgtccccaggagtgtcggcagagttttcctcttgtctgtagcactggcaccttcggcgtcctgaaggtgccatgagatcatacactgatgtacactgtagcatggttttgtaaatcaagccgtcacaaat

SEQ ID NO: 1359 - DNA, 422 bp, Zea mays
agacccgaccgcctcatctggccatccccatttgtttactggctccagtccccgccccaaatctttccctcctcagcaccaccaccaacctcgaccccgtctctgtgctcgggtgcgagattggggatgtgatcggagatgtgatcggagctcgactctcggtccgagtttgtttgcttcttgaccatggcatggaggaggcaagctggcggtgagatgggtcagcgcggaggaggaagagaagcagggcgttgatggcggcgggtcacggagcagagatagcgcagcggttgatgggatctgcgagatgcgttggtcgattttgcagtagcggatcacggtggcgacgaaagtgcgagggggagctgagctaagcggagcgtggggaggagggcattgatagcggggagtggatgatgagc

SEQ ID NO: 1360 - DNA, 529 bp, Zea mays
  misc_feature (432)..(513): n is a, c, g, or t
  misc_feature (515)..(526): n is a, c, g, or t
attagcaacaaaacaatccagacacaaaatggaagcgcagtcctccctctccacctccaccacagaaatggaaattacttgccacctgctaaataactatagcacccccattaataacagcagcagatgcagcggagttacataatacaagcaggcagacgacgagtgaaattaactcccccaccaaaaattcaaatcacacccaacccttccaccgtgacgacaacaacacggcccccagccaaacatacgacaagggaaaggaagaagaggggcaataccaccaccgtgacgctgatccgcgtcggcgcagctcctgagcacctccccgctcccacctccggggccaccaccgacgacggccccatccaccccctccacagcagctgccggcgccaggatcttcccgaactccaccttggctggtaacannnnnnnnnnnnnnnnnnnnnnnnnnnnnnnnnnnnnnnnnnnnnnnnnnnnnnnnnnnnnnnnnnnnnnnnnnnnnnnnnncnnnnnnnnnnnnctc

SEQ ID NO: 1361 - DNA, 446 bp, Zea mays
gcatacgaatcaccaacgagggatcgagggacctagaccaccggcaattccttgccgggttctaccgtttcgccgtgggccgctgcgcgccgtgggtggctctctagccgtcacctctgccctcgataagcccccccattttgtgcgctttgttcccgtctttgtataggctatcgggtttggggagagatacactggcgtgccggaataaccctctccagcgggtgcaccaccgtggctcggtgccatcgcgtcgagaggtacaagatcacccaggtgccgttagtttgatgatggacgataacgattgagcgttgcgtccctcttcaccccattagatctgaaccatcgatctcagatctgacgtcctaggtcgctttacgtcacgtgtcggccagatttgatctaagccgtagatcttcgatcggacggttgtgtttgtgtac

SEQ ID NO: 1362 - DNA, 404 bp, Zea mays
agggggcgcataaacccgcattggaaggaagcaagcagagccctactttgttgaacaggatgacgcccgaagagaggcagatgtagatcagcaggtagaggtaggtcagcacgagctgcctgctgatcatcttcgccacaccccgcaactcgccgcttggggacgatggttggacggccagtggctggccgctggtggctccggggaggtggatgcggaggcgtcggctggaaggaatcgcagatcggagatgggtggggagcggcaggggccaggggatgtccgtgtcgggcgaaagggcgaggcctagtgtgttgggtttcgagatctgctgggccgtcggatggggatccgattgatatggctggattgaacgcccagtcgcaaggatcagtgtgctgtgt

SEQ ID NO: 1363 - DNA, 409 bp, Zea mays
tgaaaagaacaccggtacatactatttattaccatagatagtacacataattgacactcaatttgagacacaagtggtacaattgcagcgaccttagccaaaaaaagaggacggaaatcagaatgagcatgagggaaacgactaattaggggacaggggatgggtacttttaaattccggggtgcggtgccgagacttgaacagatccaccgtgacctcctcgaaatcgatcttgttcaccctgcacgcggctgccgacatcaagaatcgagcggcggatgacttgaagagccggacggaacagactacctacctgcagaagatgatgacggcacgggagggtgacgaccacctgtgtgcgtataccttgattggcggcatggcgagccttcgtgagtaatctgggagc

SEQ ID NO: 1364 - DNA, 611 bp, Zea mays
tgctcaataggtaattgcattttcattcttaaattgttctgtgattctgtcctagtacacataaattgtttttttttgctcagtgctcagttatgaggagttagttgttcactgcttgtttgctcactgctccagacctccagtcaggaaccaccgattgtgatttgtgaagaactgtgaattgattaactgaagatgtcaaatagtggaggcaagggatgtcgttcccgtgctagatcaatgccacccgagaagcaactaggtatttcaagtttcttgcctgaacctccaccgccgcctccttctacgaaaggtagtaccaacggtcagccctgcatggatgatgaggtatgcaaccattttccatattattgttagaactccttgttactgatctatgaatttagccttattggttagaattaattatccgagaattgcaaacttgtaggaacaagatgctgaaagtgatcccgacgtcatgaatgattatggtgagctttgaccgtgagtcagcgactagtcatggtgcttaatgcttgacaacatgtttggaactttagataaatatgttgctgtgtccatgtgcggatgtgcctgtttctgtgtgt

SEQ ID NO: 1365 - DNA, 359 bp, Zea mays
cctatctagaggctagtgctggaccagtgtaccctaggagctgggtgccaggtgcggtggcgggcggggcctagcaaagcatgacgctgtaggagggatccagtcatccgatacgtcagcactccggcacagcagtaggcatctcggaagctggcagggccacagggcaccacgcccaaggcttagccgcgcaggcactgagcagccaagtagtcaggcagtcagtgagcagcagcagacggcagcaaggctggaagcgcgaagtacctatataggcatataagtttagttcgaccgggagtttacttctctgttatctgtgacttgcccgaccccgacttgatgtgcattgtagattc

SEQ ID NO: 1366 - DNA, 428 bp, Zea mays
tccccgcagcagacggatcgccctggtcctccacactagccatggagcgcaaccgaaagagcgtcgttgtccgcacccccttccgctgcccatccaccgccgacggcactagacctaccctcttccaccgctctcctgctgcccaagctggtgctctgttgcggatcccatcaataggcagcccccagggactcatcctcggtagaagcctccaccaagcagtcgcctctcaactcccttcccctggtggcgtccagagctcggacgcgggcatcccctcgacagagagcgggcagagagccgcccccagtaccccctgctggattccatggtcacgtaggatgcagcgaaacaagattgcctcccaccttgacccggctgcttcaaaggtgctcgatctattgcccatgtgtcgtataccttctgaa

SEQ ID NO: 1367 - DNA, 540 bp, Zea mays
atggcggtcaacttctacccgccgtgcccggagccggagctcacctacggactcccggcgcacaccgaccccaacgcgctcaccatcctgctcatggacccggacgtcgccggcctgcaggtgctccacgccggccagtgggtcgccgtcaacccgcagcccggcgcgctcatcatcaacatcggcgaccagctgcaggtgtgcgtgtgtgtgtggcgcgcgcgcgtaattatcactactactatccgctctgtctttgttccctagctcccatgtcgcggccggtctcggcgaggctgagacagcgacagagcgaagcagaacatgcttctcaactgaatcatcctccgatgttgcgttgcaggcgctgagcaacgggcagtaccggagcgtgtggcaccgcgcggtggtgaactcggaccgggagcgcatgtccgtggcgtcgttcctgtgcccgtgcaaccacgtcgtgctcggccccgcgcggaagctcgtcaccgaggacaccccggccgtgtacaggaactacacgtacgacga

SEQ ID NO: 1368 - DNA, 645 bp, Zea mays
  misc_feature (635)..(635): n is a, c, g, or t
  misc_feature (637)..(639): n is a, c, g, or t
gacccagccaccgagcggtaaatcctttggtccttccgttctgttccatgcctagatctgcctttgcgctcgccgcttgatctacctctgcgcacgccgcttggtcgcttggtcctatagcagctttgcaacaaagcagtttagtgatttagatagcagtttattgatttagatttatagagccaatttggggcaacagtccataagtccattggtgagcgcaaggtgttcggcaaaatgctccagcccatagaattcaagttaataatttgtcaactgatgtgttttattggatattgtttctatgattttttaggcctttaaacctcacagaaacattgggtgaagcaaatgagaaggtttttccagccactttcaagaggctctggcactagtgctaataataatgtgaataacacaccaactgttggagggacgttcaatccggatgacatagttgcagatcccgctttaaggaggcaaatttatgaatatgataaagatgtccaaaaccaagtgagaagggcatatgttctaaatggtccatgccaaccaaagggtttagatttccctcatagacagtatgaacaaagtttaaggccttttaaagaggaatggtatgacaagtatgatgngnnnggagta

SEQ ID NO: 1369 - DNA, 730 bp, Zea mays
acggcgcccccgtcgtcttcctcaagcacaacgtccgtacacactcacaggctattgctgtgtgcagcatataatcgggatgcagcgcaacacgcgtggttgatttgggggtaatgccgcgccgcggatggtgcaggtgatcgacgagtacgacgagcagtcggaggtggcggaccggctgcgcatcaagatcgtgccgctcttccatttctacgtggacggggtgctggtggagtcgttcccgacgagggacaaggagaggatcatcgccgtcatccggaagtacacctcggtcgagccagagccagaaccagaacctgagtgagtcaccactctctgatctgctttgatttgacaaagataccatcagaattcagaaccagatcttctagtgaaccaacgatctcaacgactaagatgtgaagatttttttttccccgaatatgtagctgagtgtggataagtaagtgtcgatcaacgatcaacgatcgaagggacgcattttctctctctctgaacatgaacacatcgctacgcttttgcagctgttgtaagaattcgagtcgagctgacatttccatttccctcgcagggaagaagagcagcagcagcagcaggaggaggagtgattccatttccactccagtggtggacatcagtttcctcgagggtgcagatagcctgctgaatcagagatatcatgcacaacagcaccacaggattgtttgga

SEQ ID NO: 1370 - DNA, 448 bp, Zea mays
gatgctctcgcgtcgtcggatcgtcgccaccgtctcctccgcgtcgcctacaccgacatggacgaccggcagtatgccggactgaccaaggcaggcttgggcgtgctggccttcaactcgggcctcgccatctacaactcctggggcgacgcgagctccgtcgcgttcgtgctctccgcggactccatcctcgtgctgctcttcctctgcctccgtgagctggagctgcaggggcggggggccgccggcaggggcagggatgtcgggatcatcagagccgcggtgtggacgctgacgacgctgctctcggccatgttcgcgtctagggtggcgccgctgatgccgcccgtcgtcggcgcgctcgtctgggcgacggctgtggccactgccgccggcggcttctgggcggtcttcctcagctgaatgtttaggcttagttcgacgagag

SEQ ID NO: 1371 - DNA, 353 bp, Zea mays
aacgcgaaggttttccaactgagcaagtgtagcgcgtgcactttcacccttgatctacctgctgtccatttcctgtgcatgcactcgttccaccttcgctgccttggtgacaacgaaaaagaatgcccagaatgcgcgcctgaatacagatccgtcatggaggcaaagcagaagctagagcaaaacgccagggaccatgatctctttttcaggcagttgaggggttccaaggacggtttctctgtcattgcagactattttagcaagggcatagtgagcaagacaaccttacctcctgagaatggacggtagtgaaggaccactggtactccgttgccttgtacgacattata

SEQ ID NO: 1372 - DNA, 1220 bp, Zea mays
  misc_feature (1085)..(1085): n is a, c, g, or t
  misc_feature (1136)..(1136): n is a, c, g, or t
  misc_feature (1169)..(1176): n is a, c, g, or t
  misc_feature (1178)..(1182): n is a, c, g, or t
  misc_feature (1203)..(1213): n is a, c, g, or t
  misc_feature (1215)..(1217): n is a, c, g, or t
aggaggtgtggaggtggacgggctttgggcagcgggggagctgggcgccagcagtgtcgaaccctaccaaatcacaggtacgttgaaccctaccagatccgggctcgtcttgtctcatgtggatcacgccgtaagcgtcatagacagtggcggagctagccaacgatgaaagcatgtgcacctcctcgttgaagctggtaccctcttctccccttcctacacctcccccgcacacctcctctcctcagcctcgccgcatctactttggtgttcctccattctcctcctcatgcatgctcccaaatctgcagatcccctcggccagtccccgacttactgtgccacttgacccaaatgtagcggctgcaaatccaagtagcgccagttaggtgaagcctccaaattcgacccaaaagtagcggcttcaattcccaacaggttgcccaactcagtgtgcacatgaataccaaatttgcttcttgtttctttgtttaccagagaatacactagaatgacgtattgatatgtcatgtttgtgggcgtcagccatttaaaattgcatgttcatatctgaaatgcagcaagccatttaaacacatttgtcccctggagctcagatacgaacacatgtttactgtttagctccatttaaacacatgtttgtgggtgtcacccatttaaattcacaaatgtgtccatacctatgcagatattaattttgagagctgtgaagtagaaaactctaatctttggaggagactttctgaatctgcatcaaaagttgagtgtggtgagaatcttacgtacaagtcaacaaatgatgttagtttatttttatttttgtggataagaaaatgctttgcttaatgctggagtttggtgaactacttgcttattgctttcaatattacttgcttattgttttgttcagattagtagattattacgtactaatgaacagtttgtttgtttgtttgtagaattgtttgtatacgttccagtgccaggattcaattcaatccatcctctccgatccatgcgatccatgcattccctgtaccctctatatgaaggattgtaagcangcgtgtctgattgtaaggtactcctctttagatctgattttttttcaccancgttagcttgtaagcgagcgagaactcactttnnnnnnnncnnnnntgcaattctgtatgccatttnnnnnnnnnnngnnncca

SEQ ID NO: 1373 - DNA, 648 bp, Zea mays
  misc_feature (427)..(428): n is a, c, g, or t
  misc_feature (431)..(431): n is a, c, g, or t
  misc_feature (434)..(435): n is a, c, g, or t
  misc_feature (437)..(438): n is a, c, g, or t
  misc_feature (441)..(453): n is a, c, g, or t
  misc_feature (473)..(473): n is a, c, g, or t
  misc_feature (477)..(495): n is a, c, g, or t
  misc_feature (497)..(520): n is a, c, g, or t
  misc_feature (523)..(535): n is a, c, g, or t
  misc_feature (567)..(567): n is a, c, g, or t
  misc_feature (569)..(569): n is a, c, g, or t
  misc_feature (594)..(594): n is a, c, g, or t
  misc_feature (596)..(596): n is a, c, g, or t
  misc_feature (619)..(638): n is a, c, g, or t
ctttgtttattacatgattatttcagtgtgcctccctaatatgttgttaattttaatgtcttacttatattcaccctgctgatgctagatgaaattcctttcagggaatgatttgctgcattttgttggctattgtcctaatcaacccaattgtcttttctgtaatgagacatcatatatctttatatatatatatatggattgcctctgtcctcttgatagcgatctatactggttatttccgaagaagaattggttattttcgaagaagaatcaagaagcaattcaacattcaggcaagtgtggaaccaatttgagacatgtgtgttagtctgtgacaatataaactcgttagttatgtgtcagagaaaacatagtaacatttttttactctatttctaccaatcattgtggtctgatcaggggnnagntcnncnnaannnnnnnnnnnnnactgactccctcttttctgntcannnnnnnnnnnnnnnnnnnannnnnnnnnnnnnnnnnnnnnnnnttnnnnnnnnnnnnncaacaacaaatgcaatacatccaagcattgtngnaacaatttcataactttaacagatngntggaaactggacgtatgcaaccnnnnnnnnnnnnnnnnnnnntgaatcaagg

SEQ ID NO: 1374 - DNA, 633 bp, Zea mays
gcgccggatctactaggaacgccgaggcgacgcagccggagctccaacgatcgcctccgctctgctcacggagttctcagccgatgaggccgcaccacatatggcagctaactctcctaggtcaggcgctaatatgatgaatactctttccctcagcggcatctaagaccacaacagcaaaggcaaaagctgatgcaagcatctcaacagcggttgatgccatcagctgctgggcgatgctagcgcaggtaaagctaggtttacattggggctttggatctgtgcttagatttatagattttctctgcagtatgtgtttccctctacttgatcttgttctgaatcggtgtatccacatttttcctgtagagcgcacttcctcaactagaagatttacagggggcaagttcaacaaaaattacaggcaattactgactccctcttttctgttgcaattgttctttcgcctgaaaacttgaatttttgaagaaagccttttgtaggtcccaggtcaacaacaaatgcaatacatccaagcattgtcgcaacaatttcataactttaacagatagatggaaactggacgtatgcaaccaggcaaggctcagagtcaattgaatcaaggaactcagc

SEQ ID NO: 1375 - DNA, 411 bp, Zea mays
tggcatggacgccgacgtcggcggcgacgctgcggttcgtagccgtcgtcgtcgccatcgctgccgtcctcgccgtggcgttggctatcgacgcggcgttccgcgtcagggtaagccacctatcccggttccagcgtcttggatttgccagttcgagcatggagtagctctgaatttgaaatcgggtgggcgtgcaccggctgtttcttgcaggacgacctcggtaaccgcagaggaggctgcgacagcaaaccaatcgcccgctgggccacgttcttggagttgatggagcatcctcctctccactggaactacaactacaaggggctgctcggtgcgccgaaacgagggttggagtggatcttcagcaagtagagtagcagacagggtccggctgcgtctggtaacttt

SEQ ID NO: 1376 - DNA, 355 bp, Zea mays
  misc_feature (348)..(351): n is a, c, g, or t
ctggagctggagagggatcacgacgcagccctgacggccctgatggagaagcataagccagatacttttgaggcctccagctcgtgaataggcttcagcgagatattcaatagatgttgctaaaacatggtgtctgttgtggtagtgtgcgtgatatggagacatgacatgaccaacaccgcgttatatgatcgtactgtgtggttcgagcatctgaacactgagcgtattgcctgtgaggctgtgatggcatatgggtcaaaccacagcttcgattttgccctctaagccatctctatagactgctgtctatagagtaaagagtttgtaacatgaagtgagataggnnnnccat

SEQ ID NO: 1377 - DNA, 355 bp, Zea mays
  misc_feature (239)..(239): n is a, c, g, or t
  misc_feature (241)..(241): n is a, c, g, or t
  misc_feature (348)..(351): n is a, c, g, or t
ctggagctggagagggatcacgacgcagccctgacggccctgatggagaagcataagccagatacttttgaggcctccagctcgtgaataggcttcagcgagatattcaatagatgttgctaaaacatggtgtctgttgtggtagtgtgcgtgatatggagacatgacatgaccaacaccgcgttatatgatcgtactgtgtggttcgagcatctgaacactgagcgtattgcctgtgngnctgtgatggcatatgggtcaaaccacagcttcgattttgccctctaagccatctctatagactgctgtctatagagtaaagagtttgtaacatgaagtgagataggnnnnccat

SEQ ID NO: 1378 - DNA, 357 bp, Zea mays
acctggtccggcggcctgtcgccgcttcgaggcgcggccgtggatgcgctggacgtggactaccacgtgtacccgtcctgtgactatgagtcggtgtggaacgcggtcgtcgtgcccgcggcgaccggtgagtactgtgggtacctgcgctggctcgaggaggagatgccggacgaggtgggggtcgtggaggaggaggaggaggaggaggtggaggaagacgacggcgtcgcctctggcggcgggaacgagatcgaccggctagcggagcagttcatcgcgaggtgtcgtgccaacttcttgctggagaagcaggagtcgtacgaccggcgtcaggagatgatcgccaggagcctc

SEQ ID NO: 1379 - DNA, 365 bp, Zea mays
gtggagtataaatataagcatgcaaatgtgttctactttgatggctgggatggaattggtgcatctgctgctctcaaggaagcagcaaaacgcctaaaatcttcagcatcaaagtttgacagcgttctccatttggattgctcaatatggaaaagtaggagggccctacagaaggctatcgccgaggagataaagctccctcattcagtgatggccatcttgagccagcatgacaaggaggatgatttcgacggtgtagaagaaggcgctagaaaggaggtacaggaaatcaatacgcatacctacagaaagctagccaccgtcaatagattagttgtggtcttccataatggaagtggtagctt

SEQ ID NO: 1380 - DNA, 329 bp, Zea mays
  misc_feature (255)..(255): n is a, c, g, or t
  misc_feature (263)..(264): n is a, c, g, or t
agatcgttgatctctctgtgcctgggcacagtacgggggtatttatagatactcgaggggctgcttgtccccgtcaaagacatttagaccctcgagtacctggtttatccccagaatattcccacgaggagaggttacagacagtcattacggtaaattttattacagacacggccctaatcgcacatgcccacgcggggcccaactctatgggccgaaccgcacatgggcctctcttggtggtgtgagagccangaggtccnngtagacttcggcggggccttcgtcttgtctcatgtgagcgaagagggtcgaacaggcctccatcc

SEQ ID NO: 1381 - DNA, 596 bp, Zea mays
  misc_feature (403)..(532): n is a, c, g, or t
  misc_feature (535)..(539): n is a, c, g, or t
  misc_feature (542)..(546): n is a, c, g, or t
  misc_feature (555)..(572): n is a, c, g, or t
  misc_feature (576)..(592): n is a, c, g, or t
cctcctgccgtcctgcatgcagtgcctgaactgcgccgctggggtcaccatgaacgccccgggcgcgtccggcatgctgatatcgcgcgctgccttcgaggcagcgccggcgctcttcttcgcgctgatgcgagccgctccacccatcgtggccgccaccgtcttctgcacggaaacggtggcctcggtcatcgcttctccggtcgccgctctttttggcgtccggcgatgaactggtcaagcatgccacgagcagaagtgagggaagtagatcctacattcctacgagacgctagtctcatagtctcatgcatgagtatgcatgactgtatgagcatgtctgcatgatgtaaagctcctacgtttagttgactaatagaactcgaggagtattctaccgtcnnnnnnnnnnnnnnnnnnnnnnnnnnnnnnnnnnnnnnnnnnnnnnnnnnnnnnnnnnnnnnnnnnnnnnnnnnnnnnnnnnnnnnnnnnnnnnnnnnnnnnnnnnnnnnnnnnnnnnnnnnnnnnnnnnaannnnntannnnncaagcattnnnnnnnnnnnnnnnnnnactnnnnnnnnnnnnnnnnnactg

SEQ ID NO: 1382 - DNA, 508 bp, Zea mays
tgctcttgttacattcagattgttaaggagaaccaaatgcttcacaaaggctctgttgagattgaagatgattttgctactcttgctgataagagtatttttcctggggattttctctgggtcagagactctgaaatatatgagaaccgtgacattgcaggtgaataatcaaatatatggtgtggcaaattatttctaaaaaaaggagattgttgatggtttcaacttcaagtgatcgtttatgtgtttcagatgagatttcagaacaaaaggatgatatgctacaggctgaggaaggctttcgaggaactctgttgacatcaactgtctcagctcagctttgtcaggatatagcttttagtgaatgagttcccacatcagatatgtagctgcatatctgctgacttaagctggtgaagcctgctgggaggtgatgctgactagcttattctttgtttttattgcatattgctgttttttctgaatggcgatcactacttctacatcc

SEQ ID NO: 1383 - DNA, 508 bp, Zea mays; identical to SEQ ID NO: 1382

SEQ ID NO: 1384 - DNA, 561 bp, Zea mays
gaaggcatttcaaaacaagaaaactagacaaatgcaattgcctaggtctcctagaactggactcgactataggtatatccttatttcacttgttcaacaatttttacttcaatttgcaattgttaacttatttttcttttttcagattttattcgatatatggcatttggttataaatggattgtggtcgttattactctttaataaggtattttccaatatatatcacttattttgtagctatgaattgctttaaaattgtgtcatgaattttcattcgccgttgtgttagcaacaccttgatttttcggcgtcctccgccattgggcaacaacaactgcaaaagggagagtggagagtacatctcaagattggacaacaaaaatgttcgtattctttgatccttctaatttttgtgccgctatagtgttaggatttgtgtgtatcctcgtctagcctatgttcataaggcgtcgcctcgccacgcgcctaattcgcctaggcgtccagaaggtggcggaacgccgcacctcgccttactgccttaataactatgtgcat

SEQ ID NO: 1385 - DNA, 647 bp, Zea mays
  misc_feature (436)..(436): n is a, c, g, or t
gactactcgatccatcacacaaagccttgttacacacggcagcagccaacccggcccggtccagaaccagcaggcggcagcagggagaagagagggagatcgagtccgtttgctgacgacatatcatgccgtggttcccagccgtgccgccggcgctggcggccgccgacgaggcgcggatcgtcaagaagcgcgcggggctgccgaggctgctgcacaagctcttcatcaaggtgctccgcctgaggccggcgttggcggcggaggagtactacggcgcctaccggatgggcatgggcgtgggcgccgcggacgaggactgctgctactactacagctacggcggcgcggggtcgtcgtcgtgggccggcgtgctctcctccatcccggaggaggactacgacgacagctatttacagggggcaagttcaacaanaattacaggcaattactgactccctcttttctgttgcaattgttctttcgcctgaaaacttgaatttttgaagaaagccttttgtaggtcccaggtcaacaacaaatgcaatacatccaagcattgtcgcaacaatttcataactttaacagatagatggaaactggacgtatgcaaccaggcaaggctcagagtcaattgaatcaaggaa

SEQ ID NO: 1386 - DNA, 303 bp, Zea mays
acgagtataaccaaccccatgcatgctttcaggtgtatgaaccggagaaacgatggagtgattttaattagattgatcagggaaggatttttttttttgaaaagaacagatttctttgcaggatttgtgaatgcatgcatgctttaccatgaccaatttgatccacaagaacctttttttaatcagatttgctaatagctagttagctacacctacggattacacgtatctctgatgatgaggattagtcagtgcttcctaactagctctttccttattcttgaagctgttgtttacttgggt

SEQ ID NO: 1387 - DNA, 368 bp, Zea mays
tatagcatacgtgaatcaataagcacataaattgttttactcagaatttgtctgtcactgtatataacatgaaaatataagtgctagtatattgcgaagtgcctttttgctagcaacatcatgtgttagatagttactgaagtcactgataaattttttcaaagtgcttagtctagctagtcagaccagcacttatctgcttgctctagggttaggcctactgtttgtgaggtttgtaaacctcataatcttagatacttgtgcgcaccatatatatttgtacttaaatagtgtgatattacaacatctgtgtttgtggtgtggctaccaccgtgcaccaagagagaatgagactcgagacgcttagg

SEQ ID NO: 1388 - DNA, 350 bp, Zea mays
gagggaacctggggaagcttcacggtggtggatgcggcgacgatggcgtagccgagcagcttagagatgagcgggagcaggcagcccttgtcggggatcttggcgtcggacagagccgcgaggacgcacccgaaattcatgcctaggacctcgagctccatcgctgccaccatggccgtctctctcctcctccgtcgccacggaggttcagttgcagcttgcgtcggcaatggtgagtggtgacgagacgacgaacagcgaagaagcccacggcccacaagccacgcgcccacaagccgaccagcgtatctcttcagtgagatgggccttttgtgacgggctggacgtct

SEQ ID NO: 1389 - DNA, 485 bp, Zea mays
ctctttggcttctgttcgtcaccggcgcgcagaccgccctcctcctctcttggtctgagcatccagttcatcccacccgcgcctcctttggcttcctatccaccatggggacggtaatgttccctcgctcgggcgttgggcctgtgacgacaggcacctgccaagatgccgtgtgaatcctagtcctagctcatccatggcttctctggctggtagtatcccactagaccacatcaatgtcactggtgtcgtagcgccatggcccatggttgcatgcttgtgcgaagagaatacagactgagtacgacatgttgtgtagctttcccattgaataagatagtgtaatttcttttcttatttaagacttttccttactgcacttgcccatcaatattataattagatctgtcatgggtcctgcaaccaatattataattcaatagcagcacgtatctcattgtgtgttgaggacagagatattttgt

SEQ ID NO: 1390 - DNA, 344 bp, Zea mays
gtgtggtggtggtgctggtgtgacagcggaagctgcgcggatattgatagatatgatagttgattgatagggtgctcgaggagcgcggcgtgctttgttggtcccgggccttaggcggcgacgtgtgtctgccctgcacccgtgtcagcgggctcgccgctcgttgggacgaaggtcctcctcgcctctcagagaagcggaaccgaggttggatgagcgggcgagcgacctgtgggccagacaacacctgtcataggcgatgattttgcatggataaaactaaggatatcacggcctatatatatggtaatttaaaatagggtttgcatcatagctgctcgtaa

SEQ ID NO: 1391 - DNA, 246 bp, Zea mays
atgattcaccggtgtaacgacaaacggctcatgatttctttagacgctcgaagatagattttttttattacctgcacttaaataggaacacttcgtaacgacgagatgaaggcaggatttaggtttcatttggcatagcttattcagcagcctcttgagctagttcaagttattttgtgcatctcaaatggttttacgtgtgaagttttttaaaatatatatgctcttacaaggggtagacgtgag

SEQ ID NO: 1392 - DNA, 416 bp, Zea mays
gggggcgccaggacgactcacggagcgcgggacgcaatgcgtgatcaagaaacggagaaatgaacaggggaataggagaaagggaaggggagaaagggatatacggcgcatgtagggaagcttgcggagggcgttggagtacatctgagtgcccagtcccaggagggcgccgatgatcgtcggcgtcgccggcatcctgctgttctcctgtctcctcggggcgaggctgcggcggtggggtggacgactggacggcaaggtcggggagagtgctgtggggacttgtgagttgtggccggagagggaccttcctatctgttggacttcgttgctctagcctgtgtgggccgccagttgcgtaggtccaacgagggtgtggtgcaggccggagagcaagaagcccattgtgctaaata

SEQ ID NO: 1393 - DNA, 258 bp, Zea mays
tcgtcgaaagcgtcgttcatgggcgcttccccgtcaggccatcaaggtttcctcttctgcccggctcgttgccctccaataccgtggcactgagtgctgccttttccggatgtccatgcccacccattgttcgtcggaatgccccagcggtggtgccatttgccaagaagaagaggactgaatatatcgaagatccgccagatgaggaggtcgcagatgatttcaccgacgagttggaggaggacttcgacgacgcca

SEQ ID NO: 1394 - DNA, 834 bp, Zea mays
ctatcactcctgacaggtaaacatgggacttatcctgctttgttttatctgatcttgctacttctctgatttctaactttacctaatttctattttcttcttctgaaacaagtctctgataagtgcacacttatcttgcacatatttcatagatcccagtatcgttttggatgtttcttttctgtgcacatttacaagtgttgatggagttataagtcctttatttgtacagtatccttttacttactcctctttttttttacacttttgacattatgctctatcaatcttcgccatgtaactaagtgttcgtttagttccttcttcaaaatcaatctgtttaaactgcaggaaaggattggtggaactctttgatttactggaaaaaggggatctcacggaaggtcctaagctgtcggcacttgttactgacatgcacaagtacaggtgattttatttaatttatagctatggatagccatatgtacagtgcttttctttaactcagagattgtatcaagaatgcatttccctgtctgcagacaaggggctccaaggaagaggtatggctccttgccaggaagcaagggcagagcacggcttaggagtgaggaatctttttacgagaacccgtttcctgagtgcatctgtttgactgggaggtcctgatgtataggtaggtatgatcctatcgtatacgcagtatgcgactgtttgtgggcttggagagaattgagatagagtgctgttgattaaagtgtatttgtccaaaccatatcacctcggcgatcctttccagatgaactgacgtctgttctcaattgtagctttgca

SEQ ID NO: 1395 - DNA, 445 bp, Zea mays
ttctcgagggacggcgccatgcccttctcctccgtctggcacaaggtcaacaggcaggacgtgcccatcaacgccgtctggctctcggctttcatcgcgctctgcatggcgctcccggtaaattgcactgtgttgctgatgactagctgctttctcaattctcatccatgttaatgaatgaatggttaatgatagacaaaaaaaatgcagtctctgggcagcctggtggcgttccaggcgatggtgtccatcgcaacggtggggctgtacatctcgtacgcgctgccgatcctgttccgggtgactctggcgcgcaagtgcttcgtgccggggcccttcagcctgggccgctacggcgtcatggtcggctgggtcgctgtgctctgggtggccaccatctccgtgctcttctcgctgccggtcgcgtacccggtcaccaaggaca

SEQ ID NO: 1396 - DNA, 928 bp, Zea mays
  misc_feature (880)..(896): n is a, c, g, or t
  misc_feature (904)..(921): n is a, c, g, or t
tgtgctaggaggtgaaaatcttggaacacaattttgtgaagtagttgtgaatgttgtgctaaaaagggacgcagatctgcctcgcccttatgaccatatggagaccatgggtgatgcttatatgatgcctgttgcatggccatacaagagagtaataactgcacttgcctttgcttctatttttcatgtcttagtgtaaacaaagtttctaattgttgttatgtttgatagatgaaggtcagcaaggcttccaaatcatcccatgttgctactggtatggtattttgttttttcttattcacatgcataggaccacatagctcttcctttccactagtagcaaaaggaaacatccatctataaatactgcaatcttgattagtgttagttgtttcgtgtttgttttgcagaacctattattctaaatttcttatcatgtatcatgtatggtgcactctaaaatgctatttcattttttgttatctatgtgacttagtttatgtttcacatttaatagattgctgaattagaaccctggactccattatctacttatgcagtgagcgccatcaattagaacactagattgctgctatttcacatttgtgttttggttggttcagagttcatagcaccatcaattgagctgttgtgcatatgcagtgaggaaatagaggttggggaaatgagggaccttgttaggctggggaaagattagttgtttatgctgggtgtggcagccccctttctctttgtataaataattatttgttgtatgtcctgatgggcacttcctgggctatgagagggaatgatctccatattatttctgcagtttcctgcatactcaatgttgagctgtggtgccttatgttcatannnnnnnnnnnnnnnnntcaggtannnnnnnnnnnnnnnnnntagcaca

SEQ ID NO: 1397 - DNA, 371 bp, Zea mays
  misc_feature (353)..(354): n is a, c, g, or t
tcaagccctcgttccaccgccgacagcgtctggagcagcgcccaacgacgcggatcctcctgcaaaagcgcgataccgccgccccccaagcccggccgagctgactccgctgtgcgatgggacgcgcacaagaagacggcaatcccagcttcgtcgtcgtcgtcgtcttcaggcacgtcttcccacgtaagcagcggcaagtggatgatgagccgcgcgtcgtcgtctgcagagcgctgggacgtgcacaagaaatatcgcccgccgcaggccgccgaggcgctggacgacggcgagagcagtactgcttccagcaacgacattgacacggataaggaggagattgtatgganncattgtcttgcgcacgt

SEQ ID NO: 1398 - DNA, 380 bp, Zea mays
gttctcgccgacgaccacaacaaggagatcctcttctacggcagcacgctgcagaagtccatctgcggcgacccgccctgcggcacggtggtaagccgccgccgccgtcttctccgtctgggatttgctttgtactccggcggggaatcttgagttgactttgcattgcctcgtcggctccccctggacaaggaggctgcccggaggctcggggaggagctcgtcagggtgtgcaacgagttgggcatctccgagatctcctacgaccgcaacggctttgctcgaggcgacaagaagatgacggcgttcgaggttccggacttccggtctcacagcatgggttcatgccaagataggctttgcagtttgcactgacactt

SEQ ID NO: 1399 - DNA, 866 bp, Zea mays
cccgagctttgcttgaaggctgtttgtgccctctaccggaagcaaactgaggatgaacaggtggaaaaggcttctttagttcataataagcagggatttagccacaaagatgccccaaggtatgtttatacgcatctcattgcactaaggtatttagctgatttaatagcagattcattactcgcaaaaaagtaaagggctgctgtttgaagctgcttgaatttcagcatagtaggaactttcctctatacatgtgttagttaccgtaggttcttagcaaggtacactatcttacactgaatttctaaatgtgtcgagttgttcttgacttcttgttaggaatcaatattgaattattttaatagctctgcacttgattattagcaaagatttcatagacattgttaattaacaaaaaggtgttcatcgttaagttccttgaacgcaatgctagaaaaaaaccggcaatcattttggttcagctaaacagtttaggttcagaggaaattttagtactaagtaactttcatgacatgcttgtgttttattttagctcctctaataattcattttaaagagcaaagtagaacgaaaatatgagcgctaagggaagttattagtgttctcagtctgccagtagttgattgcactctactgttcaatgtaggggatctcgcattgcagaatttcttctggatggtgatctggttggtccgctgaagaagaccgtctcggatctagacgagtatgatcgctatgcttttgagttctgtcgcaaggtggcttcgcactactcaaaacaactttttgcaatctaccagaacaaggaggacccttactttcatccatagccctggtaatgctta

SEQ ID NO: 1400 - DNA, 352 bp, Zea mays
  misc_feature (346)..(346): n is a, c, g, or t
aggggcagtgacataatcatagttggccgtgggattataaaggcgagcgatcctatgaagaaggcgtgggagtaccgcttgcaagggtggcaggcatacaagaacagcttgctatgaaggaaggggggcgccatgagcatccccaagtataagggcgaatccagtcagtttggcgaaataagcgcatgcggaaaggttttcctgcagttgagtcaggacctaattgacatcagattcactgcagaggagactcatgccccattatcgtttctgttacaataatttcctctcggtttaccctgttcttgctggttgagttaggcacgttgtgatgtctgtgctcggntaaatc

SEQ ID NO: 1401 - DNA, 388 bp, Zea mays
gatgaagatatcgacatactgtgatgtcatcaagacatggaggacatggatgtctatgttggctacacgctcgcagacgaagtggagatcaatctaaaaatgtttcatgcgctggtgttgtactgggttgacagagaggtagacgacactaatgttatcatagtaaacgagtgtgctcttggttagacagttatggagctcctagaggaacttccatagccaacacaccttagccatgacattggccatgatgtggtactcggcttcgttgcttgaggcaggagccatgggctgacacttggaggaccatgagatgaggttgtcctcaaggaataaacataactgaaagtagagatgtgtgcctggacactacgcccaatgagcatat

SEQ ID NO: 1402 - DNA, 272 bp, Zea mays
agagcagagaatgctctatagttcagactagaaagaaaagcagtgcagggccacaggggaagagggagccccgcccaagatcgcaaaggcaaagtggcagacaaccatggaggtggagccaccaccagctgccgcggtcgctgtagcagcagcgcttctgaaatgccgcggcaacggtggcggcggggagccaactctcgaggccttcggtaaggcgcggtcgaggagcccgagcagcgcggccgccgcggggcctccacagaaaaccggac

SEQ ID NO: 1403 - DNA, 361 bp, Zea mays
ctcgcggttcgcagcacggagtccacggcaggcagcggtagggacgtccggctcgggaagatcacgggcatcgccggcggcagcgtgacgcggtccgtgtcgtgccatcagagcctgttcccgtacctggtgtactactgccactcggtgccacgggtccggctgtacgaggcggacatcctggacgtggactccaaccggaagatcaaccatggcgtggccatctgccatctcgagacgtcggactggaaccccaatcacggggcattcgtagcgctcggaggaaaacctggtcagattgaggtctgccactggatcttcgagggagacatggcttggacccttgttgattgattataaa

SEQ ID NO: 1404 - DNA, 278 bp, Zea mays
ggggggggcgcgtcgcctgagcatgactggcgcgtcctcattgctaggcttcagtttcatctggtggtgggcggtcatggcgtaggagtatctgccgtggcaccggcgattttcctggctggatccagaattccagacttatatgtactactgttgtgttgagtagcaggtttcattgcttctttttatatatagtatgccctgttgtaccactaccattgctgccgtgagcagaacaagagaaaaaaattgtcaagaacgatgcaaacaaccagaag

SEQ ID NO: 1405 - DNA, 358 bp, Zea mays
gcgagatggatcgagagcattaggagtgagcccaagcttggtcagacagtgcaggagctgctgcaggccgatgcgtaaacatgtggcctggaaggtagcggttcctcagtgtgatcatctcatacgggctgttcgggtcagattaaagtcggttgtttagattcatatgggctgttcgggtcagattaaagtcggttgtttagattgctgcagctgtaatttatagagacaaacattgtagaaacagtagaagtcggtataaattaaacctaaacgaccaggcctataaattcttgaaaaggttcaggtgggcttattctacattgtattggcagttgcttgcgtatgatttgttgag

SEQ ID NO: 1406 - DNA, 378 bp, Zea mays
ccgccacgtcccccgaaaatccctcgggcaggtcatcccgctcaccccagaatccgcgccacccacaggcgggctcaccattcaccacgtaccgacgcgtctctcgtctccccgcagaactacacgctcaactccaaggtgaacgaggagctggtggcggcggcgggggtggaggagggtgacgtcgtgctcgagatcggcccaggcaccggctcgctcacttccgcgctgctccaggccggcgctaccgtctttgccgtcgagaaggtctgtaacgttgctttgctcggtgttccgtagctggactgctgaaagtgagagcgagccgctaggggggaaaattcgaaagatcttcctgagacgaaattgaaattgtgt

SEQ ID NO: 1407 - DNA, 615 bp, Zea mays
ctaggaacctgtacgcaaaggaatcaggcgcggtgaagactttgtacccagggtattgctcaacggagcaggatctccgccccggtgccgcgattcgccgtgaatcgaagcctccgcgccatcaggtactcccctggccttcgctaccatcttccccctccctgcgtagcagttcgtggtgtccatcttagagcagtagggcatgggtaatcgctcaccggaatacggaagccgccgcagaggcgccatcgacgtggccagcctcggcctccacttcgttgtcggcatggatgcgttcttctattttgccctgtccaccgcttcatataatgctcgtcggtataggaatgttcgaccacaagggcggcactgcggtgatttcctgccggcgcatgaccgtcgcgacaatgggcagcgccgccgtcagtgcggaatcgggcagagtggaggagtcccaggctgttccatttaggcaatgttagttgtgtgctaatttatagggattgagcgagattaaattcagtacaagtcaaaattctctccaatcccttctaattctcctcaatccctatgattttagaatcaaacggaacgtttcagattagatgagaggta

SEQ ID NO: 1408 - DNA, 491 bp, Zea mays
aaaggtttcttcaaactactgtcttcctggcatatatatatagtcgtcgagcgactcaaaccatgcatggtgggtaaggttttcttcttcttcttcttccaagctgcaggcaggagcagctgcggaagaaggcggctgcgcacatgaaccagccataccaggcatctagcaatgacgagctggtcctcctggtgtcgctggattcaatcaccaagattgggtgaattgttcatctgcggataatcatctctagcttgctgtgggtgctagagtattaatcttttttgatttccaactacataatcagtattggactttataacaacgtcatcttaatttgccccctttacaggctgaccattacggtgaacacccacctcgtctctcctaaaatgaaggatgaagttgacaggccctctttctctttgcttgtgtcatcaatatgtaaacactcactagctaataaagctaaaaataagactgcctccatt

SEQ ID NO: 1409 - DNA, 409 bp, Zea mays
tactacactaacagcgttatgcatcgcgtgctcaagcgcaagaccggccggcccgccccgcgcccgccgatggacaaggacgacgggcactgctgggattgagcgcaattaatctgacgtgcgatcgatatatgcctctgctgccccgcaatggccagccagcaggcagcagcacgaacgccggtcagagacgacgaggacgagagagcggaggttgcactgcatgacatgctagctagtggaatatatggactattcgcgtgcgcccgggtgcagacaaaagccattcatcgagcgcctgtcggacgacgactatgtccatgtgatattgtagctacacatgatgtttacttgctcttttagagactacggatttttgttttattagagaaaaaagagaacgaagaat

SEQ ID NO: 1410 - DNA, 1289 bp, Zea mays
  misc_feature (1211)..(1213): n is a, c, g, or t
  misc_feature (1268)..(1270): n is a, c, g, or t
  misc_feature (1273)..(1285): n is a, c, g, or t
tctctgtactcacttttttcttctttggtggagctgcacttggctctggggctggaaccccggatgttccagcatctggcaacagaatctcagaattggatgtggagcttcctatcgcaggtggatccttctcagccttcgccaagggcgccttgcttgtatcttctgtccttttctggcccaggagtggcaacatatccagaagcatggcgtgcaacggatcagccatttgttctatcttctcaccaggcgtgctactcatcgcttcagcagcagttgttgttctctggaaagggctgtcttgtttctcctccacggtgttcaatttgacacctttgacctcttgctcccccaacgtgaaaagctgagcacctggcggtggtccacagtcattatcaatgttatctacttccattttagagatgtaatctgtgtccaacttctgatcatctttcccagtttcacaaggcccagatccgctgtcgcccatttttgtatgctgatttccttttgtagcccctgttctccaggctggttttgaagcaggtgcagggagtcctttgtttttgttggtaataccttcttcaatcttagaggtatcatctgtgtccaaattttcatcatcttggcattcgctggggccactttcttcagattcaacatcacctatttttgctttctggtttcctcttctaggccttattcggcggactgctctaggagcagcccttgcagttcttgaactggttggcctactccttttccttggcatattttccgcatgagatctttcaacctccttgtgttcctcaaacttatgctccggaggctgaacattttcctcactgaaacaaattagaaacagacagaagattgacaaccatatgcattttttttaatattgaaagtgtcgttatgtgggcaatcaccggttacctccttttaatttctagttcttctagtgtatctggtttaaggctgtaagcagtttcagagagcttcatttgtttctccactgaatcttccaaccacttgttactgacaacatgtaatcttttgtcatgtagataacgtctttcagcgggagggaagctgcataaacaaccaatggacgaccataaagtttttctatttgcccttcgctcacaaaagttacaaagcaaatctaaagcaataactcagtacctcttgtacaggttatcaaagttatnnncctgtaaaaccgaaactactaccaaatgagtagctggagcaatactgctgcagannngannnnnnnnnnnnntttt

SEQ ID NO: 1411 - DNA, 418 bp, Zea mays
tcttgtgaagaaaatatcgcaaagattccgatcatcttcggatactgatgtctctctataaattggccagaatttcaccaacaatttttgcatctcataattgagagagaaacagggagaacgttcagagacatggcatggaaggtgggcactaggtgacagcgagcgctcgggatgacaacgtgcgagatccacagatggagttgctagacgacggctcggctatgacaccatcgctatcgaatgtcgtacaccttgccaccctagcacgacgccattgcaggtctcacgcatgcatgaagggcaagggattgagcatgggatccacaggaggctatagaaattaccctggctctgccaaatgttcaataaaaaatttcacaaagaaatagagtactagattgatgctcactatggg

SEQ ID NO: 1412 - DNA, 436 bp, Zea mays
ctgaatattccactttttcaattgtttgaaccgaataagagtcccaagaataacatcccgtggaagtggctctttcctgtttcgctgggtcttcagaatgggtacagctgatccctcctgctctatctctctcatcattctcctccaattcatctgctcggtctcatcagcaccatccttgaaaacttcttctttctttttcctttgcataaactttcttgtagctaacatcccatggcaaaccacctcaagcctacagttgctcttgatcttcacattgtatattgataaactagatgatacttttcctttgctgaaacagtcaaacaggttccaggcagagttagggggggcatcgcagggaaaagcacaatgtaacacattcaaatgcaggttaatttattgaatatacagaagttacatgacgaaactgtct

SEQ ID NO: 1413 - DNA, 308 bp, Zea mays
aataagtctcacaatttatgatgtttgatcatatgaatatttagttatatatgacttgtttgcttgagctatgtgtctgtcgcagcacaagcattcattatcgctcaactggctctcatggtgatcaagttatagattttctgtgtcctggctactgtgacctggctactgtatggtctttgtgagttgatctgttgtcatttccatgttcattagtttggaaaagttggtgctgctggatttttgcctaactggtgaattatctagactagtcggttgcccgtgcgttgtgacggcccataacaata

SEQ ID NO: 1414 - DNA, 681 bp, Zea mays
  misc_feature (677)..(677): n is a, c, g, or t
gtgcttcttctccatcatcatcatcagaggaggaggagctacctacctaccttttgatgcaggttgccatggccaccaccaccagcagcagcttggtcaccggcttgaggtgcaggacaggtgcagcagtggcattgatcagacccactagtgccgctggggatcgccggggctggaggacgacggcgtccggccgtggagcccgcaggggcaaggtcacggtacgttggtcttgaacccagttcagttacagctgacccacgtactatcagcatctctataaataccacaccggtctctgaactgccaagaatcctatttctctcggcttgtttctgcaggtcgctgcggcctgcaagacatgcaaaggaaagggggcagtagaatgcccagggtgcaaggtatgtgccaccatgcttgcttgcctttgattggtgaaccacccagacatgaaatcaaactgaatggtgcagggcaccggcaagaacaagaagaacggcaacatcttcgagagatggaagtagggttttcttcttttccttctatataaatatgtaccaccatgcttgcattgcattttcaagagattcaaattggtaatcccatctccatccaggtgctttgactgccaggggttcgggctcaagagctgccctacctgtggcaaaggaggtctnacac

SEQ ID NO: 1415 - DNA, 302 bp, Zea mays
catgaggcacaagcagtaatacacaagcgaccacacaagcagcagattataatatgaccggtgatgataggatggattagatgtttaatgatttactatcaaaataaaacacagattttaggattcaattgggaaactctcaaatctttagttctctaatgtacttggctagtgcaaagagacccgacatcttatttgttgtgagcaaagaggacatgattgagcttgagaggatgaggacattcgagcttgagagacatctggaatccataatgtccacactttagtcatgagcttcttcg

SEQ ID NO: 1416 - DNA, 348 bp, Zea mays
aggccaggaaccaggcgaggatgctgctcgcggacctccaggcaaggaacgcccggatgaaggcggcggttcccggagcatcgtgctccagagtcgcgcggcctgacgcgttcgccgtcaccggctacgagcacatccagaaccaggcccaggccctcgctcctgccgcgttcgggccgcggggccagcgtgcccgtgcgggaactggctactactgcgttgcgtcgtccagcggcttcggccacaggagcatcgactcgtctctggacacctgcgccgttcagccgtcgctgcttggcttcgcttcctcgagctcgagccaggagcatttcgaccctgacatgttct

SEQ ID NO: 1417 - DNA, 306 bp, Zea mays
ggtagtggcggtgaacatgagggcaacgtgtctcacggaagtagaaaaaagaaagcttaaatattctccactcccacgtaggaatggtaggcactaggaaatggggcggtgatgattctatagggcatggatccggtgcagtgtctactgctactacaaacaaagatactgccacaggagggtgggagcactgtttaagacttaacttgtcaataataagtcgatttgagctagcgatttggttgctgaatgtgtttagaatgtcacatcattgttagggcgaagaccgaatctaacctcaatcaa

SEQ ID NO: 1418 - DNA, 386 bp, Zea mays
  misc_feature (381)..(382): n is a, c, g, or t
ctgcaaagttgtagatgtagtcaagcattataacatttgtttaaggtgtccctccatccaaggttgtttgcgaagtcttaaaaataattttttaaaaaaaaatcataaactttcataattttaatatttttgttggggagaagtctttgccaaaggtcctcaagtagcagatcccagtgtcttgagtctgtttcaggaaccaaatggtacaagctttggtcgtctgcttcggcaagtttggcgaagaagtaagatttcagcagcacgaatgaagagaagcttgtcacatcatctaagccatcttcggagagtagcgtttggataaaacttgggctaactacaaatgtcaaaaagacgagggagctcacgagagaccgtagnncatg

SEQ ID NO: 1419 - DNA, 518 bp, Zea mays
cttgcccttgctctttgctcagctggcgggtaattcagtaattgataactgtgcatcgttctttagcaaatattttaacaatgaaatgggacggttgatgtgtaaccattttgatttgtccttcagtttttttgttttatcaagtttccctggtcggcggaagcatgcaatagacaagattaacaaggctgctgatgaactctctcgaaaagttgatgaagctatccaaaaggatatctcacagagtgctaataacctaatccgcttcgttgaggttatcagcaaaccttaccaggaagcatgtcagcgaaaaatagattggttacagggcgttcagggtgagctatctgctgtcgagcgtaagctccaaactttgaaagttgaaatccaaaatcttaatggatcataaggtttcatttcaacttgtttatttgcaattattttttggatactaatagtttttgttggtttatactgcgttgtgatgctattgagttgacgtagtgcctttcctgtat

SEQ ID NO: 1420 - DNA, 422 bp, Zea mays
cgcgggcaacccgcgcctgaggcgccaccaaggctgtcctgtctcggtgccgtgcggagccgctactcctcggaagaccgtgctgaggaaaagctcctcggacatctccggcggcagcagggccgaccgcgtgagcgccgaagatgcctgctgcaagcccaggagggtctcccggaggaacacgttcgactcgccgatgctgcgctcggacggcgcgctcgtggacgtccggaccccgagtggaggcagggcgaagaagaaggggggcgtgtacggcgtcgagttggtggacgtcaagtgcggtaaccccatgaccagcaggctcaggaagctcggcttctgcaagctgtcggagacgtttgcgtaggtggagcctggcaaggaccatggccagcatctgaataccgtgtgcctgatttagt

SEQ ID NO: 1421 - DNA, 367 bp, Zea mays
cgggcggcgagatgtgctccgtgtgcctcgaggacgtccaggctggcgagatggtgcggcagctgccgccgtgcaagcacctgttccacgtcgagtgcatcgacatgtggctgcactcgcacccgacttgccccgtgtgccggtgcagcctcttgccgccaccgcggagggttggtgccaaagcggctcccgcgccgacagctgacgctagggaaccgccggctgacgaagccctgccaccagtgtagtgtaggtgtctgtgtttcgccataccattctggagacggcacaagaatctctgcacgtacagcacacataaccactttgcacgtcatggattgacaattagtagaaacgcaactctcga

SEQ ID NO: 1422 - DNA, 759 bp, Zea mays
  misc_feature (13)..(14): n is a, c, g, or t
  misc_feature (384)..(388): n is a, c, g, or t
  misc_feature (390)..(394): n is a, c, g, or t
  misc_feature (398)..(399): n is a, c, g, or t
  misc_feature (401)..(405): n is a, c, g, or t
  misc_feature (407)..(407): n is a, c, g, or t
  misc_feature (412)..(412): n is a, c, g, or t
  misc_feature (415)..(416): n is a, c, g, or t
  misc_feature (425)..(425): n is a, c, g, or t
  misc_feature (433)..(435): n is a, c, g, or t
  misc_feature (438)..(439): n is a, c, g, or t
  misc_feature (448)..(451): n is a, c, g, or t
  misc_feature (453)..(453): n is a, c, g, or t
  misc_feature (455)..(455): n is a, c, g, or t
  misc_feature (458)..(463): n is a, c, g, or t
  misc_feature (465)..(465): n is a, c, g, or t
  misc_feature (467)..(470): n is a, c, g, or t
  misc_feature (473)..(474): n is a, c, g, or t
  misc_feature (476)..(480): n is a, c, g, or t
  misc_feature (483)..(489): n is a, c, g, or t
  misc_feature (491)..(508): n is a, c, g, or t
  misc_feature (510)..(515): n is a, c, g, or t
  misc_feature (517)..(528): n is a, c, g, or t
  misc_feature (531)..(531): n is a, c, g, or t
  misc_feature (535)..(549): n is a, c, g, or t
  misc_feature (551)..(573): n is a, c, g, or t
  misc_feature (576)..(576): n is a, c, g, or t
  misc_feature (578)..(594): n is a, c, g, or t
  misc_feature (597)..(597): n is a, c, g, or t
  misc_feature (604)..(619): n is a, c, g, or t
  misc_feature (622)..(641): n is a, c, g, or t
  misc_feature (650)..(650): n is a, c, g, or t
  misc_feature (652)..(665): n is a, c, g, or t
  misc_feature (667)..(669): n is a, c, g, or t
  misc_feature (672)..(674): n is a, c, g, or t
  misc_feature (677)..(691): n is a, c, g, or t
  misc_feature (694)..(696): n is a, c, g, or t
  misc_feature (698)..(700): n is a, c, g, or t
  misc_feature (703)..(704): n is a, c, g, or t
  misc_feature (706)..(711): n is a, c, g, or t
  misc_feature (715)..(718): n is a, c, g, or t
  misc_feature (721)..(727): n is a, c, g, or t
  misc_feature (731)..(731): n is a, c, g, or t
  misc_feature (733)..(753): n is a, c, g, or t
  misc_feature (756)..(756): n is a, c, g, or t
tccgctcggcggnnacggacagcagcttcagctccggcgagacgccgtccaagaagaccacccggaaggagaagcaacaggagcggcggcggcagcaggacgtgcaggaacggcagcagcagctcctggggatggaagaagcgtccctggcgaagcaagacggcggcggcagcggcagcaacagcaacggcgaggttgacgacgacgacgagcttccgcagcccgtgttcgaccgcatcctgcgccggatcgcgttcacggtgggccttcccatggcgtcgggcgtcgcgctgctcaacgtgtacgacgcgctcaagcgcggccagggggtggtggtgccatcgtgggtgccattgctgaccatcctcgtcgccttaaaaaaannnnncnnnnntgcnnannnnngntaagngannaacatgcancggccagnnnggnntctctgtannnngncnctnnnnnngncnnnntgnnannnnngannnnnnnannnnnnnnnnnnnnnnnncnnnnnncnnnnnnnnnnnnccncccnnnnnnnnnnnnnnntnnnnnnnnnnnnnnnnnnnnnnnccntnnnnnnnnnnnnnnnnntantccaccnnnnnnnnnnnnnnnnccnnnnnnnnnnnnnnnnnnnnccccccctncnnnnnnnnnnnnnngnnntcnnnccnnnnnnnnnnnnnnncgnnncnnnctnntnnnnnngttnnnntgnnnnnnntgtntnnnnnnnnnnnnnnnnnnnnntcnccc

SEQ ID NO: 1423 - DNA, 208 bp, Zea mays
gagccgaacgagcaagcaagccaccaacgaaggttgctagggccggagtggatggggttcatgctgcgggtgaggctcgcctccttcttcgtcggcgcggctgccgccgccgcgggcgggggctacttcctctacaaggactacaagctcgccaacgactctctggccctcaaggtacgcactccgcccctcttcctcctcgcttcgc

SEQ ID NO: 1424 - DNA, 343 bp, Zea mays
aaagagcttcgggctatatgacagtaacatattgatgaagtggttcctgatgcaagaacatactgatgaagtggttcctaattcaagagccgaagttactcaaggactggtaccgacatcaatgacaaggattgaagaagtggtgactggagggctggggttgtctcataacagattgctacgacagaagatggtagtactatttcagcaggagcaacgtcgtctccacgcattgttagatgtttagttaaaaatcaccctgaagaagaagaaagtgtaatctggccactgaaattgtaatatgtgaagtgcagtgtgtaccgatacgtgaacttgtttgaaa

SEQ ID NO: 1425 - DNA, 392 bp, Zea mays
gcattattcttggatcaacactgctggcgctcggaagtacctgttcagttcctcttttctggtgctatgagataacagcctggggtttggtagtcttatatggtggcacggccttcttcttgagaaggaaagctgcagttgtccttgacgagagcgattactctacccacaatgtgggtctagagatgctggagtccaaaatggaagtgactccagagatgcagcgccgcatcaccgatggtttcaagcagtggatgggttcgtccctcctatcttctgatgacgaggaggaagcctcggatgactacctcgagcacgatgttcctagcccgactgccttaggtcaacaacaccagcatgagcatgatcgagagacctgactgctgtataaa

SEQ ID NO: 1426 - DNA, 405 bp, Zea mays
ctcccacatgccccagtctcctaaaccctacacatctctctcggccacggtaattgccatcgccatggccgggaggcgcccggcaccggtggccatcctccttctcctcgccgcggcattcgcccccatctcctccgccgttcgcccagtctccgacgcgcacagatccgctgccgtggagcttttcgccccctccgctgacggatccttcggcgagtaagtgtattaccaactctcgagcgccttacgtcttcccgatctcggccaccccgccccgcggacacagtagccatcagctgggcgcagatcgatctgcctgattgaaattcatgcttatgtgtgtttatttcctggtggttttgatctgcgtgcactgtgcaatttggagagtacgtatgaggcgga

SEQ ID NO: 1427 - DNA, 437 bp, Zea mays
tacgattagttctctttagatcggggtttgttgcactaatgcggtgtatgggcgtgcccagtatggccgccgccgcggtaagcgcgcgttccgccgcttgcgcactggcgtggggtggaagacggcgtatgggctgtccgatctttgacgagcgcgtaagattagttcgtgttgtaaggagcctgggccatcggatcggaattgaagggatacgattcgatcgtggggataccaattcgggggcttaatttcgaccattgattgtctatccaatggtttgggttagatatgggcgtggagtgttgcggtacatggatcccggatcaaacggttatcatcgcgtaccggttcatgaagagataatctaatttacaccgccagtttctgatctgacggtgctcgttggccgataccctttcggctagccatctttacat

SEQ ID NO: 1428 - DNA, 463 bp, Zea mays
catttgcctcagttttccatgctggaataggagcagtcttgctgctctacgttctcttctggctcaaggtttgccttgtcccttgtgataaactgtacttgcgaaaactggcgctgatgttcacttctaatttggtgcagttggaccttttcacaactctgaagtaccttggcttcctcggcatcttcctcgtgtttgtgggccataggaccctgtcctacctttcctcggcgtcagcaaaacagaagacggcatgagtggacagtgcaagcagagctttcccgatcatcaattcgttttttgaggtggccattccaggccactgggtgtctttgcttggtactctgaccgcaccctagtttttctttagctaacatgcattttgagggaggactcggtttatttcagttggctttgacgaatactgatactaggacaagtaacaggacctcacatcacagtt

SEQ ID NO: 1429 - DNA, 346 bp, Zea mays
tgcagccgagcgatactgggaatgctgatgttggaagcaggagtcaagaagaaaattacatttcaaaggaagagttggagtgtctagtccatggtggactaccgatggctttgaggggagaggtgcagcctgatcactggagcattttgtttctttcttttactttcgatttgttcagttcattcagcagctgtgtgattttctggtgacagctatggcaagcttttgttggtactggagctcgtagggtagaagggtattatgataatctggcagcagagggtgaattagataacaaacgttcagattctcgaacctcggaaggtgttcacgagaagtggattgg

SEQ ID NO: 1430 - DNA, 307 bp, Zea mays
ggcgcagatgaggctggagggagaagggaggccagatcagttcaccagtcgacgaagcaagcggcaggaggagttggactagggagtggttggcgcgtcgccgtcgcgagccagtgagctgcctaggagcgctcctttttagtcgctgcgacgcccgcgcctgcgtaggcgccgtgtgctcctgccggccgcactgagcgtggcgagctctgggccagactcgagcgatcttatcaggtagttcattgtatttcgccattcgtttttccattctttttgacgtccctgtgtgagacgatgctgtttg

SEQ ID NO: 1431 - DNA, 354 bp, Zea mays
cccggcgcctgcaacgactcctgctttagccccaataatgccagcgccgactcctgctccgacgcctgcaacgactcctcctgcttcagccccaacggcgccagcaccgacaccagcgccaacaccatcatcactgacaccagcgccgactcctgccccggcgccatccgaaaaccggtgtccccctggcttccctaacctaatcaccttaattcaagccattaagaccacctatcctaataagtgcaatattattattgtccccgttccattctcgccggtaaacccagggtcgggctcgggcattccatttccaccctacaaatgcctgtgctactgctttcccattattag

SEQ ID NO: 1432 - DNA, 416 bp, Zea mays
acgccgcggtgcgcgttcccgcccgacgaccccatggcgcgggcgctgcggacggggctgttcgagcgcatccacgtccgcttctacggcgacgccgacaagtgctcgtacaagaacggcgacgtgtccggcgtcgtggaccagtggagcaagtggacggcgaggtaccccaagagccagctttacgtggggctcgccgcggccgagagcggcgtgccggaccacgcgccgccccccgttgaggtctacctcaaatacctctactacgatctgctgcccaaggtgcagaaggcgcccaactatggtggcgtcatggtctggaataggttcaccgacaacaggaccggatacagcggcgccgtcaagggctgggcggcttgcagctatgctggctgtgttaactaagtgcatagcgc

SEQ ID NO: 1433 - DNA, 472 bp, Zea mays
gtctgccacgtgaggaggcaggtgcggtacgacgaggacgacgaggaggaggaggacggcgaggagtggggccacaacgaggacgtcgcgaggatggagcggtacagcgaggacgcccgcgaccaggcgctcctggtgaaggcccgagtggacgacgaggtcgaagtcgtgctcgtcttcagggtaccccgacagacactgaccttactatatgttacaacgttgtgtgccgctgtgactgtggctcaagtcgagacccatgggttcgttcgttctgtcgcagggcttctcgtcgagcttgagcgggggaacggccgcggatccggcgaggagcgtcctgccggagagggcgatcatacagtcggtcgacgtggtgaaggggccgtttgaccccaacaacatcgagtacctggagaagggagtgggatgggaggacttcaggagccgcctgcgatagtaacagcactagcac

SEQ ID NO: 1434 - DNA, 348 bp, Zea mays
cccttccctcccaaaccttctccgcatcttgcgctaaccgaagctgggagccgtgattcgcaccccctccgcacggactcttccaaccggatcttcctccccctcgagcataaatacccatgttgggacccctccagtccatcgcatgggggtcgacaaggaaccacaccaaagcagagggccaccgtgaacgcatgcgggagaactcgtgccaccgctgccatcccttgcctccaccgtcgttcagaggatgcggtgcagtcgaggatgtccgaccgtgcgaatggatcaggcggggaggataattggtgtgcatgagacatcgggatggccggacttcttcgtcgt

SEQ ID NO: 1435 - DNA, 377 bp, Zea mays
agttagttttcgatggttgataggccatcaaaagttaagtaattttttgacggcctgtcaatcagctgtaggaaaatgaactaacttccgatggctggcttggtgttctttcgaagttagtcatgaactgtttacccttttgtcaacactatcatgtggacacgaagcatttaacattccatccatccatctggagctcgtcgctaatatggccacggtggcgccttgcacgccaacgccacttttgacaccgtgcccaccgtcacttgcgggttccatgccgacattgatgctgcccaaccgtcgtgcgtacgtgtcgccgcctaccgtccctgtgctgctccttgcctggtgcacctctgttgaccctaagctat

SEQ ID NO: 1436 - DNA, 359 bp, Zea mays
ggcgagcagcgcggtactgcgggtacatcttgccgtcctcgcagcagtccgggtcgttgctcttctcgcagttgccggagcggcccgggaggtacccgctggcgcggcacgtgccgaggctggcgccagggcggagagaggacgccgtgtggggtgcggagagcgcgaccaggaggaacatgaacatggcggcggctacagctcctacaccggccatctttgcttgcctgcagattttgtgctcgaggatcgagccccttctcactctgttctttttccttccttccttcctttctttctttctttctttctttcttgtgctctgctttgcttgatggttttgttagattacttgtgca

SEQ ID NO: 1437 - DNA, 310 bp, Zea mays
gggagagacggtggtgatggtgagctcaagctgctggggctgtgggcgagcccgttcgtcacgagagcgaagctcgcgctccagatcaagggcctaagctacgagtacgtcgaggaggatctcggcaacaagagcgagctgctgctcagctccaacccggtgcacaagacggtgccggtgctgatccacaacgggacgccggtctgcgagtcgacggtcatcgtccagtacatcgacgaagctttcgccggcactggcccgtccctcctccccgccgacccctaccagcgcgcccttgctcgcttctggg

SEQ ID NO: 1438 - DNA, 733 bp, Zea mays
tttgcccccaccgtcgctgcttccacaagcttcggcttcagccgcttcactatcgtggcatgccccttcccctcgcgcacgcatcttccagcggcctcctccgttggggttcgcaatcagcagcgcgcgtccactgccaccgcctgcctgccgccgccgaatacctcccatggcgccgccaccaggctgtacgtcagcggtaggcgctccgatctcagacttcgctcctagatttggtaatcctatgctaggcgccccgactcagcgcactctcttggctcctagatttggtaatcctaccgtgcattttagggcttcgagccaacgatttcctgacgaaattcggaaaaaaatcttcaggacaaatcttaaagcactcgttctgacggttcccttcctcttcctcgaacaggtctttcgttccgcacaaccgaacggagcctccgggacgcgttcgagaagtttggtgaccttacggaaggtgacagagcccgagatgagcgaatgtctgtgttttaaattcagaattattgaaaatttgctccgtgcttgctactccagtttgtctcgtgatggatagagtagcgaagcgaccgagaggtttcgctttcctttcttacaccggggaggaggaagccaggggcgccatggaagggatgcacgggaaggtgaaagatgtccagatcgtcggatgctcgtgtgatagagatagtctgtggtgcttgtaggctaa

SEQ ID NO: 1439 - DNA, 275 bp, Zea mays
  misc_feature (264)..(266): n is a, c, g, or t
acgaccaagcagcaggccagcaagcgcgcgaggctaggacctgtgaggcggtgactccgtaaggcgcgggcgcgcaaccgtatccggatagccggcggccggccatacggaggcggtggacgtaaagacgagcaggcggccgggcggtgcctgttgtgcgggcacggagggaagcagggaggctacggctgctgggctgaatacctaggttttgctcttttagtgggccgaattgaggtatggcgcgggccatacttagccatnnnggaccctca

SEQ ID NO: 1440 - DNA, 343 bp, Zea mays
gcgtagaggttaagtctggaggaccagacggctgacgacgatgcggagaaggacgaagcccagaggtagtcagcgacgaggccgatgccgagaatggcgacgacggcgagcgccaccaagtgcttcgccgccggccgcaccatcggcgggcgactaggactggagaaggtggacgcagagcgagactggagtgaagcgcgtcggtggcattgacggcggaacggcgcggcgagtagtagcgaatcgaagtgacggtgcgaaatggttccggggtgtttggcacagctacaaggagaaaattgttatagtggatccctttatcgttgcgttctttaagtaaaga

SEQ ID NO: 1441 - DNA, 357 bp, Zea mays
gcgaagtgagagatgccagaaatggagaaaacaatggcactgaagatggtgggaatgaaggaatcaggagtgggaatgttggtagcaatgcagaagctgaagagtcttacggtcatggaaataatgaacgcgcagaacataccgaagatgacaaggctcaggaatgtaaccacaatgagaacagtgcaagtgtaggaatccttggcgatggagacggtgaagctagagaaggcgatataaatgcggaagcagaacaaagtcaagcagacggtggcggcaatagtaaagcggaagatgctgagcacaatgaaaacaccaaaactgacgccaattcaagcaagaatggtactactgctg

SEQ ID NO: 1442 - DNA, 343 bp, Zea mays
agcaggagcaggagcagcgatccatcctatcctaggagccaaaccctagccagctatggagccgcccgccgcctcctcctcgtctgatccccactccccgtctccgtctccttctccctccgcctccccggccaagcgctccgcctggaagcaccccgcccccaacgacaccgccgtcatggacgccaacaactggcccgcgctctccgacgccgccaagggcaacaagctcccggactcctcggctccatcacctgcgcccgtagccgcaccatcggtcagatctcttctactcttgttactattacggatacacttaattattcgatcatatactcgatca

SEQ ID NO: 1443 - DNA, 673 bp, Zea mays
  misc_feature (365)..(368): n is a, c, g, or t
  misc_feature (409)..(411): n is a, c, g, or t
  misc_feature (427)..(429): n is a, c, g, or t
  misc_feature (446)..(450): n is a, c, g, or t
  misc_feature (457)..(461): n is a, c, g, or t
  misc_feature (468)..(471): n is a, c, g, or t
  misc_feature (535)..(539): n is a, c, g, or t
  misc_feature (573)..(577): n is a, c, g, or t
  misc_feature (592)..(602): n is a, c, g, or t
  misc_feature (617)..(617): n is a, c, g, or t
  misc_feature (621)..(625): n is a, c, g, or t
  misc_feature (634)..(670): n is a, c, g, or t
cattaataccacaaaaaacgacataattacatcacactgtatatccacataaaaacaataattatccaggtgttttccttcacacaatcacttcatcatcgcctgaaagggccatcactactcctgccaggagaaaatgcctaaacgaactcggaataggcactgcaccttgtttagactatataacatatcaaagaaattgacaccaataatatctgatcgattctgatcaaatgaaagaaaatacagacatatcagatgagcatagcataaaaactatcttgaaaaaaaaaatcaaagaatgacttaatgttatggaatgactaaaaaataatatggaagacttaaattgtacaacgaaagtnnnnctatgaaaggatgactgaaagcaaacatggatgtcttgggnnnataccatatcaaactnnnatttgtaatccaaattnnnnntcaaaannnnnataaaannnnaactgaataacttgaaaagtatcaaatgacttaaaatcacataaagttttaaactacaaaaggnnnnncaaatcttaaattaactaaataacttcaacctannnnnagagttaaaatcaannnnnnnnnnnacctactaacaaggncaannnnnaactaactnnnnnnnnnnnnnnnnnnnnnnnnnnnnnnnnnnnnnaaa

SEQ ID NO: 1444 - DNA, 447 bp, Zea mays
acctctacttcacccggatcatcgtgtcagcgttcctcgccgtgctcaactacaagtaccggtggggagtcgatgttgcagtcgaggccgcgagctttgccttctacctgttcgtcttctacaacttcaagccggtagagaagaacccgtacttgtacattggcgacgacgagaaggaggccgcccgtggccgtgggcacctcgagacggacgatggggctttgattctgagctctgattcatggggatgcagaaccatctcctgatcctgcctaattttttttggtagatatgatgtactcggtacttgttgttgagtttgtgatccaaattctgaagaaggcggccaagttggcgagcgaagcggaggcccgtcgccgggaggcttgggccggagcgcagcgaggccaactggccttcccacagcccagggacgcctgggggtgc

SEQ ID NO: 1445 - DNA, 328 bp, Zea mays
aacctgtcattgaggaaactgaatagctagatgattcacacacattctggtcgccttacattacaggcaatgcgttcgccggttcagctggaacgagcttcactccgcacatcatcacggcgtctccttcagaggtacgtgtactccctccaccaccctctgaatctttccaagaaacagaatgccgctttgggttcggttcggttcgggcgggcgtactggagctcaccgttggtttcgccaggacgtggcggcgaagatcgtcgcgttcgccacccagtcgtcaagggcggtgtgcgtgctctcggcgatgggctccgtctccagg

SEQ ID NO: 1446 - DNA, 563 bp, Zea mays
  misc_feature (554)..(559): n is a, c, g, or t
taaattgaatgaacacacacacagggagggaatgaaggaaggaagctccggttttgatccgccggccgacagatgctggtaagcagtctcttctttctgcagtcacattcctagattgaggtcctgaatgtcctgggccggatcttattatttctttgcttgcatgcatgattcttcatcagtctgatcaacactacactatgatgagtctatgacatgagtggagtggagggacggtgcacatgcatcttgggcagtctgcagtgtgcagcaaggacgagagcatgcggtttgcttttggcggctctattctacctgcaactgcaactgcaactcatcagcagggagggaaggtagaagaggagcaacatgtaggaggtacagtaacaacaagctagcatgccaagtaacacactactgttcctgtcgcgtacagtacgtccatccattctacgtactgggatctgggaatgggatgctggtgcagcagtacgtagcagagagccagcagcaccggccgggggtccagtccaggggcctgcctaccctcctcnnnnnnaccg

SEQ ID NO: 1447 - DNA, 721 bp, Zea mays
ggatgcgccccacgacctcccgtgactctcccagtcccaggctcccagccccgccttcctcccgcctccgcgagaccgcgatggcagtcttgctgtggcggtgcatatgcgggccccaacaatccttcagtaagaatcgaggcgcatccaccccttctcctcctggtaagccttcgaaccactccctctcctcccgtcctccgtatgcctccttcatttcttcttgctgcctctcgaattctcagctcctatgcatttttttctttctttctctaagttatgttcagttcttggatatccttataactcgctgaggattccgatccctaacatcgacaattcttgctcttgcttcatgcacagcaggcaggagatccaaatactcgggacaatctgtggtaaggagcgcacgcattgagctttccctgctacaccgatgcatttggttcatttctcctgaaaaaaaagtacactggaggcaaaagcttgaaaaaaaaacatgtcttgtgaaaccaagagcttgtgtgctccggttctactaataattcgtgtagcctcagctttctgatcctgatgtctgtatttccatgtccgcagaaagcaatgcccatgcgtttgttaacggttggaaagaagaggtctcgggggacacaactccttgttgaagaatacaaggagaagctcggtcactattgcgagttcgaggacactcttatcaggc

SEQ ID NO: 1448 - DNA, 1402 bp, Zea mays
  misc_feature (878)..(885): n is a, c, g, or t
  misc_feature (890)..(951): n is a, c, g, or t
  misc_feature (954)..(960): n is a, c, g, or t
  misc_feature (964)..(979): n is a, c, g, or t
  misc_feature (981)..(992): n is a, c, g, or t
  misc_feature (995)..(997): n is a, c, g, or t
  misc_feature (1002)..(1008): n is a, c, g, or t
  misc_feature (1010)..(1011): n is a, c, g, or t
  misc_feature (1013)..(1013): n is a, c, g, or t
  misc_feature (1015)..(1015): n is a, c, g, or t
  misc_feature (1018)..(1022): n is a, c, g, or t
  misc_feature (1026)..(1040): n is a, c, g, or t
  misc_feature (1043)..(1044): n is a, c, g, or t
  misc_feature (1046)..(1055): n is a, c, g, or t
  misc_feature (1058)..(1059): n is a, c, g, or t
  misc_feature (1063)..(1063): n is a, c, g, or t
  misc_feature (1069)..(1086): n is a, c, g, or t
  misc_feature (1091)..(1107): n is a, c, g, or t
  misc_feature (1110)..(1114): n is a, c, g, or t
  misc_feature (1120)..(1125): n is a, c, g, or t
  misc_feature (1127)..(1131): n is a, c, g, or t
  misc_feature (1138)..(1150): n is a, c, g, or t
  misc_feature (1153)..(1158): n is a, c, g, or t
  misc_feature (1160)..(1170): n is a, c, g, or t
  misc_feature (1173)..(1173): n is a, c, g, or t
  misc_feature (1176)..(1179): n is a, c, g, or t
  misc_feature (1182)..(1188): n is a, c, g, or t
  misc_feature (1190)..(1199): n is a, c, g, or t
  misc_feature (1208)..(1214): n is a, c, g, or t
  misc_feature (1216)..(1218): n is a, c, g, or t
  misc_feature (1220)..(1224): n is a, c, g, or t
  misc_feature (1228)..(1228): n is a, c, g, or t
  misc_feature (1230)..(1234): n is a, c, g, or t
  misc_feature (1236)..(1238): n is a, c, g, or t
  misc_feature (1241)..(1249): n is a, c, g, or t
  misc_feature (1251)..(1255): n is a, c, g, or t
  misc_feature (1257)..(1268): n is a, c, g, or t
  misc_feature (1270)..(1270): n is a, c, g, or t
  misc_feature (1272)..(1274): n is a, c, g, or t
  misc_feature (1282)..(1284): n is a, c, g, or t
  misc_feature (1287)..(1296): n is a, c, g, or t
  misc_feature (1299)..(1300): n is a, c, g, or t
  misc_feature (1304)..(1305): n is a, c, g, or t
  misc_feature (1311)..(1329): n is a, c, g, or t
  misc_feature (1331)..(1331): n is a, c, g, or t
  misc_feature (1334)..(1339): n is a, c, g, or t
  misc_feature (1349)..(1354): n is a, c, g, or t
  misc_feature (1360)..(1364): n is a, c, g, or t
  misc_feature (1367)..(1370): n is a, c, g, or t
  misc_feature (1372)..(1388): n is a, c, g, or t
  misc_feature (1390)..(1394): n is a, c, g, or t
  misc_feature (1396)..(1397): n is a, c, g, or t
catgctgccatgcaagacactagacgatgaggccggtgaggccgccaccaaggagaatttcgttgctatcgggactatccatacgaaggtgatcagactctggaattagaattttggaaaaaccttatggtccattatattttttgtctgagccatactggtgggttagatggaatctactaagacatgattttgactcagcatccaccaactaatttactaagaaatgggattcgtcattcgaggtgtttgtttttacttgtgtttcgatttaaaatggtatatctacgttgtttgtttgtttgttttatgtaccctatatagttactccctccatcctacaataggtgcacatcttagacctcacattttgagaagccagacattctcaactttgactagatttttagaaaaatagtattaatatttttatcttaaaatatatttactacacgcaatgtgactcacctaatgatgtctattcgatatcatatatattaatgttttttcatatacttaatcaaatatagaatccgtcgactcgaagtgcaagatatacacctattttaggacggatgaagtatccaacgagaaatttatagctctactctacatataaataaatcacatgcattctataatttgtccctaggtgaagttttaattgctacgggtggccaatgtacctgttgttgatcaattcttgtgcaaaggaaatcctaatttctaaacacatgttaaatggactggtatggttacttaatgactttagatactatattcttctttctcttttttttctctttagatattgatgctttgacctatattgatgtatttttgtctactaagttttagaacgtggatcgaagtgtctnnnnnnnngttannnnnnnnnnnnnnnnnnnnnnnnnnnnnnnnnnnnnnnnnnnnnnnnnnnnnnnnnnnnnnccnnnnnnncccnnnnnnnnnnnnnnnncnnnnnnnnnnnnccnnncctcnnnnnnncnntntntcnnnnntaannnnnnnnnnnnnnnctnntnnnnnnnnnnttnnaaanacaatnnnnnnnnnnnnnnnnnnatcannnnnnnnnnnnnnnnncannnnncccccnnnnnnannnnnccaatcnnnnnnnnnnnnnccnnnnnntnnnnnnnnnnntcnctnnnnctnnnnnnncnnnnnnnnnnttttctcannnnnnnannncnnnnncctncnnnnntnnnatnnnnnnnnnannnnnannnnnnnnnnnncnannntcccccannnttnnnnnnnnnntcnnctcnnttcatnnnnnnnnnnnnnnnnnnncnccnnnnnnacctcctatnnnnnnactccnnnnntcnnnncnnnnnnnnnnnnnnnnntnnnnncnnttccc

SEQ ID NO: 1449 - DNA, 410 bp, Zea mays
cgcttcatgcccatgccagatcactctgtcgcggagatgagagaagatcaggcggcggccatagatgatcatcgtcatcatgaagatggcgacagctggcggtcagcctcagccgcgaaaaagaggaggcgtctggatcatccgttggcaacggcggcggcgcttctgatctttgtgcagccagcaccaaaggccgctaccaatgttgcagcatgtgaatcacaaggaggagctgatcatgagacaaaggtaccgcacacgacaaccctaacaagccctagctctagttcccctcttcttctggatcaacgacatgaattggatctagagctaaggcttgggactacaccaaaagttacgtacatacatggcaacgatacacgaagctagctagctagttcgtctgcacg

SEQ ID NO: 1450 - DNA, 381 bp, Zea mays
cgctggcgacgcccgtctactacgccgacctcgcggcgtaccgtggcaggctctactacgaggcggccatgatgccgtcccaccagcgagggacggggtcggcttcttcttcttcggcgtcctcgggctcctccgctgggacttttggcgtcactaacttcccgaggctgcacaaggatgtggaggacaacatgttcttcatctgacaccagtatttttcttttgtgtgtacgcgtcttgccttttcttttgtgtggttatcagtttttataaaaagcttcagtacgctcgctgcagtgtgcaaagttcgtactggatatacgctgcatgactgtagatgaaggaaaagaagcaggtttgagttgtgaagaactgaagata

SEQ ID NO: 1451 - DNA, 272 bp, Zea mays
caatctttttagttaatagatggctaacaactatctctactactaattaagtacctattgtaggcgtccacaattcccagtggcgcacggttctgccgtctctccgccctcccgcgctccctccgtgctgcatcaaccgacaaagctaatttaaccaaacaattacaatagcagatttaaaaaaatctatatattaagtaggtgtaggtgactcacacagtttgattatttgctggactctgtaccatggtttgtagtttgtactacatccg

SEQ ID NO: 1452 - DNA, 329 bp, Zea mays
tcctctcatggtgtccagcctgtgggaaccgcccgagtgcgctgtgtactcgtcttccagccacatgcaaagatcgatcgggcggtaacttgaacctcgtcggagtttggaatttcaaccacgccactctgtgccttggatggttcagcttcgccttcatcgtcgtcaagccatggctgcgaagacgctatggtccgtgggatttacttgccggcgtcagagactgctgctagccgcactatgccatcgacccgcgatatcggaacccgatccctggtatgaactcacttccgctaatggtacgtgattagaggattctctagcacata

SEQ ID NO: 1453 - DNA, 349 bp, Zea mays
aatctgaggttagaggatcttctgacccaactaaatcaaacagctccctctgactacataatgaagttcgatcgactaggttagcaaacatagctcgtagaggaatcagcattctttgtccaccaaaagtctcggaaccagccaagaatattattgtagttggtgggtaacctaatgcttgaagtagaagtccagcctggaatcacaggattgtttacatcacagcattagcaataaaaatgaatcagtaagctggtatggtgaatcaggcatagtatcaagcagattatatcgtgcagctcaatgtgtgccacaagaccaaggaatggaaagaagagacgaagtcttt

SEQ ID NO: 1454 - DNA, 176 bp, Zea mays
tctccacggtgaggcttgagcgatccgagcaaaaaaaaaatcatccgcgacgcagcgacgcaggtttgttctctgatctctctggttcttcttttagcagcagggacgcacaacacaagaaaaggtccggttcaagaggctcttctgttgggtttttttagaatcctcaagagaag

SEQ ID NO: 1455 - DNA, 677 bp, Zea mays
  misc_feature (668)..(672): n is a, c, g, or t
cctcatccacatctacgtcaccccgataaagcgcttcctccaggcgctgtgggcggccggggcgctcggctccgtcgggacctacctcgtcgccgcccgcccgctggatgagggcctcgtgcagtacgtgctggaccaccccgccgcgctgtggttcgtcggccccacgttcgccgcgctcactggcctcgtcttcaaagaaggtatgcggatgctgctgctgctgctgcttgttcaaggaaggaagatgttggcagtaacattccacccacaggtctctgctatgggaaactggaagctggcatcttgacgtttcttatccctgggcttcttcttgggcatttggtaactcagaaaccaaccactagcatttatctcctcaaactgttggtatctgcttctgttgtcttacaatctttgtgcagtctggtttaatggataacagcacaaaggcaggtcttttaggactgtggatgcttcttttcacaatcttcgccgctagaaaattccagcagcccatcaaggtaaacaatctctccaaatgacagcttcctgattcgaacctgacctgacaatgtcaccaatcaggatgacgtcggagacaaatctgttttcatgttcaacgctctccctgaagaggaaaagaaggcttggatccagaaactcgnnnnncaaaa

SEQ ID NO: 1456 - DNA, 410 bp, Zea mays
tcgttaacaaggagaggagagaacgggtttcgtggaccgggccggtcttccactatgggcttgttaggacatacaaagacacagccgaaatttgctgttggtctcgagcaaggccacggcccacaggtctgcttgggtttgggtctaggaaaggaaaagaactactctcactaaaatgagagaaaggtgcggtaaaaaatgagagaaaggtgcggtaaaaaaaaccaaaaagagagaaagatgaaaaagaagacttcaaacgcactggcatagacgccacggcagtccagtggcaaccgcatcagtgcgtatttacggagcaaaacagatctccccgtcgacctggtacacagccgcagttggtatcaggacgtcgcacggcaggtcacgagtcttcagagttcagagag

SEQ ID NO: 1457 - DNA, 353 bp, Zea mays
  misc_feature (300)..(300): n is a, c, g, or t
  misc_feature (345)..(349): n is a, c, g, or t
atagggggaagagcttcaagattggttcactgcagatgttcatggacaacaatggaagcactgaagatatgggtcctcgatcttttcctgtcaaggaggttcataaaatagcagtactagatattaggttagctaatgctgatcgtcatgctgggaatattctagtgtgcaaggagagagaaggtggcaactacaagctgattccaattgatcatggttattgcttgccagagaaggtcattatttctctattacattatgtatttggttcatttggctgattaataactcatgttgtcntatgctatgcagtttgaagatgttacatttgagtggctctactgnnnnnaagc

SEQ ID NO: 1458 - DNA, 483 bp, Zea mays
tctcttctcatatttctcattcgccacatatgttttatatggaaatagtttagtagagttcatttagccgtgttgtctgctggtgcctgctggtttgggtacatggctcttcgtctacaggtacgttccctgtaatttagttttggtcctaagtttgtattatgatgtccttccatcaatatttttttaacttttgcagtgcctacttttcttgtgcaggtctacacatgtgcgagaagatttctgtgtcaaataagatgtctggttctgagatcaaaatagaacatgcgttgtccaattgttcgttcttaggggtttcactttcatccggtgtttgaaagggattctctgtaaatgcatgagctgttacggaattggcctttgtatccctcttcggcaacgtgtgaagttgatggcgatgagaacagcagtgcatcatgtaaatttgacaatgtcattcagggctaacaaacatctcgtgct

SEQ ID NO: 1459 - DNA, 364 bp, Zea mays
tgttgttaatgacagcggcacaccggcgaaaccaggggaagagattgatgtctacatattttcattgttcaatgagaacaggaaacctggcatcgagtcggagaggaactggggactgttttttcctgataagagctctatctacagccttgattggacgggccgaggcaatgtggatgttatgactggagcaaacattacaagtgctaatggtacctggtgtattgcttcaactaatgcatcagaaactgatctgcagaatgccctcaactgggcatgtggtccaggcaacgtagattgttctgccatacagccaagccaaccctgctaccagccggacactttaacttcccatgcttcatat

SEQ ID NO: 1460 - DNA, 343 bp, Zea mays
tggggaatgtatttgtgatgctctttagtttgatccaaatatgtactaattatgagtttgtgttgtgtagggaaattgtaatccaagtgaatatgttgattgggattcaatcgaagttgaagacaggtggaccgaggaaggaagacagaatgttactagtgaacaagcattgtatatccagctgggtttgcataatgaggatgtgtttgaatctgctcaaagggaagaagaatcagctcgtcatgttagatggagtaatagagactttttggatggtgaagcatcagctgccattccatgttctgattctgtggtagatgaggaacggattgtttatgacatg

SEQ ID NO: 1461 - DNA, 310 bp, Zea mays
ctgcgctagtgctctactgctctgctctttagggagagagagacgggagtgagagagcagagatggcagctgagagctagactgagcacgcacgtaacgtaacaagctcttctcccatctccgtctctctctctctctctccgctgctcacagaatcacacaggcaagagagagagagagcgcagaagatgatgtggtcgcacgagccggcagcggagcagaaggcggcggcctcggcgccgcctacccggcagcggagctccgtggccaagctgacgacggcctcctcgtccttggccaacctcctctc

SEQ ID NO: 1462 - DNA, 571 bp, Zea mays
tgtgtgcctagttcaggtatggtggctatttgcacttttgcagcctgagttcagatactgatgttttatgatactccagatattctgcaacggtccagggacgtgctttcctctatgcatctcggctttcgttctgaaggtagccctcacagtcacagcctagcttagcttctgtcattaaaaagaacagccagcctagcatctatgcttgcttacctgatgcagtatgccgtatgcggcttaagcccagatttcaagtcgatgccatgttttgcgctagtgcctaactggtttaggggttgctgtatttctgtaggtgcttggcttgggatggtcatccattttctacattgaaagcatcgcaagagtgaagaaactgtcattgagtggtttactgttgtacaagctacggatcgctgaccagttcttcgtgcagtggccccagctgcagcatgagtatcctcgagcgtgctatgcaggtcgtttgatgtgaaggcttggccaaatctggctctgtcatgcagtgttttccatctcagagattcagaatacggtggcaatctatgcacac

SEQ ID NO: 1463 - DNA, 533 bp, Zea mays
gatagtgactgtacaatcgctctgattttatcactgagtacaaggatgccaaattctttgtaataaagtcctacaccgaggaccatgtacataggagcattaagtataatgtttgggctagcacagccagcggaaacaggaagctggattctgcttaccgtgcggccagagagaaagaagagcattgccctattttcttgtttttctcggtaaggatagctcatctcctttagtttggttttctcttcaaggaaaaaaagaatagcagtatatatggatgtttgatcctttatcagcatgtgctaaggtgttttcagttttggtaatttcttttatgaataattgtaccttttataggttaatggaagtggccaattctgtggcgtggctgagatgattggacctgtcgatttcgacagaagtgttaattactggcagcaggataagtggagcggccagttcccagtgaagtggcacataattaaggatgtaccgaacaaccttctgcggcacatcattcttgagaacaatga

SEQ ID NO: 1464 - DNA, 558 bp, Zea mays
atcctacttacgggaccaggaaaggtaggtgcctcttcgcttggctacaagtgttgttttctcactgttcctgcagcacaactgtgttagcttaaaatttctgtgcactgtattcaggttggacaagctctgggcctatccactgactggtcgagccatcctctctacgcgcctggtatgcttgcttgagcttgactgaccttcaccacggcctgaaactgctgcgctggtttatccatttcacccaaacgatggatttgtttttcctccctccatctcaatctctcaggtgggttggaggtactggacgggccagagccggagagcgttttggttggtccccgcgttggcatcgagtacgcgtctcccgagcatgtcgcggcgccgtggaggttcgcgattgccggcacgccgtggatcagcgcccccaaaaacacgctacggccacgctactgaccggtgtctgagcaggaaccgttcgagtcccgttccaacccgaattgccatgtgtttgtatttgcttgacacttcggaatgctgcctataactggctcctgt

SEQ ID NO: 1465 - DNA, 343 bp, Zea mays
tccttttccttattcttctgatcactcacgtgtttcagtgaatatatgtgatttggttgacactactgctatgaaatatgtttaaatagtacatttgtggaaatcataatagcaatcaaggcctgttgtttaaaatctgactatcagcatggaaaccaatggggatgcagtttaagtcgaaatttggctatcgtcataatatagaacacatttgaccattttggatgcttgggcacaaggtttggactggttgtttttttacatttgattatgctttatgggaactatatccttatgctctgaaacacagatgcttgtaatgatggtgcttgcagcttctcac

SEQ ID NO: 1466 - DNA, 813 bp, Zea mays
aaattcctgtttttattatatatacttaaatacgaacatggttttaacttcaaaatgcataacagcataaggtaaatgattaatttaagatagtgcatatgcagagatggtcagaaaaaatattagatattgcaagtttgcaacttatgggtttgaaaatacaagtttgattaaacaatgtacgatggacaaaattattctgttgcactatgaccagatatgattgctggatatacatattgcatatcaagcatgaaagatgaggtctagctgtgtagcatctaattagtgatctactcttagtttgatagcagtatgtttaaattatatgtattggaagtacaacagtttacctttgttaataagcttgtctaggaattgcctatttttacttacagccttcacgagtttgtcttgatcaacatatagatgatggtctctaaatgacacaagttttatgtttctttttttggtatgtaactcactttagaccaatctccttgatatttatcgacttttaggtaatgaatgaaggcccgggtcacatcccaatgcataaaattcctgaaaacatggagaaacagttggagtggtgtaatgaagcgcctttctatacattgggtcctttgacaactgatattgcacctggttatgatcacatcacttcagccattggtgctgccaacattggagctcttggcactgcacttctttgctatgtaacaccaaaggagcaccttgggttgcccaatcgtgatgatgtcaagactggtgtaatatcctacaaaatttctgctcatgctgctgatttgg

SEQ ID NO: 1467 - DNA, 297 bp, Zea mays
tcactcgcccttgttaaaggattcattgtccaattgcggtagctcgcgcggcaagattcggtttttgagtcggtgcgcgacggtagtggtccagattgctgagcccggctcgacgttctggcctgagacctaattcggtggcattgtggtgtggtgatggagcaggggaggaatcaacagcacccgcagcagttgtcgagtccgcctgttttggccgccgcgagcgagataaaggcccctgcggtgccttcgcaacagcccaagccggcggcccccgtgatgtcggtgcctagacag

SEQ ID NO: 1468 - DNA, 328 bp, Zea mays
atccgaaggccacggctccggagcctcatcagcggcagtccgtcgccgtgacgtcgccaccgcggccggtggcggggcttggagacgtgaagcgcctcgcttcgcggcgttggccagagaccatggcgcgggagacggtttgaatgtcctccccgtgcttcgtgactcgtgaggcacacgggcacggcggcagacttgtacgacgtccacggacaacggttgccgatgcagcgccagggaaactcctcggacctgctcctgaccgttctagtgttggagtcctgtggctgtggtgtgtgtgcatgtgtcacttttttttctgtttgtt

SEQ ID NO: 1469 - DNA, 345 bp, Zea mays
aatgaggttgatgagggctctgaaggctccagctctgctgagtctgatgaactgaagcctaacaagagaggtgcctatggtaagcctgggcttgcagcaccaatgcctgtgcacatggaatcgaggccggttgctggtgaaaggagatgacttgtcatcggcatcatgccatgccatttcaggtttataatcttgtggtttgtcatcttgctgctacatttccactgatgtttcatgatggaagtttttttcccctcaaattgtagaagatgtacaactgtggactctagaactagggcagttgtatattcagacgacctctcgggtaattgcactttgttgcag

SEQ ID NO: 1470 - DNA, 878 bp, Zea mays
tcctgatgctcagaatattcagttcgtgctcaacccaagtgctattcagcagtagcttcaacatttattgcctacactatcagtgatttgggggcaagtcgcttttcaagcaggggggaatccggaatgtcagcagaagatacgcacaagtggcggccagggagctcaagagatggccgagaagacagcaacaaatggagaagcctgtcagcaagcgatgaacttcagcgataagtgaggcacggcaacgcggcttgagtgggccaaatgggctgtgtaatagatgttgggctgggcctcgtacgctaaatgatataagcgtcactgaggaaatagtaggggtatggaaaatcatcagaatacgaaaccaattatcgctttcctccgctctcccgttctcttcttccccaaagcttcttctctactctctcgacctattatctctctctagaagcatccgtgatgctaacaagcgtgttccctgcacggtcggttctgtatgctggaactgctcaccgaaggagtccctgttcatcgcatccgaggcattatcatcctgtgcctctccagttgtcagcctcagcgctgtgcttgaccccagcagctcctctagcggctcgtagccgatctctatgttgctgtggctcgaaggctgctcggcgaaatgtctaacaaggaattaaagcgtgttcgaccatggcgtctcgcctgtcctcgttgttgaaccctcgcgctcgcctcacctcgcctctatctacggtgtcgcgtcgtctgcctctcctggtgtgggtgttgacgttctcggctgtcccaccatgtcgggctcctcgctgctcacgctctgtttcctccacactcgacagtgcccatggaaggtc

SEQ ID NO: 1471 - DNA, 385 bp, Zea mays
aatgcaaacaatgtcatttctgccaagcagtctgatgcagccaatcatgaagcccacagcaaccaaggttatctcgagggcttcaaaagatgttcatcagctggattcagggcatacatatttgttgccctttttgtggttggagttgctgctctagtgctgcattatcaccgctccaatgccaacctatgaatttgaatcatggaacatcagcatgcttgattgtagctctagtggtcagtggcagcattggcttcgtccttggagtagttcgctagcgttgcttgcattggaaatggaatagaaatcgagttcctcagcttatctcactgggattactggaaatacatttttgcgaccactgattcccagttatctccacttg

SEQ ID NO: 1472 - DNA, 351 bp, Zea mays
ctctaaatccatttcaggtgttccgatggaatagtgaagaccacctttgtctcgacaacacatgcgaaggcgaagctaagggctttggcttcatggtctgggcgcgaagtgatgaacggcctaaggcgaaggaagaacccggaagcttgataagcgttgctatgaaggaaggaagacgatggtgcccttagaaaatcttgtagtttatatgtatagtaactgaggacatatttgtaattttatacaaaatgtactccgactcatcactaaaaatagaggtacagtgtcatgcagagagagaggcggtcagaggggaaaatgagagtgatccgcctccgaagctatattatt

SEQ ID NO: 1473 - DNA, 527 bp, Zea mays
gcgcttcaacttcagagtaatatcttcggaggattgcttaacaaccccagcaaggctaaattcgcatgacaatgacacacttaaaattctatatcaacataaggtagcatcagctcatagtgcagcagttaaaggtttgtcgccattaaaaccaatgtagttcatattttcccattctttcagtctgttttgttggagttatgcaagcatatgcatgttttccactaggaatctggacagacggcacttggtcgttctctactggccttgatcagagagtaagatgctggaagatgggattagccggccaattcacggaatactcccatgctatcattagcgtgcccgagcctgaaactctagatgttttccatgaccggtgagcaagtctttggcgatgtgtgtttacccccctttttttatgtttctgatagtggcgatgcttgccttgctagggcaaagaggaagtaccacattgctgttgctggaaggggtatgcaaatggtcgagttctcaccacctgaaga

SEQ ID NO: 1474 - DNA, 357 bp, Zea mays
ctccttggcctctttgcttttcttagcataggggaaagtaagtatggtcttgttatagttgatgattattctcaaattacttgtgtattctttctgcatgataaaagacacccaagagacgttacaacggttcttaaaaccatcgtcccctccccctcactcatgccgccgctgtcggctcctcccccataaaaaccatcgtcccctccccctcccttgtgtcgtagctagtccctccctctctctaggaccatagtgttagcatatgcaataagctagtggaggagttaatcgctcatcatgatgtataggtgggctagttttgccacttgagtaggttaatggaggagttaatcg

SEQ ID NO: 1475 - DNA, 1007 bp, Zea mays
  misc_feature (911)..(911): n is a, c, g, or t
  misc_feature (983)..(997): n is a, c, g, or t
tgccggagggctgctgacgaagatgcggaagctggtgaagggcctcgccaggcccgagcccaggtggctcagggccatggaagagtcagtgctctctctctcttttccggtcccttgctgctgtgtgtttggattctgtgaatatagctctacgagaaaaccgcataggtttgattgctcatccatggacaatagatctataatatttttcttagtgatgtataacatggttctgtgttgaaacccctgtcaactgttctctaagtaggaccctgagccctaccgagaaatttggaatagtgccattatcaaacttagactgtaagatcttcgctagttcaccattctcacacgctgtttacagacaaaatgccattcgatacatcaacagagaaaagatcacctgcttggtcttttttgccccttttcgaaatcagaacgtagctgacaccgttcgtggagatctcccattcacttgacggctcgagcctgcgtcgagtctgccgctcctcttccaccgccgccgctcctcccgttccatctgcgttcgatctgctcctcctcccccgcctccgctcgctattcctccatcaccgtcattctgctcagtgtttggttgcatatatagatgtcatttcgtttggttcagttgtgctgcatttgtatcgtcgtatgtataaaccgaagatgcctggtgtgtctatgtatgcttatactaaataatttgtttaatagtgtcatgtcatttgtcttccgtaacaattgttctccatgctgctttctggcttactgaaacaagcgcgcttgtgcattagggcagcaccagtgacatttcctcgcatgatgggaagattaaggggtgtttgtttgggattataatctgtccagattatatagtccaacaacttgancaccccctaagaagatcgagtttctgatgatgtgtatgttaggaagctaaacaaaaagaacatccggattcnnnnnnnnnnnnnnnaatcaagtaa

SEQ ID NO: 1476 - DNA, 263 bp, Zea mays
tccaaatagacaagctcacacgtcttgtcatcttcaactcggatttaataagccagagacgtcaccattagcggccgtcaccgcagacattttcaggtgagttcttacttcttagcctcgaagttcctcttcccatcgtttgttcatcttgtccccggcgcccatgaagggtagcagctccgcgtggcgtatcagggcatcccgggcgcctacagctatgccaaggactacccgctgcgacgctatcccctgcgatccatttg

SEQ ID NO: 1477 - DNA, 752 bp, Zea mays
  misc_feature (631)..(635): n is a, c, g, or t
  misc_feature (637)..(645): n is a, c, g, or t
  misc_feature (650)..(668): n is a, c, g, or t
  misc_feature (674)..(700): n is a, c, g, or t
  misc_feature (702)..(708): n is a, c, g, or t
  misc_feature (712)..(712): n is a, c, g, or t
  misc_feature (714)..(729): n is a, c, g, or t
  misc_feature (739)..(740): n is a, c, g, or t
  misc_feature (744)..(744): n is a, c, g, or t
actctagtgaccgagggccaatcggcaccacctgggtcttctcgtggcctgtcaccgacgggcccgccggcgccgacgcgaacgtcgtcggccatcttcagggcaccggcgttcaagtcgccacttaccccgactacatgtggcactactcccttgggctggtgttcggccagggaagcaggtcagtccccgcgaggtcgttcggaaattgtagattttaaatatttaaaaactaagaagtcagaatagaaaatatttaaattcatcttcatccaacgtcatatgaaaatttttagattattctttataatgcaactgtttttagaggtaggtaggcctattgcaacttgtaattgtttttttataggtggacgaccccttagaatacccgcctacctttgttaatttaatcaactaacaaaggcagttgtttgtttttgttcacgacacaggttcaatgggtccacactacaaatacaagggacttccaaaataaatggcgagtggagcattgttggagggacaggagaacttgctatggcaaagggcacggtcagacgcacagaagtttcgtatacgggaaatataaggatttcagaactcaatatacatgtgctttacactccaatgnnnnntnnnnnnnnncccannnnnnnnnnnnnnnnnnnctcccnnnnnnnnnnnnnnnnnnnnnnnnnnncnnnnnnncccncnnnnnnnnnnnnnnnnccccccttcnncccnccctcccc

SEQ ID NO: 1478 - DNA, 351 bp, Zea mays
tgctcctcccgaccgccaccatcctggccttcgccatcttcgcccctctcctgaccgacgacggcaagtgcagcacccggttgaaccgcatcctgacggcggccttcgtggccctctgcgccgcgtcctgcgtcttcttcacgctcaccgacagcttccgctccgcctcgggccggctccggtacggcgtggcgacgccggcgggcatccgcacgttctgcggcggccaccggaggaggaggaaggggccgagggagccggagctgtacaggctgcggtggtcggacctgttccacagcgcgctggcgctggtggcgttcgtgacgttcgccgcgtcgcaccacgacatgg

SEQ ID NO: 1479 - DNA, 418 bp, Zea mays
tctccggcgacgactggcgacagccgctgccggcctactccaggtccccaggtctacgtcggacccttcgccgcggcgagcaccaccaggtaacgtaacccttattctctccctgctgtgcgaaaccgagcacccaaaccctaatttaagctatttgtattcggatctgatctaattactacaagtggatatgtattatgcctactaactttgattttttggggaaaaatatcgggtgtacagagatctgtcactgattttgcagtcctcttgtcagatggcgagcacggggcggtcgatgctgctgtcactgctcctcttcgcagtgacgctgtcgctgctggagatgtacagggccaagttcgcctcgtcggagctcatgaccatcgccggtggattcgtctgctccctcctattc

SEQ ID NO: 1480 - DNA, 496 bp, Zea mays
cctctcgagcatcaaattgcacttgaatgaactgaagaactacacgtacgggaagcacatcgtagcacgtgtggagaagctaatcgttacaggaggtaagcagacggcaagtaatctgtatgtggcgatgcataataatccggcgcacttttcctgagccaaaacacctgttggtttctgattttcagagaatcgagcaaggatggcgtccatgagtggccagcatcagcagcagcaacctaacaactgtacagctgtagacgaacactagtcctgtgtatgcgttggcgtcaaatacggactgcacactaatcccttgttaggcattggcgtcagatacgacgagcaggtggtataagtgactccggaggaatctggtttttaatacatggtttatttaatagggtacttgcagataaccagggatttatgttacctgtatctaaccaggcgtggtgtttttcgggaactcaggttgttagatgagagcagctgt

SEQ ID NO: 1481 - DNA, 754 bp, Zea mays
cggtggtctcgcttccggccttccgcgcctgtcgcgcgtcgaccgcttcttggacaaccgcgtcatgggttgcatgtgctcatcggaagcgtcgtggctggacaaactgtcggtaaggaaccacctcggattcaccttctctcgcttcgttgtcgatgcacgcatgggacgggacggggtaggagcagtggcctgctcggcgtatcatgtagtgccgtgtcagcctagtatcgagcctggctgggcgcaagggcacgggcacactgtgttggggggacgactgctagcatttcttgccgccgttgtggaccatgggaccttcggggcgcgccgtcggcttggatagaggtaggagaaagatggctagctgttgatctggtgttggacgagtaagattagaaccctgcgtaaccctttgctctattagattcagaccgtccaatttagatcctacggcccgcatggcgtaacggttcgattggagtctaatataatctggtgcgtctgtagcagatcggacggatcgagatgaatctgagtatttagaatctaggcggtcgcatctggatcctacggctggattgacactgagtacctggcgtgatccgcagccgtccaatcctaatccgatggatggggtcacccgataccccttcgcggatacattttgttaaagagccctggaaaatctgttaataaacccgccgtccttgagggagtagcttgagtgtggtagggttttgcaaatttaacc

SEQ ID NO: 1482 - DNA, 430 bp, Zea mays
  misc_feature (422)..(427): n is a, c, g, or t
gctctccatcttctgtgtgcttcattattccggttgcctctgagtcggtccatggcgtcagcactaatgtccacctgatgttccattcttaattcatctgcgtgtatggcattggcaagagcacgggatcaccagaagcttgtgtgtgccgttctcctcatcttcgccctgcagatcccgttgctgctcagttcctgttccgcgcacgccattgctgtcgtcgaccctgcgacggccgggcggcgtcttctatccgtgcgcacggtacaggcggcgcagtccgtggaggcgaaggagacggtggtgcggcatccacggagcatggagagaagagcaagaagcaacagcagcggctcggcgccattcatgaacgcagtgagcaaacatcaggtgccgagcggagccaacccggactcaaactnnnnnnagc

SEQ ID NO: 1483 - DNA, 768 bp, Zea mays
  misc_feature (381)..(383): n is a, c, g, or t
  misc_feature (765)..(765): n is a, c, g, or t
tccctgcccctcttcttccttctctcttgcctgcttatcggccatgctctctgcagccaagcccacaatggcagaacatcaggtattcaggcccttcccctccttacacacaaaccctgacttgtttatttcctctttccttgcacgagactagtcccttctttcttttggcccttgctttttgtttgctttcactgcttattcactcatttcaatctaatttgagttgaagatgctgactatgtggtgcaatttcctcaccaagaattgactactaagcatataattttgccgaaggtcatcaaggtacctctctatctctctctctcaactgtagctaagtagtgttctgcagggttctcaagattcaaaggcttgcgnnncttttttattcttttacacatgtatgcaacgaaaacattagaaggagaaaatgccaaccacttgcctccaagattactcctgtaatatcactagaagaaccttagaatagaaacaaggaatggaactaatgtttttttttaaaaaaaaaagtgcaataaaaccttgtattaagttaacccacaaagtgctcagtgaccttaaagcaagtatagttagcgtgatattttcacgtgccttgatattagggtctaaacaagggcatactgtcaaagtatgcaaggagaatgttgatcggctcaattgctccaatatgtacatacaacgagtgcagggggtgtcgattcaagtgtactgctgagcaagtcccagtggatgcaaatnacc

SEQ ID NO: 1484 - DNA, 348 bp, Zea mays
atcacatatatctaatacatctatagaagggtcggctgatacctctcaagcaagtgtagcttcagatagcacagatggcaggccagtgaagtacaagctggtagccgatttgctatggcggttgagcaaaaaaatttatacagatgaagaagcacttctcacagagatagaagaaccaacaagctactgtgaagcctcatactatcggaagaacagaaagctgatatcctaacaaagtcattaccagcagcgaagctggctatgaagctgcacttgataggtgttcatgatttgggaccacacctagattggggaggagattgttagagttaggtcccgtttaaatct

SEQ ID NO: 1485 - DNA, 873 bp, Zea mays
atagcttagcggactctaatctgaacaacggcctccagcccgggcgctgcgaggtgttcttggagccgcagtccgaggagatcaggctgttccggctgagggagttcggcagccgggacggtagcgaggagctgagccaggcgagctggaggagccggagagacctgtgaacagacacactcggtacaaggtcattaacattctttttttttggggggccattctttacatgtaattatctcgtttacatgattctttcttccttcttacttttcgtttgttactttactcctccctgaggcaattcttgttcctggtggaatagattttgcattttcgttcgggagataagtaaatgaatcctctgtcttgttttttctttctctccagtgaatagtacacagaaagtttggttcctggcattctttctctgataagcactccagtgaacaatcttgatatgcttcgtcgctgcttttggagcaggacagttgctgaacttgcactgcaagtctctatacaaggattagggcagcaggtgcaggtcactgtacgcttaagtgacaactatactatactatacatacaggcgctgcgttggacgggcacaagtacaatgattagcgggtgctaatttgtattcgcggattgcatgcatgcatgaatgcatcctacgcgcaattattcctgccctccgttttgtcaaaaggctgggcgggcgcatatcattgagatttgcatagatccctcgcgcgtcggtcggtcggtcaggatcggtggatcgccttgacgcggcggcaataattcggagccggcagccacatgatggagagccggtggcggatggcaatgtcttaccaagaaatacgcgta

SEQ ID NO: 1486 - DNA, 370 bp, Zea mays
ctcttgccaacaggaaggaatcggaatgtgtttggctccaaaaattcattgatatcaagctggaagcatgattggaggtgacatagattgcagctacctttacatctcaagtaaaattccagttacccctttttgagcctgtaaagttaattttccacaaggaaagatctgacgaacatcagaattgggatggctgtagattggaacattgaatgggccttgctcctgctgctatgctcgctattgtatctcttttatgagctaatggagtagcagtgaatgtgtgccttcaacttcactgttttctctccacagtcattgactctgatgttactgctgtaaaacaagtaggactaaggcatagtttcag

SEQ ID NO: 1487 - DNA, 509 bp, Zea mays
ccacataaccacacgggcgcaagggaaggaagcttgagaaggcaagggggaggaggaaaacctctgcttccacctcggaagagaagcaacgaaacaacgaagagatgaaagagaatagcatcaaagaggggtgactgggtgagtgcaacatatatatatatatggccgtattttttgtattttaaccttttattaaaaaatgctcacgtttagacctctaaataacttaattttgtttttggatcttttgctcggtgtcaaaggctgtggcaccgaggtaacacggctcggcgtcatagatcttggcgttgaggtgcgtccttcgctggcaacaacagactgacgtggcgtcgacgtggccgagctcaagtcatgattcatggcactgaggtccagtcaaaatcggcacctgggcatgcatgttacgacgttacgtatgtagcgagcatgcatttggacttttggagcctcgtcgttttcgtactctagccatgcacctactaatgttg

SEQ ID NO: 1488 - DNA, 409 bp, Zea mays
catccgagctgtggcaatggtgatccatcgtccttcgcgcttccccggtgaagtcggctgagccgtcctcgctctctctgttgtgtggtcgtgcgtctacccccgcagcccctccctacaatgccccttcacggccatggttgaccgaaccgccagcctcggcacgacggcacagccggcctgctgcccggtgcaatggccagggcagagcccctgcgcgccgaacccaacgtgcccaatcgccaccgtaagccccgctcgccggcgagcccacccagccgtgccctgcctcccatgcgacccccgtgctttgcaaccactcgttccgtcaaaggtgtaggagagaggaaaatatgtgttcgtgagttgaagaagccagaaaagtgaaccgttagtctattcccatgat

SEQ ID NO: 1489 - DNA, 668 bp, Zea mays
ttaaggtctgttctttcatacttgatatatatgctagacaccatagtcatgttttgttcatgttgttatagagagttgctacttgtgtatacctctaactactcatgcagctgactctagactttgatctgcatctagagggcttcacttatgtgcattgacctgacagatttccaaactatgtcaccttctgaaagttggagaagaatgcttgcaactaacaaatttaactcgcctcactcctcacttgtttatctacggctctaggtttaggtgcggcaatggcggtggtgatccactccctttgcaatcatcgagagaccgggaccgacaagttcatggctgttgggggccttcctcttccgaaggtcctcaaaggtacgactaaccttttgtttttagtatattattaaatattacaggagcttcgtcataagaaaaacttcgtcatgaatatctttttccccgccgaaggtcctcgatacgaagacattgtttgaaaacgataacaacgaatgccgaagctacaactgaaggataacagcttcaacttaggatagcaacgaaggtcaagcataatgccgagccgaagaagaaaagactagttgatccctggtgatttatgttacgattatgtgtatatattaaggtcataaatgtattgttat

SEQ ID NO: 1490 - DNA, 262 bp, Zea mays
ggagagagcatgtaaaagacagaatttgcagcaagaggattggagcccataacagtttgtttagtggtattctgctgctggcacacatgcatgcctttgtggtgccgcaaagtgacaaattcatttaagtgaacggctgtccagtagcattcactgacaacgactgttcgtttagcatccaacagtgctagctacatgcatgttgtagttctctgctgttgctgcgatttttaactgaatctaagctctggaatagtagaat

SEQ ID NO: 1491 - DNA, 388 bp, Zea mays
gttttgatctgcagcgctcaaagtccgctgtcgtcgtctcaatcctcgtagagtcgaagtcatagaagaatcaaacagcgcgccggtcctctctcggatctaggcgaggcgagctgcggcgccggggggtcgcgggagggacgaggatgaactggatcgggcgcaagatccacctctacaatgtcaccatcggcctctacatgctcgattggtgggagcgctacctcttcagtatccttctcccgattgcttctctggcggtcgtgccccctatcctcctgaaatcagttggttaattcagcgccgggctcagtcccgttgtcttttttttactggttttgctttgctagatctgagcaagctgtgaggattgggatgtatcgaatct

SEQ ID NO: 1492 - DNA, 355 bp, Zea mays
atgcgatgctcgttttgttcgtccgcggaaaggtatatatccgttgcttagcgggggtgtgtgtcgttgaatttggctcgtttttttggtgtgtcacggcagcttgcccggccggtgttctcaaagcgggggaaaaaaaaacggaatcgtatccatgcttatcgcgtatcggagtcctgtattattgtcctcctcttttggaaacagaaaaataaaaagagtaagaatagcttcgggaatgcttgagccacggcagctcaggtctacagctcttcacccaaggtgagtaacaggaagaacaactgtttgtttaagcaaaatgaatagatatcatcaccaagcgcctgtagctcag

SEQ ID NO: 1493 - DNA, 370 bp, Zea mays
agtttgtggactctattcgtccaactgttgcaattgttagaggatcttttgctaaggaagagagtttaccaaagctgcctcacagacgaaccccaaaccgtaaggtcaaaaggaaaagattggaaggcgaaacaactacaacggaaactacagagaaagacgttgtcgcgaatgactccccccctgtatgttctgcatcgggtattacaaggaattccgataatatgaagccgccaaagctggagtccaagtgcaactgtataattatgtgagtaactcggtcacatccaagattgaaattcctacatgcttggttaaccccgtcatcagcagcgatggagttcaacacagtggatcttccgctagatta

SEQ ID NO: 1494 - DNA, 432 bp, Zea mays
tcgattcttgccaccattccataaaacccccttcacaagaatgaggggccaaatgttgaaggttcacttgaagaaacagcttgaactaaaattctctagcaaaaacacaacccaacagcatatggttcaaggtttcatgatcctgatcacataatgaacacctctcaagatgatccaaacctcttctttgcaacctatcagctgcccaaacattcttacgagcgaccagccacgtgaaaaacttagatttcggaggagctaagtcttccatattctgtaaaatggctcaaactcaattgacccaataaagaaacccctataaccttcctttgaagaaagttttacattgacagcttggcgaaagaaatgcttgtcttcaacatgaggtcttagctgaaccaaatcaattaaatcccacaggagaagatactc

SEQ ID NO: 1495 - DNA, 517 bp, Zea mays
caggccccaggctcagcggcaacgtttgcatgcctttcgcctccgggctccggcgctcgcgcaggcagccgttcctgcacccgacgagccacggccaccgggcgcgaagaaacaggtaagcgtgctggagacgctgggtacatttctctcatcttatcttggacaaaatgctgccttttgcacgcgccagtccatggatgtgcagaagttattgttgattttcttttctgacagctatcgggctcgaaaatctaccgtcaccagctgggctgaaatatccagtcaaacaaagcgcgctggcgatctccagagcttccttctctggtctgccaacaagcaacggccgttctccgaaaaccgccagttgacctgaccaccagccacccccccaccccctcttctgcggcaactgcaacagatctacagcaggtcgggcgtgtcagagcctctctgtctctgcgctttgggcggccaggaatccagcgagaactgcatgcactctgctctgcatctgcat

SEQ ID NO: 1496 - DNA, 547 bp, Zea mays
tcttgctgctgcattgattgctggttcatcagcaaagccgccgccgccgacgattggtactacaagcagtgctagtgccaaaggtaactcgagcacgcccggaactcccaatctcccatcacgtggtttttaaaacaaggtaaggtaaggtaaggtgctattgctgtggatgcgtgacaggaatggacccttgcgtctacgacatgatgaagaatctgcgggcggcaaaggccgcgcaggcgtcgggagtgacggtgaagactgagcccagcagcgatacgccgtcgtcctgcaaaaagaggaaggtggtggaggatgccacgaaacaggatccgccgcgccccgagccaccgcattattcccctccgggcttcttctccgcgcacaagtcaccgaaggttacccgtgagcctgacggcggcgccacctccgactgggagcgggcgcggcggatgctacagagcatcgtcacgccggcgctagagcagacgttctcggtggcgaagccctccgacgtcatcgcctcgagctacacgacagcgctaca

SEQ ID NO: 1497 - DNA, 494 bp, Zea mays
gatgatggcagtgttgttgctccctcccctgcactgcctcttccctggctcctccgatcccccaccgttgcccatccatcatctccctctcgctctcgtttatgctgttgcctgcattctttttcacagtaggcatgcagtactacttttggttctctttgcaatatatatacctgcaggtttgctaatcaagcctaagaatcttccgcctggagtggactgtactttcaggaaaatcgttctaaaatatccggtctgcatcttcggggaggacgagtgggcggcatcacgtcgcgacgagccgacgatgcctcggtactccaagaaacaggatcccatcgatcggtgctcaagctcgccagcaaccaaagaaaagatgcctccaagaaaaataatttccagctttcccaattcaacacatgtggattagcacaaactctcttgtttagctttgatttagatctagttcctctgaattggttccacctaactct

SEQ ID NO: 1498 - DNA, 715 bp, Zea mays
  misc_feature (687)..(689): n is a, c, g, or t
  misc_feature (699)..(705): n is a, c, g, or t
tgctgggaatcggccgatgggaatgttcaccaaaactggttggaaaaatcttagaactaagcatgaagaaaaaacaggccagaagctaaccaaaaaacaattaaagaataagttggacaatatgaaaaaggaatatacatggttcatggagttcaagaattatgccactgggcttggacaatatgaaaaaggaatatacatgacacacggatcctcaatcacgcgttagcaaattttccttcttttcccttgcctcctaaaggtatgcataattctttactatgtaaccaatacttgttttattatttttctttgctgatttcattttacaggaaaatattatcttgtggattccggttatccaaaccgaacaggatatcttgccccttttaaaggaagtgcataccatataccagaatttcagcttcgttctgggcgtcctcctcaggggaagtacgagatgttcaatttcttgcattcatccctacggaatgtcattgagcggtcttttggagtcttgaagcagaagtggcgtattttgaagggcatacctagtttctctactcgtactcagaagcatattattattgcttgtatggcgttgcataattttattcgtgatagcaatttgcatgatagggagttcgatagatgtgatgctgatgaggagtacctactagaacagannnatgccacaannnnnnnacaaggagat

SEQ ID NO: 1499 - DNA, 353 bp, Zea mays
  misc_feature (342)..(348): n is a, c, g, or t
ctatggcaaccacgaccataccaaccaaaacagaaaggaccgctctcaccttccgcgaatcgtctcgcgccgagatgcgattcgaaggcgccgacgtcggcagaggatggatgagaccgtggggtgccggtgtaacgggtcgcgacgacgtcgacatcaaagtccgagtaaggcggcagcggcggcggcgcaccgtcgccgcctgggaaggctccacggtagtacgggttgtaagggtccgacatcgtcggctcctcggcggctagggtttcagcacgcggtaagctggggaggaagcttaacggaccggcatgcgtagtgatggcggtgggtacgaacatnnnnnnntaacc

SEQ ID NO: 1500 - DNA, 384 bp, Zea mays
ttgccgtcctgttgcggcagagggcgctctcgtcgccccacgcggtctcatgccgaaatggttcgtactgccttgagcggttggatccttgggcgttgcgtatgatagctggttggtttgtttgttcttttggttggggtcgggtgccatgtgttcggtagaatgccaaaaccaagcgcgcctactgcagacattaccgaacagtggtggtatagtctctattcgcaggttatcagtagcataactatgttgtgtttcatatctgattgcataaatgagcagttggaaaaggcgatacttttcctgctgggttgtgattgttgttttcttttctcttttgatgaatataccatagctctggagaaatttataatactaggaaca

SEQ ID NO: 1501 - DNA, 486 bp, Zea mays
cagcgcgacgtcatctccgtccgcctggggaagacgatcaggtaggcagcagcaggatttcggtttttaacttgttggcgtgatctgttgtgaattcaacgcgaatgggtagcagaaagcaggagaagggctggacgacgcgcgtcgggggcgaccgccacctgatgtgcatcgaggatccgttcgagaccggccatgacctcggccgcgtcgtcgacaggcagaccatctggatcatcagggaggagatggagcgagccgccaccgtgctgcagaacgacgacgacccctgcgcgactctcttcgagccctatggttatgacttatgagaaatgactgactgattgatcgatcgatcgatcggggctctagtgctggctgctgcagaaacgaggctctagtgtttgttgatagctcagatgacagttctctggacagtgtgacgatattaataaaattccggagacagaagaaacgatatgggaa

SEQ ID NO: 1502 - DNA, 1016 bp, Zea mays
gcatcgccaggtacctcctctgcctcccccaatttctgttgatgatcagcgtccttccagtgtagaaaggggaactgaacctaattataacccaggccagaattttagtacgttgtccaatgtcccattgattcaagaaccactaaggtcaacccaatcacaaaggccaacccatggggtagcaagtgtagagcctatccaggatggctgcgatttaatcatagaacaacgctgtaatcaacataatcaggatggtcccacttccttcgcagtacatatcaatgaaccactcctagtcggtcagccatccgcgcacaagcagggggactgctctgatgcgcagcttcaagaatttgttgcacatattgctttaccaaaagatcaaccgctaatccattcacctcctattgataccccagacagttttagtgcattattggggcaatccactgaatctgctgctgttttgtctaatcagactactaccttcaaaaagagatccagtattagactagctgccaagaaaaagactatgatggggcgttccagggatgccatatccaaagcccaggacatcctgatagctaagctcaataatactgcaacaaatcagaaacaaaaccaaaactctattgcttcatgttcctctaaccaagataattcttttgaacagattgctcgccttttctcaaggccgctaaccaaagagcagatggaggcaatcatggaattggtcaaccaaggggtagagaagacagggcataagaggaggggacgcaaggtgactcccattgcttccccaaccatcagggctgtgggggatgcctgagatctcttcgcggtggcagtttttattcttatgatgcatgtgatctgctgctcctggttccctcagtggagtgttttagttctgtctgtagctgttccatttgaagtggcgtggtcttggctgtattggcctgggcgtcctgtgcttttgtgtcggctgtcctccattctgttgtgtggggagagct

SEQ ID NO: 1503 - DNA, 1326 bp, Zea mays
tgcaccataactgtgtttccacatcagaggaaataagcgactcaaatcactatgctcccccatggtaagcccattaccgccatgagttccgttctctgaatatgctgcagctttactttaatctctgttatatactgcatgcactaaaagctggcgtaggaaacaggagtatgctacaactcactccgtctatctgatccccaatcacaacaactcgcaccttgttcctgctagtgtaaattgtaatgaggaaacaactatcatgacttcatgagccctttgtgttgttttctcttccaaaaaaggaagaagcaacggcggtgagcgaaaatgtcgtggagacgagaaagcaggagcagtgaaaaccgagagcagaaaagctaaaccctaacgcgggcaacacctttttataggtcacagccccaaaaatataaaataagggaaaagtaacatcaatcaaccgtcatttccacaacagtcagtttttcatgtccccagaaaacactcaactgatgatcgagatcagcgttcggaccatcccctagactttggttcccacctgtcagaacccaacatgcagttatgttgtatcgcggtttgcggagtagattaacattatttttgtccaggaactacaatcccaaggatgggcggagcggtaaacccataaccaaagaggaggccatgaaagaactaattgaagtcgtaagtaaatatgtgcatgatggcacacatagaagcattgtaccggtgttaccgccttggagtcatatatttttctgcagcatcatcttgtatttggttggaaccaggtcacgaagacaaagccggacaacttcactcctcgcatagtagagaaaaaagatgattatatccgagttgaatatgagagtcctatatttggggtaggcggcggcgggtagcaccttgttttcctttttgtgggcgttactagatgtgcgtaaatgtggtggccatttgatatcatttgtcgatgctgaagtttgtagatgatgtggagttctggttccctcctggcaacaagaccatggttcagtatcggtcggcgtctcgatcaggatttatcgatttcaatgccaacaagaagagagtaaaggtatgcgtgcttgtatcttggtaccggtttagctctgtatactagtggatgacactcgtgattggtttcgtgtgcgtcttaggagctgagattggctttggaaaagaagggctgggcttcagaaagcaacttctgaattgaagtgagaagggtggaagaggtgcaggtgcatgctactcagacgagccagcacaactgggaactggatg

SEQ ID NO: 1504 - DNA, 351 bp, Zea mays
gtatcaatggccgccatgaagcaccggtcgccgtttctctcccctctccctctataaaacgcccggactctctccctctcttcctcccgagttctctctctcacgctctcctctctctccctgaccgcgccgtactcagcttgccgtcggagctcgtcgccgtggtcctgtccgccgtccgtggagcctcgccagagcagtcgtgcccgtcgccgtcaaatgccctcgctggagccccacacgacatcaagaatccctgcccgccattgccgcgtacctatgctgcttgccaccgtgctgcgcaacccctcgccgaacaccttccctgcacgcgattaacccaaggttgaa

SEQ ID NO: 1505 - DNA, 1042 bp, Zea mays
atctaaagaactttacaataataaggtctgattttaccctatgttattatgttaccagttccgtcctagttttgattgtttttccgtaattttcctcattgtattgttcccttgtttcttctcagatcaaagcacattctagtgttgctgggcatatgctctatgatctagaagaagtcactagatcttcttcaacagaaccaactattgtactcattgacactacagggtgattactatctgatgtttcttgctgtttcagaacactattgtaattatatttgttgagctgttcatacatagagattttactacccccctgctttatatgctaagtacacctttacaaaaagaaaatgagattattattttctttgtagaaatcgtatttgaagaaaatagttaggaagtgtgtggtgactcttttgttgttcgaaaaagatgcttgcttttttccctgagagatgaaccctctggatgcttttcacataatgtttctaacattttcaaatactcttaggtgtgatatggaagaagtaaaagatgaagaggagagcaccatgaatgagggcgaggcagcagtatccattgcccatgccaagttgcttgttgagagtggcgttaatgcttctgatattggaataattacgccttacgctgcacaggtttttggtcccttagactccctatgcatattcaagataatagctaattttaccagtcatgcactcatgcctgcagcacatgatcttctggtgaataatcatgctttatacttcctgtattgtcgtcatgactccctatgcatatgtctacattcatttgaatgtagacggaagaaaatagggctagaaaatatgtctacattttcttgcaactgagctttcaattcatctggttgttttgcatttatttatggttggcttcttgagggcttcacctagttctgaaggcctgaattattgaatggctcaataccataggtaacctgcttgaagatgatgagaaacaaagatgccaagttgaaagatttagagatatc

SEQ ID NO: 1506 - DNA, 354 bp, Zea mays
ggggcgtgcttccccagccttgaggacgctgatggcatggagttcctcgacagccaggaggcgatgacgtatcacagtcccaccaacgcggccgagcaaaccattagcgacgttgctcaaggcgtgcttcttcggcctagagatggttgctgcatctgtgtagtaccatgctttcgtgcaaagaagcagctgctagaggaaagggaacagatgagtggagtgtgggtcccacacaactgaaggataggcttgatgcagtggtgagagctgtctcactgagtcaccaggtcgtaggttgcgggggaaggcttgcctcacctagacccctcatgtgggagcatccggcactctagg

SEQ ID NO: 1507 - DNA, 298 bp, Zea mays
  misc_feature (288)..(293): n is a, c, g, or t
aggcggcggaggagcgggagcccctctcccggacgccggcggcggcagtagcggtcgagggtagcggcagaaggaccgccacggcggtgatcgacctcagcagcagcgactctgattccgacggcgagggtgcggtcggaagcggtaagagggtgaggggcgttggaggagacggctccgcgactaagcgggctagggtttcagcggtcgtcgatctgcccccgggtttcctcgagccaatcccgccgccgccggtgccggtgccattggcagcttgtgcgacgaagnnnnnntggaa

SEQ ID NO: 1508 - DNA, 372 bp, Zea mays
ccttcaatctcgcgttgttgctggtcatctcggattttaacgatgaactggagatctgatcgacgaaccggaagcgcggtaacgaagctctcgccaaactggtcacgatgatgttttgggttgccccgaaagatgaacaaacggagagaaattcctcaccggagttgtcgctatagtttgggcaagagtcaaacttcgacgagctggttatggaggcttatggctgcgagcttagttggcggcggactgctatggcttggatggcggcggcgctgctgcgaggctattgaggatgagtctataattgatggcttgaggtgttatggtggcatatatttatataggctgggagatgggtggttacatgataga

SEQ ID NO: 1509 - DNA, 396 bp, Zea mays
aaggatgaagccactgatctgtgcttgcttagcaaaggagccagagaaggtgctagttgtcggggtatgtgggaagccaaggcttggggctgtccaggggaatgcgtttggtaatgctttcaggtatgcggcagaggagattggtgcggactatttccatgacatgtttgagtcatcgtggattgttctggatgttgttgctgtcagttctttcatgattcgattaacagagaagctatgatcagatggcacgaggtttatacaacgtggatcattctttcagttcccaggacgggagagtcaggcatgatcctctccaaataaaggtgctggagatcaggtgctagacgatatgcattttcctaaataccagtccacctgccatttcactaacct

SEQ ID NO: 1510 - DNA, 372 bp, Zea mays
gatgtttaccgaagaacaagatttgcttccattgcatttatggttgtaccattcaccagcttatggtggcacgtaggatggcattgtcatgcactcatgctaaaacgatgaagactgtttaagtagacctagatgatctttgcggatgggagaaaagtggcagtttgcaaacttataccccaggaaaggagaagtggtttaagaaatcgtttggattcaacatattggatttatggtgagaccgtcacatgatttttatttgtatgtgggcaactactcgtgttagtgttgaggaaaactcatacattcggatgtttcaaatacgtctttaaggattttgataagggccctatttggtttggatacttcgaa

SEQ ID NO: 1511 - DNA, 362 bp, Zea mays
cgtgctctgcagtcctcctcctcgtcggccgtggctgtgttctgcaggtacacctccttctcctcctcgtcggcgtgctctgcaggtacacctccttccgtcatcacgtcgccgcacagcgagtcaagctttgcgccatcgtcgccgtttactgcaaacggtgcccgcttcggactactgtttcgtttgagcttgcggaaggagtctttgggtcagtcagcattgtaaaaagagaagaaaaaagaaatcaagatattgcagataagatacctggttaataattaaaacaaggacgaaatagcaccatggggcaagaccttgaaaggcaattcgtatgaaactgtcaaaatcgtagctctatg

SEQ ID NO: 1512 - DNA, 595 bp, Zea mays
  misc_feature (66)..(67): n is a, c, g, or t
  misc_feature (120)..(120): n is a, c, g, or t
  misc_feature (136)..(137): n is a, c, g, or t
  misc_feature (431)..(451): n is a, c, g, or t
acgctgttgcgtcatgccctccgcacggcaagaacgcatcctggtgcggcctcagccttggcctgnngtttcccagcgccgatgcagccctgactccgacgagcgcgaccccggccctgncgcaacgtgtcaccgnngaggggtgcgtccccagccaccgcgacatcgcttcttgacgcgggcgtaacttgcctcagcagcgaccgcgaaggcgctctctcgcaagtcgcctacggccacggccacctgctatccgtggtgggaactggcggtgcctgtgacggcctccgggcctcgtcggcgagggaccccgccaggcacgaattttcgtgtagggatgggacagcgggacagcagcatcctggccacaccgtcgtaccatgatccggtacctgacatcgttttttttaacacaaatgctcttcgttgtnnnnnnnnnnnnnnnnnnnnngtcggcgagggaccccgccaggcacgaattttcgtgtacggatgggacagcgggacagcagcatcctggccacaccgtcgtaccatgatccggtacctgacatcgttttttttaacacaaatgctcttcgttgtcctattcttg

SEQ ID NO: 1513 - DNA, 266 bp, Zea mays
gcgagagaagcataggagcgtgggctacggacatggcgaggaagttgtggccaccgtaggcggaggccggagggacgcgttgagtcgttgacgcagcatctacaccatcgcaggtggggctggccggacacagtggctgcgttgacgtgagtactcaccactggtccactgcagacgcgaaatcgagcaattaggagctcgggttgcggcggaactttgcgcggtgaagaggatgtttttcgcctccgcaagtttgggagtgctag

SEQ ID NO: 1514 - DNA, 410 bp, Zea mays
  misc_feature (356)..(357): n is a, c, g, or t
tattgagtttgttgccaccataaacctgcaccaagatatgaaacaaatatcacaatgaaaggagacttactgattgtccaagcaagactaaaaaaggctaggagaaagggagccagtgcaatcttgtacgagtttcttctaaacatgcaaaagctaggagaaatggagcgaggtgcaaccttttatgtgtttattctaaacttgcaaaagttatctatattttcgtatagagtgagtcaggtagcattgaggatacatcatagcataaataactttgcattggaattaactatctcttttgtattggattagaaagtaacgacaatttagccttcatcagctattaggttcataanntcttggtgcaggtttatggtggcaacaaactcaatatgcaccatgtgcaaact

SEQ ID NO: 1515 - DNA, 410 bp, Zea mays
  misc_feature (322)..(322): n is a, c, g, or t
  misc_feature (325)..(325): n is a, c, g, or t
  misc_feature (356)..(357): n is a, c, g, or t
  misc_feature (359)..(360): n is a, c, g, or t
  misc_feature (370)..(372): n is a, c, g, or t
tattgagtttgttgccaccataaacctgcaccaagatatgaaacaaatatcacaatgaaaggagacttactgattgtccaagcaagactaaaaaaggctaggagaaagggagccagtgcaatcttgtacgagtttcttctaaacatgcaaaagctaggagaaatggagcgaggtgcaaccttttatgtgtttattctaaacttgcaaaagttatctatattttcgtatagagtgagtcaggtagcattgaggatacatcatagcataaataactttgcattggaattaactatctcttttgtattggattagaaagtaacgncantttagccttcatcagctattaggttcataanntnntggtgcaggnnnatggtggcaacaaactcaatatgcaccatgtgcaaact

SEQ ID NO: 1516 - DNA, 506 bp, Zea mays
ctggccggcctcaccggctaccgctgcagcgcctgcgacttcgacatccacgaggcttgcgccaattacttcaaggagacaatctccttcttcgcgcacccctggcacaccctcacgctaagccgcatgcccagttcctgcgacggatggtcctgcgacctctgctgggagggctgtccgccgggagacttggtgtatcgctgcaccgattgcctcttcgatgtgcaccctctctgcaccatgctcccgcataccatccgtagccccctccacccacggcacgaccttcgcctggtcccttcaatcggcacgtgcatgtgcggctgcgaggaactgtccgtgtggaactacggacatgtttggatcgcagcctcacttgccacactttgcctaacttttctgtctaaggttagttcttcaattcgaacgactaaccttagtcaaagtgtggcatagttagccacgaaccaaacaggccatacgtctgctcttgtccgttgaaagta

SEQ ID NO: 1517 - DNA, 498 bp, Zea mays
atgggaagcatatcgtggcacgtgttgagaagcttattgctgcaggaggtaaataaatcctaacacccaaagctatatactgatagccattgttccttgtttgacctttcctggcctctgaaccgcttgcgttttgcttgtgttttttatcgtgtttcagaacggcgcattggtgccccatcctcttgctgagatggcaataaagctatatacaggtcgcagaataacacctgtacagacagacagggatagcgaggcctagctttttaccattaccagtagtcggtaatattgagcgacggagaggttaaaaaaggctcccaaatcctttgatgtaaataaaggatagccgctggaaataaataaaaagaatgagaaaagatgaagagattttgcttgtccttgagggaagagttgtatatttgtgtggtttattttcccctcttgaagcagatggataaatgttttaggatcatagatgatgggaagcaagggcag

SEQ ID NO: 1518 - DNA, 359 bp, Zea mays
attctgagctcgaccctggcgcagctactgtcaagaaacatgaaggagctgctgcagcaccagtaaactcgctgagtgatatcaagtgtcgcttactgaactagggcagctcagcgactactaacaagtcaacccaacccgtgttatgctgaactgcgtataggaatatagaaccatagaacatactgctgctgtggataggcctggcgcggtggtgagaagccttctactgagccaaaggtcttgggtttaacacaacctttctgcaaaaatgtagagataaaggctgactctgttatttcttctctagaacctcactcatgtggaagtcgtcatcactgggttcgtctttagaacgt

SEQ ID NO: 1519 - DNA, 360 bp, Zea mays
acagatgcagagattcggtgctttcctgtaaagctgacaaggggggaggacagcagcagggggagggcattgacgtacctgggggtggcctctggccagcagggcacagccgtgtggtcagccagcaagctgtgatgctcgctcgagcaagagacaaccaattgtcgcgacatgcggagagggattgctggagatgggttgccaggaggtgaggtccgccaccctgcaattgatgctggtgacatgcgcgagcaccggcgccaccctcaatcctagcgcacgaggataggactcatggtctcatgaagaagggaagagtcaagctgatacgaaacaaaagaacaaaggaggaggtcttaa

SEQ ID NO: 1520 - DNA, 390 bp, Zea mays
cccccagcgcccctcctcgccggcgggcttgctgggtctcgcgatcttcctcctcctcggctgtgccttctggggcggcggcggcgggaactaggtaaggggagggaagggaagggaagggaaggggaggtttgaggtagagcggagccgccagcggcgatgccgtcgcacgcggatctggaccaccagatctcgcagctgcgggattgcaagttcctgccggaggtggaggtcaagacgctatgcgagaaggcaaaggcgatcctcatggaggagtggaatgtacagcccgtgcgctgccccgtcactgtgtgcggcgacatccacggccagttctacgacctcatcgagctcttccgcatcggcggcgacgcgccagacacaaactac

SEQ ID NO: 1521 - DNA, 370 bp, Zea mays
atcacacgacacttgacatgtcattacaatattcaatagaaaattgcacaacgaactaaagaactcaccaatgccatgctctttcagtgctttcagatggtgctcctggtctcttcgcgcaagaataccaccatgtatactggggtgcaatgtttttactcttccatcaagctgaaacaacacaaaaaataagttagtggatatgaaaatatggaatttatgctgttacttaaagctctcaacatgatagtcaacccaacaatgtttctgcttttaacaatcagtgaaagggaaaaaggttagactcaaatggaacaagagcatctagtaagcatggaattacaaagttaaatgcagtgctctgaccagt

SEQ ID NO: 1522 - DNA, 458 bp, Zea mays
gtcaaaatggaagactttgtacatgaatattactctgtgcagaagtttagaaatgcatatgcaagaatgattgagccaattcctcacaaggacaagtggcctaaattagacttgccaattgagattgctgcaccacttagtaaaaggagtgttgggaggcaaaagaaaaataggataaaaggttgtctcgaaggtggaagtggtggatcaaaatctggtccaaataaatctgaaaatgagaatgagaagactaaaaaaatgattagaggcaaagcacgatgttctggttgtggagagtttggacataggaaatctagctacaaatgttcgctcaatggaactaagaaaaggtaactttttcattattttcttaagcttgtttatttttattaagtatttctaccaatgcaggaagagaaagataagaaaaaacacaaccaaaggatggacacctaaag

SEQ ID NO: 1523 - DNA, 540 bp, Zea mays
gtttcagctgattgtatcttcttatttgagtggaagttgtgacttttcattctggtgttgtagggctgttgcacttttctttaaggatcatgcgtcttcaccctcagatgatcagcctggaaaattcagtttgaacaaaattttggaagggaaaacaaggaaacaggctgcaaggatgttctttgagacaacggtaacatacctggcatgcaatttctatatttacatgttatatctgcagtttgtctctcttttgttatttggagctttattttgaagatctatttgtttttcctataggttctgaagagttataattacattgatgtgcaacaagaggatccatatggagccattgaaattttagttaaacccttgctgtcagctgccaaactgacataagttacttggaatcatctgcaggacctcttgtccatctgcaaaaagatagaatccccaaaggctacctgaatattgtttccgggtgatcctggagaaggggtcaaatgggcgtaaacttctgttaaatgtcggctaggg

SEQ ID NO: 1524 - DNA, 580 bp, Zea mays
  misc_feature (64)..(64): n is a, c, g, or t
tggtgttgtggctgaattatccagtgttcagcctgtagtagcattagtagttgtacagcctgtngagagccgacaaggcagagacgcccaatgaaatgaaattttcatccaaagttccaaacaagcaataagtatagtgtgctggatgcaattctgttatgtcactggattatgcagatggcgtgaaagcgataagtatagtgtgttgcgtgcgactaaagaaatcaaagacttttctgaacctaaaataaaatgatactgattagggtggtagtctgattggtgaagacccataaaagctcatacctatacaaatccatctatacccatgggtataaaccattttgacccgcaatataaaataaactcacccaacccaacatgttcataattaaaactcatcacaacccaccaaaaacaaactcatttcttaaaccacctaaaatacctatttacatccgccctattcgcaggccaaggcaggtggtgggaggatgggatgtccatgaggggaggtaggcatcacgccggaggtttcagcactgatgtccatgatgttatttgagccactccatccatc

SEQ ID NO: 1525 - DNA, 374 bp, Zea mays
ccgactgcgacggctcgcctgaggcggcgacgaggaggcaggagctgatccctccccaggtgctggtcccccggtccatgaaatctttgacggcggcaaccgtgcagccaccgaagaggagcagagaaggaagggtagtcaccgtccccgaggggagggtgcacggtggtggcctcctatcgttgcttggcgggagcttcaggatcgtcgacaagctctgaagcagtcagcgcttggggctcgatttgacgatttctacctctacaacgctttttcttaccttagaaaaaagtgagaaaatgccactttttctattagagctgtcagattattgtctgtgcataaaaatattttctcgtctacagatcgaactt

SEQ ID NO: 1526 - DNA, 766 bp, Zea mays
attgtctactacactccaaaatgtgcttttaaccaggcggccagacctgctgtctattgtacctcagttggggatttgccagtagaccagggatgctgatttaacatttttagtgtttcatgcaaagatagtataggatatatgcaattaattacaacgatgtgttctattatgccaataaccacttagcgtttcaaaattttaaacaaatatatctctggtagtcattatatcatgtagttttcttgttgagcaggtctggtttatgggggagctttctcatatctcatcagagtttgacaatgtaagtaatatgcaagtgagctctttttcttgtgttacttcttgcaaggaaggttcattgcttatgttcattttgttactaccaaactgtcacttttgcaagcagattgcaaccacaaatgattcactagctctgttttttctattgtatcttttaggttgttcaagttgtgctggaaaactataaaccttagaagatacaaaatgatgatcagggtaccaatgatgctgacagccagttggtgcaggaagaccagaaggctaagcacccccttcccctttcattatcactgcgtccccctcttgggagagcatagttaatgttaagggagaagtcagcctaccagagtaatataatcttagttttgctcttttattgactgtattttcttcatatacaataagtgggtgattcctaaccatactcccgtgatgcagggaagatgctagagatcccaaattt

SEQ ID NO: 1527 - DNA, 374 bp, Zea mays
cttcttcgtccatccgttcgtggtgcgccattgcagggaggaatcagagagagagaaagaaatcgaggtgagagaatgaggggatcaacaaattgggggggagagtccccggacccgcgtgcgtccttcaccggagtccacgcaaccgttggcaccctcatcgtgtggagttgcggtcggtcctagggtcaattgctcgccgataattgtgagcaccgcggaaacacaacctgccgcggtcgactcatgcttgcagcgccaccccaccgtcggcggatggccagggtcaacccctggagttcaaggagcatctttgtggctgttgagggagcgatggacaaccatggagactgggattctccaccgcggattca

SEQ ID NO: 1528 - DNA, 259 bp, Zea mays
aatcgcctggtggtgggttaggggctggctggtgcatgctgttggcgccgtggtggtgctttgggctgtgacgggcttcttccggtggagtcgatgcagagggaagaggaggagcgggctactggcttgggcaagaacatgtggcagacatggtgctgagtcgggcgtaagtcttcactgacgtctatgtcaatggcgatggtggtgacacccttgtggcgttgagtcgggcgtaagtcttcactgacgtctatgtcaa

SEQ ID NO: 1529 - DNA, 396 bp, Zea mays
ggggcgacggtgacccaagtctggtaaagcccccacatgctggcccaaggtttctgcaccccatctcagcaatcgaagcaagttgggactacctgccatggcagtaccaagaacaaacgccccgtgacgaccatcggggataccctactctctgtgattacagaggctacttgccataggaagcgcactcagctgccaagctaccttttgcagccaccgttacaagatcgtgtggacgattgatgtggaatggcaacatgtagtagtagctgccgtcccgtaccttctctatctaggactaggagccgagtaatggctgccattcatcgaggggacgacgtgggtcgcttgtatgaaaaagattgaacaaactagcaactgcactagattgtttcg

SEQ ID NO: 1530 - DNA, 410 bp, Zea mays
ctacctcagcgtcattggcgccgggagcttcctgagcagcctggtgatcacggcggcggaccgcgccagctcccgcggagggcgcgccggctggttcgccaaggacctcaaccgcagcaggctggacctcttctactggctgctggcgtgcatcagcgccgtcaacctggcattctacgcgctggtcgccaccaagtgctcgtacaagcagaccgtcagggccggcagggtcggcgacgaggtcgagtgcgccgccgcgtagctgctgctgtacgtggtggtcatgaaaccaaccatgcatcagccgcacgaccatgtgtattattattattataggggctagtagtaactaagctagctactcgtttgatcgtgttgttgctctagctagcttgggtacaagtagtaca

SEQ ID NO: 1531 - DNA, 330 bp, Zea mays
  misc_feature (139)..(139): n is a, c, g, or t
  misc_feature (171)..(171): n is a, c, g, or t
  misc_feature (257)..(257): n is a, c, g, or t
gacaaatttacttgcttaggaaccttacctttattacataccttggatagatgaccctgctcaccacacttgtagcagaagcgtcgcttaacctgacatgacgcttgctgtttgtcttctttcttggtgagagtcatcncggagagtgcacgtgcttgatttatcattagnggacaagaagtgatcgtatggttcttgtcattgcatccgaagcatctccttatcccttcatccttgtcgttgtatggacacgacgnaatgaggtgtcctgacttattgcacttaaagcacctccttttcccttttctctttttgttcttggatgacata

SEQ ID NO: 1532 - DNA, 356 bp, Zea mays
tgcaagccaggccggaagctacggttccttcgccatctccgccattggcagctccatctttccatcaacggagaatggaggaggggaacagcggcgtcgcaacgctgcggcggtaaccggcctacacacgtatcggcgtcgcggcatacaagggcaggccaggcattcgatttcgttcgtacactacttactcccggttgcagcaagcaatcgttttctttctcttgcttagtttttttttattttttgggctccctcgcctgcaatcgtttcctgcgtttcgtaggagtactacattactctcagctgcagagggctgtggataatctcgcagccttcagatggtggtttgtgcg

SEQ ID NO: 1533 - DNA, 518 bp, Zea mays
  misc_feature (374)..(374): n is a, c, g, or t
  misc_feature (397)..(411): n is a, c, g, or t
cgcgacgacgacgacgacagcgctcctgctgtcactagccgccgcgccagcgctagcctcctgctaccggcactggcacgagcgtcctcgggcgaggacgaccggattctgggcctgccagggcagcccaacggcgtggcgttcgacatgttcgggggctacgtgacggtcgacgagcaggccggccgcgcgctctactactggttgcaggaggccgacaggacggcggtcaaggacccggacgccgcgccgctcctcctctggctcaacggcgggcctggctgctcctccgtcgggtccggcgcgctggagaagctcggcgcattccgtgtccacaacgacggcgagaggctgctgctgaacgagtacgcatngaacagaggtaacgtatgaatgnnnnnnnnnnnnnnncctcttgtccatctgcaaaaagatagaatccccaaaggctacctgaatattgtttccgggtgatcctggagaaggggtcaaatgggcgtaaacttctgttaaatgtc

SEQ ID NO: 1534 - DNA, 388 bp, Zea mays
ggtgattcgagttccctaggagtctcggccatgattgtgacctgggggaagtccacggaacacgacgggtgtgttcgcgaagaaatcaagggcagagcatctgggcggcgtggcggattcctcatcggcgtgcgctgctcgtcgctgggccgccattcctcgtcggtggagcatgacacttcacaatccgaggtattatggggggaatgtgtttggggtgttcaccacatcccgcaacaaggtttagatcgagttgcggggcactaggggtcgggaatctctcgcaccggcggatgctccgctgttaggggaggttgcgccgccgtcgggcacaccataggatgacgacggtcgcttgaccgtagatctccatacggacaactttcat

SEQ ID NO: 1535 - DNA, 211 bp, Zea mays
tctttttttttcgaatttacaggagagatctaggctttattaggcgctcaggctctttgctcccgccatgaaaccacagtagtattgtaacattgaattagtagacaggtctgttcgtcctcaagagaaatgaaagaaacatgaggtaattcatttcttcacgcagaattttgttgtaattcttatatggtaaaaatatagaagcatgttg

SEQ ID NO: 1536 - DNA, 375 bp, Zea mays
agcaaaccaggttttggatgagatggttttcaagggttttgcgccaagcaacgatggtgcacagaagtttgtccaggggattgagaaggaaggagatgtggtattgctagagtcagtgttgtgccgactagcgaaggtgaatgctttggtgccaagtggatgggaaaaagctgtaagtggtgcgctgaatgatcccacagagttgaggctagagaagcagcttgactctttaagaattgcttgattagacaccatagtggatttgatcaatacagtttgagtagcaaaaaaatggcaagcatgatttttaaagaaatcaatttgttcatctgttatacaaggctgccttgcaggagtcttacccaattcaggtta

SEQ ID NO: 1537 - DNA, 362 bp, Zea mays
cgcggtcgccgctaggacgccaccaatctcaggttcccatctctttggccgtcgtcagcaaccggctagcgccgtccgccctctaccagtccagctccgcgcccggcgccacatcctagcctcgcgcacagacagaacttctacggtcctagcattggctaccacgcttggtcgcgacaccgcctccccgcccgagctcggccgcatgggccacactttctggctcgccggtcgccgcctcgtcacctccccgcgtgggcgtgaccaccctcgccctctggcgtctggctgacgcctcaccgattggtgattggtgattggtcattgcttcagtgcttgtctgttgtctgctactgctactt

SEQ ID NO: 1538 - DNA, 477 bp, Zea mays
gcccgcccttgccttgggagtgagattggcattccgagaaggaggaggttcatggatcgccatcttgtcgatcgaaaacgagccctcagcttctacgatctccctcagctctttctctgatggcccatacaccggtatgtagaaagagtcgagtctctcctcgtcgatcaaaccctgtcagttaatagccagttaattattaataattctaaaaaagacattttcatatcataatttacatatctatcagaccttggacgccatttcgtgtaggacggcatttataaattcgaaaagctggagggcgttctccggtttgtcgtcggggcgctgcccaaggagggagaacaccagctttcctccgggaaccatctcctgagctcgcaggcgcaggatctgggtgaagtcgctgcgaaactgccgggcataggcctggatgactgcaggacgccgagcacgcctcgccgactcgtccct

SEQ ID NO: 1539 - DNA, 480 bp, Zea mays
tggctgagaatctgggcaaggtggtccttcaagcggggtggaaggagttcgtcgctgcgcatggcttgagcatgggggacgtcctggttttcaagcacgacgggactcctcggctgaaggttttcatgttcgaccatagctgctgcgagaaagtgccgccgccatgccctgtcaagatcaagcgagagcatcatgtctgtggcggagagagaagggagacgcaccctgaagttccaagcagcagctgtggagatgcttccatgacttttgtcaccgctagctcgtcgtcagcctccccctccgacgacgcgtcaggttatgagagagaactttgtgcaggagagatttagtctacagatcatgacctcacgcttctcttcctcttgatctgtttatgtgtaggagagtggatattatctccagaagaccagaaaccacgttacgttccaggttacataacactgcttgtgactagccctc

SEQ ID NO: 1540 - DNA, 203 bp, Zea mays
tgcaggcgttggcgaagtcgatgagccagtacggctcgtagaagccgaagccggtgagcaggttgcccggcgcagcgttgccgaaggcggcgtacccgaagcaccccacggcgaggtagaagaacgtggtggccaggaccgcgagcacgttccccttctgcatcgtctcgctctctggtggcggcgatttgagcgtgtcctgc

SEQ ID NO: 1541 - DNA, 627 bp, Zea mays
  misc_feature (470)..(472): n is a, c, g, or t
ccggtgttcctcccgccagtcaccatgaccacgttgccgacgtcaaacttgatgaagtccatgatcttgttggtctccagatcgatcttgaccagcgcctccattgcttcgtatagttgcagatacactttcttttcttccatctttttagctctttcctgccttctctgcatcaattcagagttcagactatatatcgaacaaaggtttcaaaccacaacgagcattggcctggccattggttagagaacatcctatacagtccctggtgaaaaacagacaaactatggattcaacgggctaagactctgagcagacacactgaaacccagtacaatactgagaccaatcatcacagagaactcaccgtatcagcttcgacaagagactcgagcagctcctgttcctgcactcataaacaaatattatgagtgcagtaatcagctggaaagatgaaaaggcagtacctnnngtacctgaagtacctgaagtgccagatttagcaatcgttccaaggttcttaataagatcttccttggtcataccaatacccctatcccgaatggagaggattttcttctctttgtccaacttaatctgcataagcatagaccagatgccttgagg

SEQ ID NO: 1542 - DNA, 559 bp, Zea mays
cttataacgaggatgcatgcctacttgattttgacgtgctattgatggagcctcgcaagctggagaaaaccctgattacttccatcatgtggtgggctgatgccattcgtttagccaatcaaaggtaagctaaactcacgacctctatttcacgtgtagtacactaacatcggaacacgaatgcatgtccttgaaaccatttcgaagttcagccactgtatactcagctgtctgggtcatgttaaaattctattttcagggacctgattagactggccgtaactctgtccttcaatggcaagtacacgaggctaccttcaaactggaagcgcgcagatgatgacaacgctgatatcctcaacttcgatggacccaagaacgtctgttctgaagatgggcgccagcatgagcaaccaggctacggcgcaacctggcagcaataccttcatcagaaatctgaagccatactgagcacctaaataacggcacttcgccggacacaaattttccactgtcaccgagtggaagctgactgttggtattgacctgtaaaccctca

SEQ ID NO: 1543 - DNA, 354 bp, Zea mays
tctaggcgttgcgaaagcaaggggaggagtcagcaagacgacgcgccaagcgaatggccgtggccgtggccgtgctgttgcttcagtaaatagtgggcagatccacggctctcctttggaaccaagctgctgctaccaggcttcgttgctcgatctctcgacggcagtgctatcaaatgctcggttagcggggcgcgtggagatccgcgagaagatttcttccaatctccacagcagataagggagcggctagtttccaccacgtttttttttggcgaacagtatagtggactgatcgagtttaggatgagaggcagagtgtggtttgactgtgtaaggctgggtagtgtgtac

SEQ ID NO: 1544 - DNA, 333 bp, Zea mays
tctagcctgacttgcccaaaggcctaccttctagcactaatcacctcaaagacatccataggtcttcgttcatccaatcaccaacagttaccgagagtcacaagagccctctcccttgcaccactgagcatgttgttcatgaaattgatgacctcgacaacaactccaaagtccatctgcaactgagaagcctccgcatgagaaacagacacctatagaaatagagggaggccatggcagccaagaggaagagaaacgacgcgcaagacaagattaagcaactaatctagtaggaggaagaaagatcaagggcattgcagcaaaagagatcgt

SEQ ID NO: 1545 - DNA, 421 bp, Zea mays
gtcggaatccacccccactcgcgctgtgtcctgcgggagatggccacggccgcgaggctgcctacggttccaccgtcggctgcggcgggagatgtctccgaggtggagctctcggaggcgggatcgccggacctcggcagccggagcagcggtagcggtagcgggggcagcggccggagcacggcggagtactccgggtgggtgtaccacctcggcgtaaactccatcggccacgagtactgccacctccgcttcctcgtcatccgcgccaaattcgtcgccatgtacaagcgggacccgcacgacaacccgggactcgtcggtttccccgatccattgcactcttccctccctctgttttgtttctgatgcgtgtgatggctgcgccgcatctcgtggattatgcgttgaagcttgacag

SEQ ID NO: 1546 - DNA, 340 bp, Zea mays
tttaagaccttccaggagagtgattggcatcccctacccttactgatgaatcaaattcccaagggcaattctcctcaaaagaaaccagtccactcacactgagtggtgagtgtgagtggagtccatttaggtgccaaaggagttctacttatttgggcatcctgccaaaggagccgcttttccttgttgccaccttttttcatcttttgtcaaaggtggaggtgacttttttattctattttatttttgttgcttcgaccatgacttacaactaggcaaaggcacaagcactatgcgcagcaaaaggaatgcatactcaagcagcaattggctctgatga

SEQ ID NO: 1547 - DNA, 492 bp, Zea mays
  misc_feature (374)..(412): n is a, c, g, or t
  misc_feature (415)..(421): n is a, c, g, or t
  misc_feature (430)..(438): n is a, c, g, or t
  misc_feature (443)..(461): n is a, c, g, or t
  misc_feature (465)..(469): n is a, c, g, or t
atgatcccatcccatccctcttcatccttcctcgtccctccatccaaacattgagtctttaaaaatttcactttctaaattatcatttagagagtcatgcatgcataaaatctattttgtatatctttgcaatctccaacagattttctatatgttcgttgcactttagagagttatttacattttctatccttggttagccacaaattcgaaatataatatgtccatatatagaaaactatttaaataagttattgaagggtatttttttcaaaaaaaactctattcctatcaactgaaaatattatagtctcttataacatgattggatgcttgcacccgtccattagaactgacggtatgcgttgaccaannnnnnnnnnnnnnnnnnnnnnnnnnnnnnnnnnnnnnngtnnnnnnngacgggtgnnnnnnnnntcatnnnnnnnnnnnnnnnnnnntttnnnnngataggaatagagttttttttga

SEQ ID NO: 1548 - DNA, 1185 bp, Zea mays
  misc_feature (59)..(61): n is a, c, g, or t
  misc_feature (1132)..(1132): n is a, c, g, or t
tggtcgccaatggtggacaggattacacaagaaagagtcacgcgagtaattaaggtatnnnaattagatactatgttatggttctctaagcactagatatatttaaaaaaatttctacatataattcaacatatgtaaacattgtatcttattcacaagaacattttaagatatgattcatttatgtggattatatgggtaaacctgtatcttatagattagagaaccatattaaagacgttatttttatcaaaatatgtctcttgtgttttcttagacgtatcccttacggattatttatatgatttgtatgttgtttaactattcgaacaagaacacgtcgcggaatccgattaattaagcatgctgagagcattcattactgaacatacatgtggtctgtataaacgcgggaaactggccggacgcaatttgcctttaaggaatcttacgattactaactggagttaccgaacatgctagagaaaaatatataaccatcaataagtcacgagatctataattcttttctgaaaagtgtattaactttcacataaaaaacataaagtaacacttaaatttgcactggcattattacaaataaaccaacacatccctcaattaagttgactaccaaaattacccgctaattgtacaaaaatacatatatttctaattactcacattatttctatatttcagcggccatgagaactgtaactttaatgacgcatatacttacaatccacatttttatgccacaataatatccttgacaacaatttgtctaaggtgttacattttacgtattgttataagttttgacccaattatcatgaccaatatatttgttggggtcttcctcttctgaagatcctcaaaaatataattaaccatttgtttttagcataatctattacaggaagcttcgtcttcaggaagcaagccccttcctcatgatgaacgcacacgagacgaagacagatctaaagatgataagagtaaacaccgaagctatcgctagatggacagcttcggctcataacggagacgaagtataatgatgatgctgatcgaaagagaaaaagactgcttagtccttaatgacttgtattacggtcataccaggatntgtggggcataaatgtacttttactcgggctacgtcccgtgcttataaataga

SEQ ID NO: 1549 - DNA, 403 bp, Zea mays
cccgcctttagcttttgctactatttttttttatttcgcaaacagttatcgaagaatggcgcaggcgccaggcggaagccgttcggccccacatgtcggtgagtggttgggccggtggcagctagcgtccggcgtggatgtagccggcggctcggccattaactgggccgggcccggcgggcaagcacctggaggtcacgtgggtggggtgggtcttgcgagcgagacagaggacgggacgtgacacgacacgaggctgaaggtgcacggccaacatgggccccaaatgggcccggtctgcttgaaggtgtacatgcacgggccaccccactctctgtagagtagggacgtacgagtagagtctcgctctagctctccatgcactgttgagacttgagacagg

SEQ ID NO: 1550 - DNA, 384 bp, Zea mays
accccgcttccggagacgacggcgcagcccgggacggcgacggacgcagcaggcgggttctactacgacttcggtaacggcggcggcgagcctgctgcagccgcctccgtagtagcgccgcagcagcatcagctgagcccactcaagaggcggtcttccgtggacgaggatcactccaacggtggcattactgacatgctgcacgcttcgtcgtcgtccagcagcaagagggtgatgggcgatcatcacgcatcgtcgtcgtccatggctgcaaacagctccgtgtttgagcccggacagacttcttctcatcagctgcacgacagaatatgacgcagcagcatgcatgcatgggtggtcgctccctcgctgctgattatgcta

SEQ ID NO: 1551 - DNA, 709 bp, Zea mays
  misc_feature (681)..(681): n is a, c, g, or t
  misc_feature (683)..(683): n is a, c, g, or t
  misc_feature (698)..(699): n is a, c, g, or t
  misc_feature (701)..(701): n is a, c, g, or t
  misc_feature (703)..(706): n is a, c, g, or t
cgccactactatttccttccataggatacgatacgttcttgttgtttaaaagctgaatcttctcgaccgactgataaacatgttagaatctatgatgcctaggatcaattcctaagttgccgtctttgtatcgttgcactgcaggaaccagcagccatcggatcagagccgccgtgggttgtagcgtttccggtcactccgatgtttagatgatgggagcctctgtggttagggttttagtgcgaggtactagcgttcgtctttcctgcgacctcttagtcctatttatataagtatataacgtcgtgtgtctgagagctccaaccaaagttagcgtggactctcctaatcaagagcctgattaaaggaacgatagttggctctattgactagctacagagaacacacctaacaaaacaaacaaacaaaaaatctaatgcggcgcagcttggtagaggacaagaggaactactccaagtccaaggagccgtctcagcaggaccaccaggcggagccagcagcggcatcggcggaggcggccaacaaggccgtgccaacaccggcagaagctggagcgagggcagaggcgcagccggagatgagcagtaacccggaggcggctccggttccgggagcaggacgaaagggcggcttgttctcatgcttcccctgctgctgaangntgataagcgagcaanntncnnnngcc

SEQ ID NO: 1552 - DNA, 284 bp, Zea mays
aaccacctcctatcgctaccaaactagcagcgccaatggggtcagggtgagaccgccgacgccgttcctcaacttcgccatcggtcggagtctgccaggcggccgggtttgggaacgccaatgctgggagagaaattaagatcgacctgtgtggatcttcctcaagcgcgagatgtagggatggatggcctcggccatggtgttcccttgccggtgcgggtctcgccgcggtgccgcaaccccgacgtggaccgatctcgtctcaaccttgtcgctgacgaagg

SEQ ID NO: 1553 - DNA, 512 bp, Zea mays
cattcgaggatagtttttcgccgggggcggcctagaaatcagccgtcaggtgaaccgggaggggtggttgcctgaggaggaagagatgatcacgcgagcgaagctggtggagcagctgcgggagcaccagatccggtcggcccagtcctactccgccgcgctcgccgtcttctcgcccaacccccacatcgcctccaggtcaggctcccatcaacccgctgacatctgattcccaatttggtccgcttcactgaatcactgttgacttgatgcgtagggagtaggattcgatttagattcgcgctgtaaagattgtgttgataacttgatatcatctcgtgggtcttggcaggttcgcatgggccttgattgcatcttttctgctctgttagttccggttcggggaagcaggaaaaggcagggatgcacgagatggacatgagtagttagagaattatcgcttaagaatattagaaaactaatcaattcatggcttaattggagaaacagaa

SEQ ID NO: 1554 - DNA, 859 bp, Zea mays
gtgagcaccattagctttagcctcattttacattacaacgatttaccagatgtgcgtcacatctgatatatattttggccagttcaaggtgagtgatatcattagttattatctataggtgatttcatgttctgtaattgtagtattgttttactttttatggaagtaagggcaggaattgtagtaccattttactatttaatactggtattagactgctggtataaacggatgttttctccaaacatcttaacatatgaatggatgttttttctttgtggggaaaaaaactttgagcattctctgaaactaagttttcatgcaaaataataggctgtattgccatgtattgcatcgactattgacttgggtgcatttttcctctttacctgttcacagtggggacacggatgctgtagttcctgtaactgcgacaaggtactcaatagatgctctcaagcttccaacactggtaaattggtacccttggtatgaccatgggaaggtcagtacaagaacggttcgctctaataaaattctgcaacataatgaaaattttaacttgatcttaattcctatttttttcccgatgtcacaggttggaggttggagccaagtttacaaaggactaacccttataaccatagcaggtgcaggacatgaagtgccactgcaccggcctcgacaagctttgatcatgttcagacacttcttgcagaacaaaccgatgccagcacaatagccagtcgaagcagaaatatagtgtaaactaccacagtcatgtttaatattttttaaattcttttttacttgatttgattgttattgttacaacatattgttcaattatctcgatgaa

SEQ ID NO: 1555 - DNA, 493 bp, Zea mays
agacgacatcgccggccggggaggaagaggggatgtcaggcgtgggttcctgagctaaatcccacgcacgggccacggcagcagagcagccgatgccgagcaggagcagcactcgctccacgtgaattaagaaacgccagctagggggtgggtgatggtgccaaatcttcgttccgttcgagtattttgctattacagtagtcgtttaagcagcttttttttatctacaaatctaacttctctagaggagtatgtactttttctagttttcaccgtggttcctttaaaaaaaatcctcatacttattttaaatcgtcgtatatgcacgtaggttcgtttctctctcctacttctgtccttctagtggactgttatttatggaccgtgatataaaagaggacgagtaccgagcgagttatataacagtaagtcgtatgtagcgcaacattccatatgatacctaaaagaggacgagtaccgagcgagttataaa

SEQ ID NO: 1556 - DNA, 851 bp, Zea mays
gaggtaatgtactttggtgtctttgaaaactttgtgtatacttgcagatctaaatccatatgattctgcttatttagaaccagtcattgaattgtttggttgctgttacatgtactgaatttatttcacatttgccctgaagattgcttgtaacacagtagatgggaaagggcgcggttaagcctgttgcagttaattaaattattttttcttgcttttcacaggtctgggaggtcaaagctgccgatctgagcataagccctgtacatcgtgctgccaatggtatagtcgatccaaataaggtctgtagttctattttgcattgacattcctccccatctcgattgtatacttctggtatagtatgttggaaggctaatgctgaaattgaaccagggtatctctctaagattccctcgtctattgagattacgtgacgataaaagcccagaacaagccaccacgtctgaccaagtaagggggtgtttggttttatggactaatttttagtccctctattttattccactttagttcataaattgtcaaatatggaaactaaaatgtagttatagtttccgtatttagtaatttatagactaaagtggaataaaatagagagactaaaaattagtccctagtaaccaaacactcactaagttcactgcccctttttctattttcgatagtttgctgttttgcgtgtctcaactcagattgtgtccaaatttggcaggtcgctgacatgtaccggtctcaaaagatcaaccacggttataaccaggaggatgaggacgatgactgatgttgacttaattcttgttgctggatgggatggttcactgtgtaaa

SEQ ID NO: 1557 - DNA, 392 bp, Zea mays
ttgtagtgatcacactgtcacgagagctgagcaaactacagcctgcaagagctacacgttgtagcctatactcctgccttgctataattttcttaattttcttttgttaatgagtgcagtttctctggctaatggtaaaaataatctgttctacaggcatgcttgaccacatcatggtggagaatgcaagtgttaaagttgcattgaatcgcattgccgttgtgtctgtcctggatgcacataccctgtcagtgatgtcttatgaagcttggaggctcatacatctgtttctgttggctcactctagctatatgcagtggagctgctaatatgcatgaagtttgggctaggtgagcttcctctttcacttgtcaggaacaacttgaacccat

SEQ ID NO: 1558 - DNA, 207 bp, Zea mays
aggctcggatctgatgagaccattgtgggagtgaaaccgagcctgtgtctaaccttgtggcgcgccctcttgtttctttgtccaggaagcgcacccgatgcttgtataggctggggccgctggggatcttcggatgcccagtctgcaatgtatcttgagtgctcagttacacaggacacccgttgcccaggttgtgaatattgtatc

SEQ ID NO: 1559 - DNA, 259 bp, Zea mays
tctacaaagttaaatcggtttaggttacaggaaaaccttagccagatgtaggatagcacatggtgagatttttttagttctttgattgcaggtctgcagcaactgaaagagaaagggggagaggcttaatagcctgaaaagtatctttgttaatgtttagctatcctttggtaactagtgctgtaatccctcttgatttacagctgttcggctgctcagttgagagacattctgatcatccagtacatatgataccttg

SEQ ID NO: 1560 - DNA, 381 bp, Zea mays
ttccgtggaggcctggaagcgctgcgcgtcccgatgctcaggagcttcaacgtgtcagggaacaggctcgccggggagatctccggcgacctgtccaggttcccgagctccgctttcggtgacaatcttgctctctgtggtccgcctctgccacaatgtgtccatgcgtacgatgctctaggccggtcatcaggtaactcgagcactagtgctactgccgctgaatctccggacgccagtagtgtgggtgtttcttctagcaacgggggattcaataagattagcctgactgcgctcatggccacgggcattggcaacgcggtgctcgtcacggtctcgctggccatcacggtggccatgttcgtctacatgaggagaaaa

SEQ ID NO: 1561 - DNA, 383 bp, Zea mays
tgtcaacgacataacttttttaggtcccaactcgggcaattactatggtgttggatcaaagatgctttgaagtttgaagcgcatccaaaacaaatacagtgagacgaattttctagggtttgcgaatgccaagagaaaagatgggaccctttgggtaccatgcctgacaagaaatgattggttttcttcgtaatctgattagtctatctggcagttgacgattttttacagcaacaaaagttgattgtgcaaagggaaaggtcatcagggtggaaaattttctactgtgattgcaaggaagccagaggcaactccgattgaataatcttcaaatcattgtatcctctgtaatagtggtacttagtttgtgatgtgcactgtta

SEQ ID NO: 1562 - DNA, 892 bp, Zea mays
gattccttcctttgtctcttagctttgctgcgtcggcatgtcatcagtgatctgaccatttgtttctgtggtttctaggggtgcaaaagatggccatgcaagaggatggtcagataccatcggttcaaagcagcattctacagccaaaggtaataccacacactgttgactacttgcctttttcgagcaaaggcaaccaacttgattcttgacccatcttcgccgactactggatcttcaccatttagaagaaattaaagtaggagtctcgcgaatggaagatttcctagctagaagttcacacgaaattattctagagtttagatctagtttgtgaactctatttttccacaggatttttatttttccaagagaaattatttcattttctcttgaaaaaataggaatcctgtagtgaaatgaggttcccaaacttccaagtgatttctattttcttaagagaaaatgaactaatttctttggaaaaatgaaaatcccgtgaaaaattggaggattcccacaccgtgaaaacaaagccatgcagaagctatctggttttgagagggttcttttactttattatgctttcgagaacacgtacttgatcaattttcatgcatcgtctgtttcagatgaaaaatgagaagtttgtgccagaggatgatgaatccgtgatcaccgcgaggatggccttcgagacacaggactacgctcccccggggcccaacaaccaccacaagccacctgcaggctggagatgaactcggggctcacttttgatcagtgtgtcgtgctcttggctcacgaaacttggagagccagcgcccgttgcaatgttgtttgtcctagctataatagaatctacctattcattatgtcacgaagagaaatg

SEQ ID NO: 1563 - DNA, 351 bp, Zea mays
tgctggcggcgcgggaggcgaataagcggccgcgcgcagcgccgacgacgaccctccccattgccttctcactggtaagacgctgccctctcttcctatcctcgcgttacgcgttacttctgcgtcgcgtgcctgcgcgagcgcctccacgatctcgaggcgtccgccgctgccgcctccgcgctggggcgcaagtccacatcggccatgtggtccctgttcgccaggctgttcgccgccggcagctcttctgcgtccgaccccgcggagttctcgtgcggccgcggtggacaccacacacttacgacatgaattgccgagatctgagtcaggaccgggctacagcaatac

SEQ ID NO: 1564 - DNA, 433 bp, Zea mays
tatctgcagcaatcaaggaagaagaagaagaagaaggacagcgagttctggtacgatgtttgtggatgggtgatccttggcgcgggcatttgtgcttgggttggattggcaagagcaagcatgcctcccccaccggcaccagccacgtgaagctgatcgagtgccaagaatgctttgcaaatgttgttaacatgcccccatgttaaggtgcctcaggcatgggatctttccaggtgttagttttccatggagaggagagagtggtgtttccatacgggttggatcaatttttcatgcttgttcttttcggagcctcgatgaggtttcccttataatcggcatatgctgctggataattttgtacttgcttataccgttttgagccttaaaaaccgtcacgacgttgcgattgttacagctgtgttcgctatga

SEQ ID NO: 1565 - DNA, 611 bp, Zea mays
gggagctcaacgtcagtgtcatcgtctccactgtgccacgagacttctcgtaagttcactcagtttctcacttgccgtttattccttccaaagatcatgtgaactgtctatttgatttcttctatatgcgagatacgcatatattgttgtattaacaagccagagctaagtttgttcgctctattcagaaaacatcttcagtatatggagcttatgaaagcgtttcttgaccaaataattattctgccggcaatatggtttccattccactaacggagcagttgtttgaatcgtttcgaacaggatcgagacgttcggcagcccaaaagacgtgggggaagtggtgctcagaaggatcgcgaggacgaggcgaagcccggacatcaacgctacccttatcgacgccgccgtgagagaggacgcgggcagggtgaagtactacaagctggagttccgagtcgagagcccttctttccggcggcacaacgtcgcggtctgctgcgtgagggacggcaggctctacaccatgaacgcgcaggcaccggagtcggcgtggaaggcggtccagaaggagttcttggcaatggcggactcgttcggcttagttagcg

SEQ ID NO: 1566 - DNA, 431 bp, Zea mays
tgtaccaaaaatgtgcattattagtttattacctacctgtactaggagtcagttgattgtaagagaatttcagcatcatgacaatttggggaaatgggaaatctttctgcaagaaatgtatggggactatttttgctctcacatccatttgcagccatgaaaaaatcttcccttttttagttttctgagcaggccacactcagcagatggttaagcacacaatgtttctgttacagtgatttagataatgcttattagttctttacttatttttaattattattttgcccttctagactgttaaccttttgaccatttttaataatgtaactggtcaagtttgttgctcttgttcatgtttggtttcagctctagtgtaccccaactttcttggcagttggcactaaaaggctgtgttgttgattgtaaca

SEQ ID NO: 1567 - DNA, 1059 bp, Zea mays
  misc_feature (1036)..(1049): n is a, c, g, or t
caatatttatgagtagcttaagtagaagaaaagaaacattgaagaaacaagaaaaattgtgtgtcttaatgaagcaaagcagaaacaaagaaatcttagtaaccatggctagttgacataacatttttctgctataatgccagtaacaaaacaagaaaaagtaaaataaagtgacagagttgatcgatgaggtaaatactagccagtgagtcgtctagataatattagtgtaagccgaaatcaacagagtcttttgttatagaactgatccatgtaatattgtaatataatttcattctatttcaaaaaaggtatcagttcttagttacgtcgggataactcaatctaattattttctcataataatcaagatcatcagtatatgaaaaagtaactgcaaaggtgcgctgagcactgagaactggactcatgcaaagatcacctctcccaactactggattaaaagcagaaataagatatgtaactactagagcaaaacattaacaccataatacaaagagaaatagtttaagagttacctgattaatatattgttccgggaatgttgctagtgttagcaagcccttcactgcaaaccatttataaccataaattagaatgtataacttaattcataatgcaacaaatacagacactaacacaaaataggtaaagtggaaaagagttgacaccatgtgcatttagtatttgtgaatttgtaactttggcaacatggagttatatgaagggatcacacatgtgcataaatgtagtgtagacaaatgtgacgacaccaatcaggtccataagatgttaacttactagcacaagagacatattcttgtctgaaatttggctgcatagattgagaagctatagtaaaaatggatcgaaagagatggattaactgctccagctttttctgcaagataagccaccaggaaccctttgctaatttaacagaagaaaaatcttcataagataccaaagccacttctctacaggatgaaagcaattgaacagataaatagagtgnnnnnnnnnnnnnnaggagcagaa

SEQ ID NO: 1568 - DNA, 764 bp, Zea mays
ttgctcctgcatccttgttcttgttcctatcctacctatcggctagcgtattagcctttgcacatctttccatggcgactccacttacgagagctagcaagagcaacgcgcccaggggagaagcgcacctggctctgcggcctgttccagtacctcaacatgtacgggaccgcaatcgcctacaccatcaccacggcgacctgtctcaggtacggtaccgtaccctacgtacgtacgccgctctcttcgttcgatctgctggccatgctggatggtaatggtgacacgcgctactgttgtgttgccgcagggcgatcgtgagggccaactgctaccacagccagggccacagcgctccctgcggcgccggcggcgaccacctctacatgctgctcttcggggcggcccaggcggtgctgtccctcatacccaacttccacagcatggcctggctctccgccgtcgccgccgtcatgtccttcacctacgccaccatcggcctcggcctcggcctcgccaagaccataggtgatttcgcattggtagatcgagcgagattcagtcaacgttgttattattgacgtacgcgcgggccctggatgcgaatgatcttggttggtgcgtgtatatcgaattaatccaccagaaaatggggcgatcaaaggaagcgtcgccggagttccgatgagcaccgcgccgcagaaagtctggcgagtcgcgcaggccatcggcgacatcgcgttcgcctacccgtacaccattgt

SEQ ID NO: 1569 - DNA, 394 bp, Zea mays
ggcccaatctttccctccctcatcaacaagcttagcacggcacaccttggtatgatgttcctctccaagctataccctataatcgcaggttgctccattacttcgcttagttcaaccttcagcacatccaggaagaaccggatcttcttctttatgatctcatcagagaagttaactatattcggctgtttcttgaacgctctctgcagctcaccctcggacaccccgaagctccggtaaagggccaccctatgcagccacttctccctactaatgcagcacaaggcgcggatgccgtaaggaaagcgcttctccgttacgcccaagccgagctccttgagggcctcgaagatctggcatatgcggtcgggcgacatcatgagcacgcccatct

SEQ ID NO: 1570 - DNA, 832 bp, Zea mays
cataaaatgtcttgtattgaatctttggtttcagttccattatgtcttacacgtgtaactttgtaaagctatgaattttatctttttgctaatattcttatttgtgcatggtcctcagcaaagaaggtctgactagccttgttgagtacaacgaaaagaagatgtttgaggttaaacttaaggagataaagtcaacactgactgctatgataaatgatgaggctgcaatatctgaagtgattgagactgtcaagcagcaagttaaggatgctaaatttcctgatttagaggttattcgcatgttgtgggatgtgctcatggaggctgttcagtggtctgggaagaaccagcagcaaaattccaatgcagcacttaggcaggtagtgttgttaaacttttgctttctttacaagtacattgagtacctaacatgaactcttgttgatgtatgacttacattacttgttttagtacttttaaaacttgatttaacatggtgtcttaaggttatgaatataaaacttgaaaatctggtttttagcaaggatacttgtggtgtttacttagttttgtatggtttaagtgtacgagctttgtgttttgtgagttgtaagctcaaactgcactagcagtagaaactgatacaatctaagtaaaaggattttaaaatttcaagaggactgcaatggctgatttccatttttctatggttgtaattttctgtggatctatattactcttatcaagatgttcaaagttttttctccatttgcactcaggtgaaagcttggactgagcttttgaatgctttttgcacgagtggcagactcga

SEQ ID NO: 1571 - DNA, 547 bp, Zea mays
gcccgcagcagctctagcgcaagctaaggacgactgcagctacactgtttgtttgttgtttgttcaagaaagcctgtaggatcgatcggatcggatcggatcggatcggacagagcgagctatagctagctagggctagctagctagatggcgaggctacgcctggcggtggtcgccgtcgccctggccttgtgctgctgctgctgcctcatgatccacgcgccgacgataggtgccgctgctgccgccgacgccgccagctcgtttcctcctggtaagtatggtgtggttgtcgtcgttgtctcgctcccaggatttctgtagctacttaattagccagtttctcacgcatgcaccttataaacaatctgatcgtcgagcaggactggaggtggcggcgcagcagcaggatacccgagtggcggctccgccgccgccgtcgtcgtcgccgggcgcacaacaccatcaggtggtggtggctaattcatcgatctagctgtataataatagttaaatacactctactggatcggagtgacaacttcaa

SEQ ID NO: 1572 - DNA, 636 bp, Zea mays
  misc_feature (631)..(633): n is a, c, g, or t
tcttcagcgaacagaggtatgcaatttctgccctcctggccgctgtttgtcttttagttttgtagttgtcccatctcatgacatgaactacaactgtttcagatggtgggaaaattaaattccaaggtatgcggttggttgctatacgtacagtaagatgtttaacaaatgttgaagcttttgtactcagagcaagtgatctggaagaagtcacctcgcagtttgctcgattcctgcgtaatccacgagtgcagggagcgatcaggtaggcacatattggtttacattattatattattatcacatccctgcccgccagaatagttagggctgttcttatcattgtttttgctaattcatggcaaaatacgatattttttttgataaccatgtatcactgcgatttaagacttgttaaattcagttccttccaactaacctctgtccataggtatgaatccccctactggcgaaccattgctgcaactcgtattcaggttgcatggaggtatcgtaaaaggcggctgaagcgagctgagaagtcgaggttgagcgaagagacttatgcctcacttggatcttgacacatgattcttttcagcgtagacggaggggatgattgatcgctacnnnact

SEQ ID NO: 1573 - DNA, 1299 bp, Zea mays
tgttatcattttgacacatcgaatattactacagcaataggtattaagtttcctgtcatttgactctttaaccacagggctatgaataatcatcttgacagttacactttattatttggttgagtgaatcccttttttatgaggaagccattctgcagtcacaccactaaacattataatattcttttagggttgatgaagtatcaatttccatggagcgatttttctatattttatgattgaaataatataaaaaactcgacctgcggggggtaagacaatccttgggtattgtattaagaagaagacctcacataggtcaagaaaactcctgaacccctacctcacccatatgcagcagcaccgtagtccatgtgagaacgagtgaacgactgaggctgagtcttagacctgtgctttggcgtgagacagacatgagaagtgccattgctgcctaaccaagtcagctagaggcccttttgctgaatgaaataatataatagctaacttataaatatattcttgccatcaaaatacaaataatgtgtgctctgtagaatttctttctcttggatcgactacactcagatgctttccttgtaatttgatctctcagtttgtttctgagaatactctgtataaggacttctgtaattacctaatgcttacagtctactggcagatattgcatttgttgacagggcagacattaaggcatatgtcggaccccctacgcttcaagcacgatacgagatcttgaggtcatgcatacaggaactcttaagagttggtattcttacatatcctcaggtatgtcctgcattgccagcttcgtgctcaacgtgccaactttttcatacagtattactgtcactgtatcaacctaccagagctcacgatggttgctttgatcatgcagcactatgagcatttttttttatcgatctcagtggtagcactttgcttttcaattttatttattgcaactactgtctactggtaaccttaaaattctccaattgtagggtagtagtgtgccatgtattctgaactattcgaccctgaatgagaagaaacactgtcctgaggctgcagaaccccatggtgcgcttcatctatccaatctactctatgaagcctcaaaactgtgtgaggtaaataatgaagctgactcgcgtgctgtttttttgtaaccaaggcttctccacctctctggttaaatggtggtggttcatctctctttgcagggacttagtggccggtcattgaggaaactccctttcctggcacatgcctctg

SEQ ID NO: 1574 - DNA, 799 bp, Zea mays
ccaggggtctctccttcttggtagcccctcttcttgaggcctgacccccctcacccccatggagttttagttggtagtgtgagtgtttattcatggatgttgtcatttatgcgtgctgtcggcctccataggaaggtttctatcttgtaacccaggtcttctttagacctttcttttctttttaaatatatttaaagcgcagctccctgtgcttccgagaaaaagaagactagaaccttttgattactcacagagctgagcttgttgtttaatccatcctataactttacggtataccatgcttactagcaaattttatcatgagttctgtaatgtattttgggtgctcgaaaaccatttgctgtttagacttttagagtgtccgcttccgttttcagatattacgccaatgtttcaatcatagtgtgcttactgcaaaagttgcagtgtgccactgtgtgtgcaactacaatttgttttagcttcaggcagatagtgaccgtactctttcacttgtacacatgtccacaagtgacaaagtcactaacctgatttttgttatctgttaacaggaactgcaaatcagaaggggcaccttaagagaaaatctgctgcacactagtatgcaaattccctggtagttctaattagaatgcaatactactaatgatgacggttttctaggagagaatgtatatctgcatttgatgggagcttcctgcatgacgacttctctaggagagaatgtgtatcagcatttgacgggagcttcctgcatgacgacacatcaggcctatga

SEQ ID NO: 1575 - DNA, 377 bp, Zea mays
gcgtcaaggagtgcctggtaaccgagggaagcttttttgaccgtggcttcaagaaatacctggtgcgaatcgagatcataggagaagatcgggaggcatccaccataagatcaactattgagtacgaagttgatcaggagcatgcaggcaacccccctgttgccagtgccagtggcttggctatcgctaagccgctaaggccatcgtagaatatatcatcaagcagaagaagaaaggtcctcctgagtcctgagtaattaagctcacatcacatgtaatcaactccgggaagaaaggatattatattatatcgtgtatatgtttgatcagtgaagaaccgaagttaatttgtgtctaccaatgaacaaatagaatac

SEQ ID NO: 1576 - DNA, 378 bp, Zea mays
gtttgcctgttcatgcatgctcctcgtgacactcatatgtctttgctgaaacgcatccttcgctatgtccgtggtaccttggactatggtttgcatatctatcgtagttccagtcttgatctgttggcatactctgatgctgactgggctggatgtcctgacacccgacgatctacatctggttattgtgtttttctgggtgccaatcttgttgcttggtcgtctaagcggcaacatacagtatcccggtccagtgccgaggcagaatatcgaggtgtggccaatgctgtggctgaaatttgttggcttcgccaattgttgactgagctttgtcatcctcctcgtcgtgctgctgtggtcttctgtgataatgtcagc

SEQ ID NO: 1577 - DNA, 415 bp, Zea mays
gtgctgttttgctgcatggtggtggtggagaggaagatgcagccattgccgccgcctgagcgccggagggtcgttcgtttcgtggtcttcatggccgtctccctcctggccctgttctgctgggctctcgtcaattccaggatcaacgtcgccatgccttactctgctttcgtgatgcgcgatgtcgacaagacgcccgcattcacaggcctagaagacaggcagaggcaccccgccggcgacccagcgtggacctcggcggcgccgcaggccgtgccggtgaccagtaacgtcacggcgggctcggtgaaattgggtgatccggtgctccgggagccgctggcaggagaagcggaacgggaacggagcgagaggtgcgacgcggacagcgcggcgctcagggtgtatatgtacg

SEQ ID NO: 1578 - DNA, 215 bp, Zea mays
gctttcagtcgtttgttgcagctgaaacactgcatgcagtctgcagcatactagtaccgttaccgtccgtaccggctctgcacagtttgtaaatactcgagtaattattatcgtcgccgcagcagcattgtgttctgggtaaatcatgcaatcagatcagcttagctcgcctgggacgtgaatgcgaaagcgaatgtgaatcccgagaaatgtat

SEQ ID NO: 1579 - DNA, 447 bp, Zea mays
aggagcataccgctgcactagcgacattggtctcctggtcgttcggtctgttcgtttctggcgttgggctaatatataggccccggccagccgagcgtgagccttggtgtggcgtgcgtgcaaaacgttagatcgcccgtcccgctgtccatgtcctccgtctaccgtctaccatcgacaccacctcgccaggcagcgcgcaaaacctctcccatccgatcctgctctccgctgtcttctcgaccgtacgaggtaggaggtactagtactaccaccatccaatgctgacgcacgcgtagggcatggctcttgttgtgacgcggcgcagtgcgtgcatggaccagcggccgccggagcgcaatgcgaagcgcgcgagggaggaggagatccatgccgcgcccgcgcagccggacttccccttcgaggaggaggaggaggaggaggagg

SEQ ID NO: 1580 - DNA, 401 bp, Zea mays
caggtcgatatcacagcggaaccgtccccatcaagtgagcgtggaagctgatgccaacggccactgtggcgaagacactgatgatgaccaccaccacagggacacaggtcgctacggtgtggtttaccacctacatcttgaaggcatcgatgtgtcgtataggatcgatcagggctccaacatcttcgtcgaggacgccgcccttcttccagacgccgtccagaaacggcatggttatttggcgtggagggacaaacttcttggcagcagcgttttgtagcgtggccatggcgctgcgttttgttatcgttttcaggagtgctgcagtatggtgtaggatgtcagtagtgaactagtgatgccaatgaatttgaatgtggtggcgtctagtatctgaattg

SEQ ID NO: 1581 - DNA, 444 bp, Zea mays
cgtccgcccgtccgtgtggagcagcaggggcggcgtcggatgggatggcccaagttccggcgtcatcctctgccgcggcggcggagttttcggcttctgatacagtgattatttacactttttaggacaagcgtggaaaacgcctttaattagattgctagtgcggataaaaaatggtgaaaaaggtcgagagcagccgtctcctgtccatcgatcggccacgacgtgttaatttgcttgcaaggtctcccatcactcatactggagtactcatcttgtggttgtgacattgtgtggttaaatgcagtcatgaagagagtccacgcaactacgcaagggcaagggcctctgggccagttgtttcgacgtaaaccaaacagaagaaagggctattcctaaatcctactcgtctagccatcttgtctatgtgctcggaagccaaat

SEQ ID NO: 1582 - DNA, 813 bp, Zea mays
atctctcgctctgcttttcttcttacacatgttcattcttttgatcagttcaactcacaagtccaggataagccaagccagcttgactcttctctgccctttgaattttgctactctataaggtatcttcatctattaactaacagcctctcatagttatatctacacttactgtatgctgtacccaatggattcgttgctgcacactccagtccaaaggcttctaccaatcctccgaacataagcttcacggcggaaggtggaagcgtgtttcctgtcaatgatccaataattaccattacggactctgtatctgtaagatacaactgtcactctatgctatttggttatatcgctatccatgtacatgattttgttaatttgcaactacctctctctctctctcacacacacacacacacgcacacacacacacagaatccgatggcatattgcttggctgttatgaagagcgaaggtgttaacttaatagggggtaagcgccttctgcattcaaactcttcaaccttctgtttcaactaaactcttcaacattcgtaccttggctggtcattttatatgcagagaattttatgtctgggctgaaggtcgtgtttgatcgagagaggaaggtcttgggctggaaaaactttgattgtaagcaccatcatatccatctagacgtttttttacagattaaatttacaagagcttcaaactagagcaatgccgttacatgttgtggctgctgacatgccatgccaggttacagtgtgggcaactcaagaagcaaccttccagtgaacccaaatc

SEQ ID NO: 1583 - DNA, 776 bp, Zea mays
  misc_feature (769)..(772): n is a, c, g, or t
acgatgctttctcttactagaagcacatgccacctgtcgcaattaccagttcattatgtgaaagtatttatattgtatagcacggtaaaatttgttaatagaatagggatgtacatgtactagagctgtggagggtatttaatctagggttccctaactggcagttattttacttatgcaaattaggcacggcagattcacaggagaatacgtgtggtccgcttggagaccacgactgagaacaaacggtttgttgggcttatcattccaaattctgcagtggagtctgtactcgaaggtcagttgtagcgttacctttttcaaagaagaattcccatctgctgcttgcacttttatctgcactcctaacaaccggtgttgaatttgcatgcatggctagaaaataatgtcagcagactatagatgctactagctgttgctccctccagtcacaaattagtgtcattgtatgaaaaacagagtaaataacacaccctctttagtattgagtctcggcgtctggggcaggcggcctaaccctagtgccaccacccctctcatcactccactccacctcactgctgctggaagcagttggggtctcattcgctggtggaaagtgcaatggtgtacggcaggcaagtcctgtatggatgttgtttgtgccggcgacattggtggtctagcactgcaccgggcgtccgcatgagtcaaaacacccaaagtttatttataattttgctttctgaggttatgatgacatccaggnnnnaatg

SEQ ID NO: 1584 - DNA, 441 bp, Zea mays
ttctgaccgggaactggatcattctagtcgtgaccgtgacagagcccgggatcgttcaaaccgggatcggtatcattcaagccgagaccttgaccgtgacaaggatgccagagattatcatcggcatgagcgtgatagcagggatcgtgagtactacaggtccaggcattcagaagaaagacgggacgacagaagagatcatgaaagtagcaggcacaggcgctctagctctcgccacaggagcaggagtaggagccgaagcaggagcaggagtaggagcaggagaagccgcagccgaagcacgagcaggaggagcctgaatgagcagcgatccagcccattcagggatgcaaataaagagaaggcagccaccgtgtcgagcaacctagcaaagctgaaggacttgtacggtgacataactgcaaagaaggaagacagtga

SEQ ID NO: 1585 - DNA, 358 bp, Zea mays
cggcatggcagaactcctgcttcgtggattggccacagcttcagtggacagcaccacgggcgatatattcaagagcgcatcttctgtagctgctgctgtgaagactgagctagaaaattatatgcttgtgagaactgaatcgcttatccgtgagtttgtcgatggagcccaggatcattcagatcaattgatgaaagcctccacaaggccaaccgagttcctatcagacttgattggcgacttcgtggcatccaaaaggaacttgctgagccatgtgtctgggtttttgtccagtgaaagccgcttgaacagaattaaagattttatgcagaagatggagatggagaatgtgtggaca

SEQ ID NO: 1586 - DNA, 390 bp, Zea mays
gttctctctgcaaatctacagaagtgctttttagtctgacaatgaccacatatgttgctacctgcaacttgttataacagtacgagtgtttggtggagggttgtggtatgaaattgaagagttacaagagtcggcagcagcatctcatcgataagcatcagtttcccaaatcatttgagttcttcaaaaaggcacgggactcccagcgtcagcggcagaagtccaagaggaggcagattgctcacaagggtgaatagacaagggataattcgatggacgtcgacggaaaaggtgcaaggcaaacaaaacggaggtaccggctgaagcaacatgatcatagcgaaccgaaagagaacaagcagcagcataaggaggccccggatgttaaat

SEQ ID NO: 1587 - DNA, 358 bp, Zea mays
  misc_feature (216)..(218): n is a, c, g, or t
gacgccgggatgatgaagaggtgggccgaggagagaggcgaggtgcagagtccatcgccgatcaagaatcgtagggtatcggattattgactcgtcgatctcgcgcgtgccggtcggttcatgtaaaagtgcatctacgccgtcattgtttcggcgccgttcggttgttacggattgatcggtcggaaaacgatttctaactggattgcttctctnnnatatcagacttgattggcgacttcgtggcatccaaaaggaacttgctgagccatgtgtctgggtttttgtccagtgaaagccgcttgaacagaattaaagattttatgcagaagatggagatggagaatgtgtggacacg

SEQ ID NO: 1588 - DNA, 346 bp, Zea mays
tacatgagagaagaattccatgccattacattatgcaaggcacatgcctgcctccataagaccacagcaaacatgcatgttgtttagggtgcagcacagttcttgcctgatgataacaaagccattatccatgcaatgcattgttacgttgcacgcagagttgtctcgcccaatggccacacagcctcctcttaccttgggataacatatacaggcacatagaatccctgcctgtacgtacacgcagtagccagctactagtagaagtatgcaccaaactctgctgcccaaataccaactgaactgattgatctgatctgatcaacgacacaggcgagatcatttg

SEQ ID NO: 1589 - DNA, 353 bp, Zea mays
ctctcgagcttgttcgcttatgccgaaaaagggtatctactttttctacagtattttgtctgtataaattagtataaattacagctgcaagcctgcgacagtctgaacagctggcttatagccgcacgtcatctgtaagagcaagtttaataatagagtctattattggctctaacttcttactgtgtcatatagagccaacaataaacacactcatgtaataaaactggctttaagattggctcttagatgaatttcttgtctcttatctcttttatctttttgtcttgaaacctgtgtagcacctaactcttgcatgagagctcactacctctatttttttatgtctctct

SEQ ID NO: 1590 - DNA, 316 bp, Zea mays
  misc_feature (13)..(13): n is a, c, g, or t
  misc_feature (206)..(206): n is a, c, g, or t
  misc_feature (209)..(310): n is a, c, g, or t
tcggtctcctganggcatcttctcagttaaatcggcctacagagcacaattcattggctcgtacagtcaccttaatgctaaccttgtctggaaggcacgcgcagaaccaaaatgcaaaatttttgcttggattctcctgcaggaaaaactactcacggccaacaatctcgccacccgtgggtggcctcatcaatcgtcttgtgccnttnnnnnnnnnnnnnnnnnnnnnnnnnnnnnnnnnnnnnnnnnnnnnnnnnnnnnnnnnnnnnnnnnnnnnnnnnnnnnnnnnnnnnnnnnnnnnnnnnnnnnntacctc

SEQ ID NO: 1591 - DNA, 615 bp, Zea mays
ggtctcctccgtgatctttgatctcgacggcactctccttgacacaggtacgtacgcacgtgtatccatccacccagcctcctcgccatcccgctcccgctcccgctccgtgtggagtacgaccgatcagatagctgtgtcgtgtcgctgtgccgtaataactgatttgcatgcactgctcgcgcaaatgcgtgcgttgtcttggcgcacagagagggcgacaagggacgtcctcaccgaattcctggcggcatacgggaaggtccccgatgcgggggaggaggagaagaggctggggcagatgtatttggaatccactaccgggatcatcagagactacggcctgccgctcacggtcgacgagtactccaaggcgatgtatcccctgtacctgaaaaggttcctttttcacttcttacatgtacataacgcttgccagtctaatcgcttagtagtaataggctggctcgctttctcctactgtcctactacaggtggcaaaaggcaaaaccgcttccgggagtgaagaggcttgttaagcatcttcacaagaacggagtgccactcgcacttgcttctaactccattaggagaaatgttgatcacaaacttccg

SEQ ID NO: 1592 - DNA, 611 bp, Zea mays
catgcgccctcctcagctcttccacacaccactatctggatgtcaggtgcgtgcctgctgatcgatcatccatccatcccatgaggccatgatgcatgtgatttatttgtactagcaggatgtgggaggattttgacaagggccatgtcgccggtgctcggaatgttccctactacctctccgtcactccgcatgggaaggagaagaatccccagtttgtggatcaggtttccgcgctctacgccaaggaccaaaacttgattgtggtaatgcctgcctcatactgtgtttacataattaattgatttcatttgccgctaaccaaaccaactaactaacagggttgccgctctggcatccggtccaaactcgccactgcagacctcgtcaacgcggtaagcttaccttaacctagtgctatctcatcttagatttacaactaattgttttttatatatatatttattataagagtgagtttattgtgtacgtgtgctgcatataagcagggcttcaccaacgtgaggaacctacaaggcggatacctttccttgctccgaagcgcaaactagctagcttcctgcttatttgttcgcatgcttgtaataagt

SEQ ID NO: 1593 - DNA, 470 bp, Zea mays
catattcaactgcgtaaggccaccctgtcatgcttgactggtcctcttgtgatatgttcatgttaatagcataatgtcttttgttctattggaaaataaaaagtctccctggactctaaaatcaatgcctgtgaacacatgaactgtttgtgtcacccatgttcctgtgctccttggcactttcttatgcatgctcaaatgtttaagaaagactcatagaagtgactcctattcctatgccaggtcattgagataccaaggggcagcaaggttaaatatgaacttgacaagaaaactggactgatcaaggtaaagcaatgttgttttcctcccgccgaagtcttattgtgaagctatatttcttgccagttctaatatttcctcctttccgtttcaatctgtgtgcatgtgcaggtggaccgtgtgctgtattcatcagttgtttaccctcacaactatggattcattcc

SEQ ID NO: 1594 - DNA, 385 bp, Zea mays
agtagccggtagcgacaagcaggtccttgaaggtgaagctgtgcgcgtagccgttggccacatccggcgcgaccttccttctcgcatcggtccctgtttccccggcaagaatcaagtacagcaatccaagccacaagacccaaccgaatgatgctgcggatgggaatcgagaacgaacctgacgagtcgtcgggcttggagggcttgaggtcctcatccacctccggcgcgaagcacccgaagcaacccaagcccatcagaccggcgcagacagatgctgtccaagaaggggggtttttttgtgctgccgcaacgcaacccgactggcactcccaagaacagagccgacgagcgactgagcgagaggagaggaggtggaagagag

SEQ ID NO: 1595 - DNA, 344 bp, Zea mays
ggcgatcatcggaggcggcacggacgagcagatcgagaggctgcggaagtacgcgaggtcgatcgggctgctgttccaggtagtcgacgacatactcgatgtcaccaagtcgtcagaggagctcggcaagacggcggggaaggacctggcaagcgacaaaacgacgtacccgaagctgctggggctagaaaagtcgcgggagttcgcggaggagttgctctctgatgccgtagagcagcttgcttgcttcgacaaggagaaggcagcgcctctgttgcatctggccaactatatcgcccataggcagaactgagaatttgaggtgactgcgtactctattgtcg

SEQ ID NO: 1596 - DNA, 356 bp, Zea mays
ggtcgcggtggtgatttcgccatgcctcgggacggatcggtgacaaaacccaagtttggccagaaattatggcacctcttgtttgtcttccttgatccggtgtccgtgcactacccaacaaaccccccttctacacctcaatgattggctgaatgcaggtgagatgcagaggagctcgcggtggatcctcctcgctctctctttgttctcaggtcccggctaagtgtgatgctatgggaaatcatggtgccttgctttatagggaggtcagaccctagcaacccgagcacatccaacagacgcgagcaacacagagatctgctatggtgtttgcgggattcagggaggagtttatt

SEQ ID NO: 1597 - DNA, 410 bp, Zea mays
ccgcaggagactccactccacagcacgcggcgccgtgcggcgagacgatgccaccacggagtcagcaggggagggcacatcgtcatcgtcgtcggaaagcctcagggtgagtaagcctaccgcgacgacggctccggcggggttttcgttgcccaaggactaccgccatactctgttcagctcggagtgcctggaggtgctgggcctggtggacctcgagtcactgcggaagcggccgaggctcaccattggggtgacggtgaaagcgtccgtggtgctcccggtgctcgtggtcctggcggtcctttacctctcggacgtgaccaagggtgttgtcgactggacgcatcatcacctggagaacgacgacgacgtgggggactagcttagttaaaggagtccagctctcc

SEQ ID NO: 1598 - DNA, 411 bp, Zea mays
cagtagcttctcttatcggtttatttgcaagcggcgagtggaagactttagagggagagatgcatgccttcagctcagggagggtgtcctatgtgatgacacttctatggactgctgtatcttggcagatagcttccgtaggagtggtgggtttgatctttgttgtgtcatcactcttttcaaatgtgataagcacactggctctacccatcattccgatttttgctgtgattttcttccacgacaagatggatggagtgaagattattgctatgttgatggccatctggggatttgtttcatatggatatcaattatatgtcagtgacaagaaggctaggaagacttcagtcagtgtggaggagaattcctaagcgcttgttggcctgttacatttcgtctttgtggctc

SEQ ID NO: 1599 - DNA, 430 bp, Zea mays
tttgccttaccgtgtgagtagcggcaatccacactccacagatcaaaatcatggtaaatcgtgttagatcgcctccctttgttggagcagcaatcccaatttatatgaatacaattctctatacacagaaaataggcaagtggctgctcgattgcaactctcagatcatccgctctgtcagtccttcagttcgctgtccacctgaagcccggacagcgcactagggggacgcactaggaaccgatgccctagcctccggcaccaaccgcgctccacatagcagccggcgctgcgctccagtcctccagctccaccgcgtctcatatcctctcgtcgaccaccattcccctctatctactctgctcctctgagcccaactacgccggcggcaacgaaaaacctggtcggagtgaaatcgatccagagaaag

SEQ ID NO: 1600 - DNA, 337 bp, Zea mays
  misc_feature (318)..(322): n is a, c, g, or t
gagaggaaaaaggaaatagaaggcatgttcattccagggatcggagtgctaatactgaaactaagaacaataaatctcataagatacctagcaagagatcgagctagacatgtatatatatctcggaccatgacgcctcaattccccggccacgcgcgcacacctcgcaccgtatctcgatctgcacccattcatgctccgcgcgcgccagctagctcgcagcgagaagcatatctgcatatgcagcagcacggcggtgcgagagctcaactaacgcgagctgctcaccggcggcggctcccttggatccccaggcgnnnnnggccaggccgttgca

SEQ ID NO: 1601 - DNA, 425 bp, Zea mays
tcaactccatcgtccggtgcgcgctgcggtgctcgagccgggtggtggtgggtcctgaaccgaaccaggtgacgcggcttgtccagagcgggctgaggaggaaggcgctccgagccatgccggtcctggtctactcgcctgggctgaggatcaatgctgccaacccgacgtgcgcgatctgcctctcggacttcgaggcaggggagcatgtcagggtcctccccaaatgcaaccacggcttccatgtcaggtgcatcgaccggtggctgctggcgcggtcgacgtgcccgacgtgccggcagtccctgttcggagtgccgcagaaggcctccggctgctccgaggcgagccgggctgccgagccagagcctgcgcctgcgcctgcgcctgctcgctctgtccttgtgccgctcagacctgaaggt

SEQ ID NO: 1602 - DNA, 371 bp, Zea mays
ctaatcaggtgcacggcatgattataaagagcgagttgtacttggatcatgttgtcaaggaggctttgatttccacatatgcaaatgctggggctgttcagctctgtgagaaggtgtttcaagaagtagatacagttagcaatagaagcatctggtcggctttcatatctggggttagtaggcatagcgtacaaagatcaattcagctgttaaggaggatgttatttcagtgcctaagaccgaatgacaaatgctatgcttctgttttcagttctgttgactcatctgagcttggcagacagctgcatccattggtcataaaagatgggtttattcatgttgttcttgtggcaagtgcactctccaccatg

SEQ ID NO: 1603 - DNA, 737 bp, Zea mays
  misc_feature (385)..(733): n is a, c, g, or t
tttgtagggcttcttgagttcttctacagtgaggcgtccacggggatgaagtctattggaagctccatcttctactgcatccttggggtgtcagcttggttggggagcctgttgattcaagtggcaaaccgagttacaagacaccgcgatggcacaggaggctggcttgatgggaccaacttgaacaaggggaaacttgaacgattctattggttgctagcagttcttgagctggtgtcgctattagtctacgtcttcttcgcctccaggtatgtttacgggaatgaccaaagggttgtggctgacgaagataataatacggctccatctgatggtaccataaatgttatctgattgttagagcgtagtggtaacgagactgagnnnnnnnnnnnnnnnnnnnnnnnnnnnnnnnnnnnnnnnnnnnnnnnnnnnnnnnnnnnnnnnnnnnnnnnnnnnnnnnnnnnnnnnnnnnnnnnnnnnnnnnnnnnnnnnnnnnnnnnnnnnnnnnnnnnnnnnnnnnnnnnnnnnnnnnnnnnnnnnnnnnnnnnnnnnnnnnnnnnnnnnnnnnnnnnnnnnnnnnnnnnnnnnnnnnnnnnnnnnnnnnnnnnnnnnnnnnnnnnnnnnnnnnnnnnnnnnnnnnnnnnnnnnnnnnnnnnnnnnnnnnnnnnnnnnnnnnnnnnnnnnnnnnnnnnnnnnnnnnnnnnnnnnnnnnnnnnnnnnnnnnnnnnnncccc

SEQ ID NO: 1604 - DNA, 434 bp, Zea mays
tatagcatcctgcatccaatccacagtagctgcggttactagctagctagtctgctccacgctgcagggcttttagcttaatggccgggctaagcgttctcctggagaaccacagcaagagctacaccgggaaggcggcggcggcgcagatcatcagcaaggccaccctcgtgacgacgacccacggccccaaccaccaccagcagcagcagcagaaggtccctgtctctgcggcggctgcgggctccttcctgcagcgctgctgcctgtgccacaaagagcttgccgagggcatggacatctacatgtacaagtaggcggctacatactgcgatctactgacccgtcgtccgcgccgcctcacgcgagcctctctgtctgtgtactcctaatatatacctgtgccctgactggcggtatatgtgatctgcata

SEQ ID NO: 1605 - DNA, 410 bp, Zea mays
gtatgcactaatgaatcatgagagctgtattgaagataacatttcccttcatttacatactgaggtccattgtttttcctttggacaactatgcatcttttcacttcccccgttctaaaaatctatcatcttggttgcaaagtctaatgctttggtgctaggaagaattaagttagttgcatattttgggctgaatcacttagttgattttggtaggatgttttgctgaattacgaatatgctattttctttttaaattacctatatgcttatcgcacaaacatttatatttttttgttatattatatgaataacttacaactcagtttggtattgaaatttgtattttagaccaaagacaaagtaagagtgtgctgaaagaagaaattgacctacttaaggtggaacca

SEQ ID NO: 1606 - DNA, 337 bp, Zea mays
gagctatcatcagccacaactgatgtaatcagccacaactattgtcttcgagacatagacaacagtcttatagcatggccttcaagctgtgtaagttcttttaattctctcataaagacatacactattttacaaactaccgtatttggattaaagttttgtgatttcagttgtagatagaaaaggcagctctttaatctcaaccattgaacatcaacagatcaacatgagggctatgactttgattcttcttaatttggcgttattagtgatgagagctatatgagtcttgtttatgagtcatcctttgttcgtttcatactgtcatagaaaaaat

SEQ ID NO: 1607 - DNA, 442 bp, Zea mays
  misc_feature (433)..(439): n is a, c, g, or t
tttctcttatggagtaatcccagatataacctctccatttttgacatctctttgctctttcaggagttggtgaaatttacacatatactaactaacgttcatttttgcaggtggagaacatttcatttgatttgtcacaatacaacaatgccccaagcttccactggcctgaaagcagcagcaggtctcagctccactgagtaggcagcaatgcaatcgtggatgccttccaaatagactaagttctgacagtcttgtaagggcttgttcggttattcctatcttctgtggattagatgagattggaaaaaaatatgaaagattttgacttgaaagattttgacttgtttgggattaaaacgcacccaattccactcaatctacatggattgagagcaaaaccaacaagccctaatttggaaaaaaaaaaaannnnnnnggg

SEQ ID NO: 1608 - DNA, 377 bp, Zea mays
tgctataactgatgaggtgttgtcctgacccaaacacaggttggcacagttggtggaggcacgcagctggcctcacaatctgcctgcttggacctgcttggcgtcaaaggtgccaacagggaatctccggggtccaacgcgaggctcttggccacggtggttgcgggtgcggtcctagctggggagctgtccctcatctctgcgcaggccgctggccatctggtcaagagccacatgaaatacaacagatccagcaaggatatgtccaagacccttgcagaggaaacagacaaagccaagaaatgctgaataatatgaagtagttgttctatagccctttgggagaaaaggagcagaaagggtcgtacaggatgatt

SEQ ID NO: 1609 - DNA, 412 bp, Zea mays
tgggacgcggtcggtggcgcccccatgcccgagcgcatcatgaagcccttctcggtcagctgcgtcgacagtaggatcgtcgtcgttgggcgaggcctccacgtcgcgattgggcatgtgcgggaggagcccgctggcggcggtcctggtagcaggggagcgccaggctactccgtttgctggcaggacgtggacgctcctaaggagttcagcgacctgacaccttcgagcagtcagattctgcatgcttagctgctcgttgagccagccagccatctgcccactggtaatccgcacaaggacttcaacctggttgggttggttactacgagcggtcagcggtcaactattgcagctgcctgcttccagcgcttttgcctttgatgagatgcgcaatcgagtaggatctttt

SEQ ID NO: 1610 - DNA, 220 bp, Zea mays
ctttgctccatgccgcgataacttcaggaagctcaggatgctgaggaggtcagctggttctgatgcagcatgttcatcgtctcaccaggacacaacacttggagcaagacagtcataggtcgttccaccgtacatacttatattgacaccagaaagctgattgtgatcatctagtttattacagacatgacaatagccaaatcgtgttcccgtcttgatg

SEQ ID NO: 1611 - DNA, 497 bp, Zea mays
ggttcgaggcgactgttgttaaagctgtcggcagcaagttcctcgtggagtatgctacgctgaaggccgatgacgggaccaagcctctgaaagaatctgtagaagcacggcacatcagaccttgccctccagatatccctgccgctgatggattcaaactacttgacgaggtcgatgccttctgcaacgacgcgtggtgggtcggtgtggtatccaaggtcctcggcgaggagaggtgcacggtctacttcaggccttggaaggaagagatggagttcgagcatgcgcagctgaggttgcactgtgactggatgggcgggaggtggatgcgggcttccccggtatgcttttcgattaaccctgttccctgcattggtacggactttttgtttgtgacacgcaagctcatttgcgaactggcaaccctttttcaggcactggagatgtgaaggctgaagagccacgcgatggcgttagacagtagcttggtgattgta

SEQ ID NO: 1612 - DNA, 383 bp, Zea mays
atttataaataaaactttcacgaaaatgaccttatgtctatcttgtagcagctagatggtccttttacaaattaaagctgctagtgcgtgctttgctagaatgctagatcttggctcctccgtgcagttgtgcattgcatcggctgatgcttgatgggcacgcagccaaaagaactcagctagctagctccctgctcccctgtttcggctgttccacacttccactttcctcggtggaatgtaatgtgaggaggtggtgccttttcggcttttcctgctgtgatggtgccgcaatcggttggtgtcacgtgtcagttgcgctgcgcagattacagaagcaccgacctgcacctgctggacgtctctaaagccatagcaacgtg

SEQ ID NO: 1613 - DNA, 312 bp, Zea mays
cgacgccgacgccgccacccaggcctccctccacggacgtgggcctccctcctcctcggacgccagcagctggcgccaagtctccaccctctccttcccccgccataacccccgccgacgtggctaccggtgtcccttccactctccaccctttccctcccttcaacgccaagtccatccacccttccgaatcttcgattgcctccgtccatgtaacgactccaatcaccctagagtccggactctagtctggtcagatccactagcctgcgcttccacgcctagctcacgccttcttggaccctgttccct

SEQ ID NO: 1614 - DNA, 446 bp, Zea mays
atacgagaagaaatgaacggacattgccaagccgtaaatcactcaccatgcatgcatcgcgtcgtgtgtgccatagggactagggaaggggtgggcctgtatatgcttcctgctggggaccccagaaaaagatgcccccgttgtcaaacttgccttccccgtgatcttcttgcgccagccttgctaattgccatgctgcgctgccgccgcccgccttcccttctctcatcagaataatgccacctccgtccatcaatccaatagtataatcacctttcggcaaaggaagaaaaacacacacacacaaaactatgtgatagattagcatttataaacccagggattttttttcataagtagtacatccagaattacctgtaggtacacccagtgcagattctggagtggacgaatgagcacttcttctctggggtgcaaaaaaaaaa

SEQ ID NO: 1615 - DNA, 353 bp, Zea mays
ctctgattgatatgtacaccaagtgcgggcatgttgccagagctcgcgatgtcttccaccggatggaacagaaggtggttattgcttggaactccatgatcagaggccttgcactgaacggctttgcagaagatgcaatcgccttgtacggggaaatggtaggagatggggttcagcccaacgagatcacctttctcgcgctgttgacagcgtgtacccatgctggcttggtagacaaaggcatggcattcttccaagagatgaagaagaacaagcagcatgcctctcctcaagttgagcactgcgcttgcatagtggacctcctctgcaagtctggcaggctgtgggaagcc

SEQ ID NO: 1616 - DNA, 512 bp, Zea mays
  misc_feature (502)..(504): n is a, c, g, or t
  misc_feature (506)..(508): n is a, c, g, or t
tgaatcgtacgtttgtactataccttcaaatctcaactgatgtaacggaattctgacaggatacgaaaaacgctgatgcatggttagcattggaggaaaggagagtgagtaagggcttgttcggttattcccaaaacacatggattggatgggattggaaaaaattgagaagaagtttgacttatttgggattcaaacccatccaatcccgctcaatccacatggattgagagctaaccgaacaaggcctaatatggagaagaaagtggatcttcggcgaagaatgttggagctaagaaagatgagcagatacgaggttaagttacattgttactcgataccgagaaactgactccgttggctcgtcgctactacatcaagaagcgaaagcagatagccgcagcggctggagttaaagttgacgatgaggagtgactgatgtgaagtactagctgttttactattgtttatccttttaccttttatttttagggctagtttnnnannnccta

SEQ ID NO: 1617 - DNA, 302 bp, Zea mays
tctagatcagaaaaacagcttccaactgaaattcaacgaaatcgcatcacgccgaggcaacagagagttgtaatccgataagatctagacctgattgtacaaagcggacctgatgcgcgcatagcgtatttattggagacagcggatgcgaggagggtaggggaacctggggagggctgcgaggaaggcgtggcggtatcgaccaccctgaccggcatccccgacagccgcggcgggtgacgtcggcggcgacgaggaagaggctgccttccgagaaaactgttgccggtcgctggctcgct

SEQ ID NO: 1618 - DNA, 391 bp, Zea mays
cgtcctccatgggcgaccgcgaccgccgccgccgctgcctctagggacgccgggcggggggagtgaaggctgtgctagagaggaagggagcgcgcgagccggagaagggagaagaggtgcggctagaactacaaagcgatcgagtctgcgacgtttggcagcggtgtttgcaacggtcacgcccgtacaggagcccggagctccggagcccggaacgggacggcacgcgtggcgtcggtcgcggtcgcgtctgtactcgccaacctttttggtgcggagcggacgcaggaggtgcggcgcgatcgcgggttcagtgcagccagtgagaagcaagcgacccgtccgagagtccaacagcgcgctggctgctgaccttgctttcactgggaaa

SEQ ID NO: 1619 - DNA, 481 bp, Zea mays
gaactaagcttcggtgcaaaggttctccaagctggcggtattgataaagtcttcagagaatactttgcagttgagaaagatgagaaactacggaaggctttccagtgctatctttcaaccacagctggtccaatagctggaatgcttttcatctcaactaagaagattgctttccatagtgataggcctttgagtttcacgtctcctaaaggaggcagtacaagggtgccttacaaggtaattgaagcaaaatctcttcgtcaatatgcatacctgaagtttatcagatataaaatgtgacctaaagatgtcggacaaagctaataaaatatgtaccttctgcaggtgttaatccccacagagaggatgaaaagtgcttcagtgcgggaaaatttatacaatccagatgagaagtatattgatgtagtcactgttgatggctttgatttttggttcatgggctttgtcagctatgagaagt

SEQ ID NO: 1620 - DNA, 518 bp, Zea mays
gcgttttggatgcagtttaaatgaatccgttcaacatctcttcttggattgttctaatgctagatgcatttggagaggggtacaaatctcctttaacatatcaccacctttaagcatacaacatatgtttggaaattggttgaatggggtggatgatacacttaagtacaaaatctggaaaggagcatgcaccttatgtggggcaatatatatggctatgtcaaaatgatgtgatttttaacaataaactagtttctactcctatgcaggtagtcttcagaggaacccactggacaagacaatggtccgtgttgcaaaaagaggaaaacatgatacaaatcaagtggggatgtcgtgcgcttgagactacaatgatgcaaattttctcatacaacggatgaagttttagtaatcgaattggtttttagagattacgaaatatggttgttcttaagatattaaacatcgtgtgttttggtttgagatgtaataattgaacatccacatgcatctattgg

SEQ ID NO: 1621 - DNA, 380 bp, Zea mays
atgggcatggtagccgttttcatcgtagaggacggatcatcggcggacacctaccttcctccacctcccgcagatttaccaaaatgtggatctaacaaaggaggcctttatttgccagaggaattctacctccaaaaatgaagagagtcacaagagacagtgccaagagcaagcgaaggaacctatgagaggacatgttggttaatagcactagtagtatacaaagtatatttagaaatgattaggtttttatgaggcgtggttttcataatcgcccctacctatgctagtaccctcctcccgaaggtcctctacagtgaatcacatatcactccctgaatcagtatatccatgtcccaccgtgtaatgtgttgtataag

SEQ ID NO: 1622 - DNA, 477 bp, Zea mays
cttggctccaaaaccaagtgggaaagaaaccttcgcctggaatggttctcatggcccccaggtacgaactgaaccagccttcgaatgaaagctattcaagctattcggttttcagtcagctgtttggctgcagtctcaatgttttttttctatttcccgtttcgttgtgtagagctgaggcctgcggaggtgtacttccaaatgcatctgctgtcgaggcagtcgtctgcagctgtttctcagcagaaccagctggtggagacgatccagagccccgagttatggttgcttcgggcgattcacctgaacccgtcctgccccaggtactggaaggctctgctgcagcaaatatatgtgtagccttttgtctcacatgtatcgtccatgcgcattctagcgggtgacacgtccgtcggacggtgatatattagttgagatcgctggggataagttggtggctcgcatgtcgtagtgctt

SEQ ID NO: 1623 - DNA, 268 bp, Zea mays
tgtttgctgtgctgggaatgtttcttttatgtggagtactttttgtatcaagatggaggaagcacaagacgaaagtcatatacgacttagagaaaggccggtacatcataacacacatcagctgatgctgaaccttgtgcagaagaactatatttatacgacaggaatagatgttgtgttgtacaacaatgtaccagttcaattatttgtgttttattttaggtagcagagctgggtgggtagagcatgaaatatagcacaaatgcga

SEQ ID NO: 1624 - DNA, 407 bp, Zea mays
ccggatttcaagaacgcgatggcggtgatcaggccaagcttgcagaagagcaaatgggacgagcttgagaaatggaacgaggaatttggttcgagctgacggcggctcgcactgcctgtgcctgatgatgatcaagcggtcctatttccatctgtatatatgatttatgtctcccacgctgtggctcacaacacaaggggtcacaccatgcgcccattgatgcgtcctcgttgggctaggcagcacaacatcgacagaagcagaatgtaaaggtatacttctggcaacggcctatacagccattgagggctagtttgaaacaccgttcaagggattttcatttttcaaagggaaattagctcattttcccttgtaaaaatgaaaattttttaggaaaatggtgttcc

SEQ ID NO: 1625 - DNA, 1141 bp, Zea mays
  misc_feature (382)..(431): n is a, c, g, or t
  misc_feature (433)..(458): n is a, c, g, or t
  misc_feature (461)..(461): n is a, c, g, or t
  misc_feature (463)..(479): n is a, c, g, or t
  misc_feature (482)..(483): n is a, c, g, or t
  misc_feature (485)..(493): n is a, c, g, or t
  misc_feature (495)..(498): n is a, c, g, or t
  misc_feature (500)..(525): n is a, c, g, or t
  misc_feature (527)..(530): n is a, c, g, or t
  misc_feature (532)..(549): n is a, c, g, or t
  misc_feature (551)..(557): n is a, c, g, or t
  misc_feature (559)..(561): n is a, c, g, or t
  misc_feature (565)..(575): n is a, c, g, or t
  misc_feature (578)..(591): n is a, c, g, or t
  misc_feature (594)..(615): n is a, c, g, or t
  misc_feature (617)..(635): n is a, c, g, or t
  misc_feature (639)..(643): n is a, c, g, or t
  misc_feature (650)..(650): n is a, c, g, or t
  misc_feature (652)..(655): n is a, c, g, or t
  misc_feature (658)..(659): n is a, c, g, or t
  misc_feature (665)..(666): n is a, c, g, or t
  misc_feature (675)..(675): n is a, c, g, or t
  misc_feature (678)..(687): n is a, c, g, or t
  misc_feature (692)..(692): n is a, c, g, or t
  misc_feature (694)..(705): n is a, c, g, or t
  misc_feature (707)..(707): n is a, c, g, or t
  misc_feature (714)..(717): n is a, c, g, or t
  misc_feature (719)..(725): n is a, c, g, or t
  misc_feature (730)..(740): n is a, c, g, or t
  misc_feature (742)..(745): n is a, c, g, or t
  misc_feature (747)..(756): n is a, c, g, or t
  misc_feature (763)..(766): n is a, c, g, or t
  misc_feature (768)..(772): n is a, c, g, or t
  misc_feature (774)..(777): n is a, c, g, or t
  misc_feature (779)..(785): n is a, c, g, or t
  misc_feature (787)..(801): n is a, c, g, or t
  misc_feature (806)..(806): n is a, c, g, or t
  misc_feature (809)..(812): n is a, c, g, or t
  misc_feature (815)..(818): n is a, c, g, or t
  misc_feature (822)..(822): n is a, c, g, or t
  misc_feature (824)..(833): n is a, c, g, or t
  misc_feature (838)..(840): n is a, c, g, or t
  misc_feature (848)..(854): n is a, c, g, or t
  misc_feature (858)..(863): n is a, c, g, or t
  misc_feature (867)..(871): n is a, c, g, or t
  misc_feature (883)..(883): n is a, c, g, or t
  misc_feature (887)..(892): n is a, c, g, or t
  misc_feature (894)..(895): n is a, c, g, or t
  misc_feature (897)..(927): n is a, c, g, or t
  misc_feature (931)..(948): n is a, c, g, or t
  misc_feature (951)..(955): n is a, c, g, or t
  misc_feature (957)..(962): n is a, c, g, or t
  misc_feature (964)..(965): n is a, c, g, or t
  misc_feature (971)..(971): n is a, c, g, or t
  misc_feature (973)..(973): n is a, c, g, or t
  misc_feature (976)..(982): n is a, c, g, or t
  misc_feature (987)..(993): n is a, c, g, or t
  misc_feature (997)..(1006): n is a, c, g, or t
  misc_feature (1009)..(1019): n is a, c, g, or t
  misc_feature (1022)..(1036): n is a, c, g, or t
  misc_feature (1038)..(1039): n is a, c, g, or t
  misc_feature (1041)..(1050): n is a, c, g, or t
  misc_feature (1054)..(1055): n is a, c, g, or t
  misc_feature (1061)..(1061): n is a, c, g, or t
  misc_feature (1063)..(1063): n is a, c, g, or t
  misc_feature (1071)..(1110): n is a, c, g, or t
  misc_feature (1116)..(1127): n is a, c, g, or t
  misc_feature (1130)..(1136): n is a, c, g, or t
tccgctaccacgagctccttccacatgttgacaggtttgtcatccttgaggccaattccaccttcaccggcatccccaagtcactctccttttacgaaaacttcagccgttttgggtttgctggatcaaagattgtctacgacatgctttctattggagagctggataccggttctcgtcgccaaccattccatgtcgaggcctatcaccgtcgctcactcaatatgctgatacgaagatcgggtattgctgccggtgatatcctgatcatggctgatgctgacgagatccctacccccgagaccgtgcagttgctcaagtggtgtgacgggataccaccggtaatgcaccttgggatgaagaactatatgtactccttcannnnnnnnnnnnnnnnnnnnnnnnnnnnnnnnnnnnnnnnnnnnnnnnnnannnnnnnnnnnnnnnnnnnnnnnnnnaangnnnnnnnnnnnnnnnnnaannannnnnnnnnannnngnnnnnnnnnnnnnnnnnnnnnnnnnnannnngnnnnnnnnnnnnnnnnnngnnnnnnngnnngagnnnnnnnnnnngannnnnnnnnnnnnngannnnnnnnnnnnnnnnnnnnnntnnnnnnnnnnnnnnnnnnnatgnnnnntttgttnannnnagnngtgganntggggatgntgnnnnnnnnnnggaantnnnnnnnnnnnnangaaaaannnngnnnnnnngtggnnnnnnnnnnngnnnnannnnnnnnnnagaaatnnnnannnnntnnnntnnnnnnnannnnnnnnnnnnnnnttttntannnnaannnntggngnnnnnnnnnntttannntaagatgnnnnnnnaatnnnnnntttnnnnnttattttatgtngggnnnnnnannannnnnnnnnnnnnnnnnnnnnnnnnnnnnnnatannnnnnnnnnnnnnnnnnaannnnnannnnnntnnaaattnantannnnnnnggggnnnnnnngggnnnnnnnnnnagnnnnnnnnnnnatnnnnnnnnnnnnnnntnntnnnnnnnnnntttnnatgatntnaataaagnnnnnnnnnnnnnnnnnnnnnnnnnnnnnnnnnnnnnnnnggggtnnnnnnnnnnnngtnnnnnnnttttt

SEQ ID NO: 1626 - DNA, 419 bp, Zea mays
tcaaaactaaaggataaattagacatgacaaacttgtcatatggtgaattagcaaaggtaaagttttctttatgttttgcaatatggatttcttgatttttgttgacaatctgtcttttcccctttcaaaggaacttaaatcagttcaagatcaactagcagcagagggttcaagatgccagaagcttgaggtgctaaagttaaacatgcaattgattctctgatcctgaaaatacttattttccggtttccttcttatgcttctgattacttgcctttttatcctgaatctgtcaacttagtcccaaattgctgctgcacggaagagactggaatctgctggttctttggagaatgaactagaagtattgcatcaacatatatctcaggtggaggaaaccattgcaactactcagaga

SEQ ID NO: 1627 - DNA, 929 bp, Zea mays
tgaaacaagtagaattattttttattgcatacatgaaatggagaccaccataatcagtaaccatctgtagaagaagtggtggtttctcatcttccgtatctttcaggaagagatgttttccacttctcccagcaatccaagacaaacgatacgccatcttttctaatttgttggaaccacgaagaagtggtatctgccagtgcataacagaaaccgaatcagtcaaatatgtggattcttcatggctatgcagccatgagacctgtagcattataaacttatactctttgatccgttaccatacgggttatcttagatttttttctgaagtcacagagaataaacgccattatctttactagctcagtgatataaaaggccatggttgaactatagcatttgggattgtaaatacgtgacatttatgaagaagtaacacggggtaatagtattgatatgaggaaacaagtacatgcatttagtacaccagaacaatcatgtcatgtgagtcaaataaaagaaaacaaggacaccttatgttgtagcaccaataggaacaaatttattgaggaaaatgaagcatctaactgattaccttctttatagaactcagtttataattagtacccactcccctgtataaaatatgatcaacaatactattcaaaatcctacaaattcaacatggattatatgattatatcacaactataccacaatacgcaggttacaaaagaaaataattcaacaccaacttccaaatcataagtgcttgaaattttttaacctaacctgtttgtgtgatcttgtaccgaggtgtggtgttgcaaaagtgatgaagttaataggctccaaaccagcaattttccctttgctgtgctggttactagaatagtcaacagcatggttctcaaacttttcatgagaat

SEQ ID NO: 1628 - DNA, 563 bp, Zea mays
gacctagaaagaaccgatatggatccagagtcaagagtgacacggtatatcctagatctcctgattcgattgtgaaaatatctcagtctgacaaatttatttcgaccttgcttttctaacatgttatctcgtactatttaaggcttcattgtgatgtctgactttcaattagccctttgttccgcaactgtaaccagttggtccatttgattcacagttctatattgatccaatcaatggatacgaatttcactctctcaaggatgtacaccgctatcttgaatctggagacatcagtaaatgtattagattgccaaacaagagaaaaattgaggacctgcatactaaagaggaccaatctcatcatgtaagtttcatcttcaagttttggcccacatctgaatttgccctcgatcttgtgttagctgcaacattggattgacaattggattcaaatcaacaaggagttaattcttaaggtagtatgattctttttaaggcaaaggtttatgaatttcatttgaactattttaccatccccccgagaagtactaagaggttac

SEQ ID NO: 1629 - DNA, 381 bp, Zea mays
tcgcacaccaatctcgccggctgctgcccttcttggtgcactcgccctcacctctactccagcggcgctcggcgcacgtgctcggccatggcgtcgggatcccgcactctgtccatgtcgagctccctctacgtcacgccctcagcgcctcgctgtccttaggcgtgtgttcctcagccccatggccacacccctgctcctctccatccatggctgcgctctcccctccgtgctcaagcttgccctcagctcctggccatggagcttgccctggcccctgcgcgctcattgtgggcgctcgcctgccttgttcctctccccaactagagctcgacgtcggcacctaggtaggccgtccctgtttcccctcgtttctcccta

SEQ ID NO: 1630 - DNA, 564 bp, Zea mays
ctgcttgcactaatggggccatcgggctctggcaaaacaactttgctcaatgtgctagcagggcagctcgccgcatcgtcttccttgcacctttccgggtttctgtatatcaatggtcggcctatctcgaagggcggatataagtaagttgtgttcatgcagctggggtcttatttctgctcttgtttgtggaaaggagctaatgactatctccttgtgcagaattgcttttgtcaggcaggaagacctgttcttctcacagcttactgtgcgggagacgctctcacttgctgctgagctccagcttcctgacttgtgggctcctgagagaaaggagagctatgtcaatgatcttttgttacgtatggggttggtgagtgctagaattttgattattgtttctagaaattgaagtgaacggttcggaggacagtcttaatggttggatcgttgagtaggtcaattgtgctgattctattgttggtgatgcaaaagttcgtggaataagtgggggtgagaagaagcgcctctcacttgcatgtgagttgattgctagcccttcag

SEQ ID NO: 1631 - DNA, 382 bp, Zea mays
tctgcggcccgctcgtcgacgacgcctcgctcgtcggcctgcgcaagaagaagcccgcgcgccgcctcatgcagctcctgtaagcggtgcttccacgtgcactacgcccggacggaccgcgcaagcgatggtgtaatacggctggtatgtgttttttggtttggtgtgtgcgtgcgtggtatacgcgtgccgtgcgcgccctgtggctgtggctgcagtggcgtcgcgttgggtgttttcttgttgtgacgaagaaaaaagggtatgggttggggtggtccgctggccggcgcaccgggtaaaagacgagaggttttaatcaacttatattaacctgatggggtgccagactcatcaaggtgaaggtgacacgggattaata

SEQ ID NO: 1632 - DNA, 734 bp, Zea mays
  misc_feature (668)..(676): n is a, c, g, or t
  misc_feature (697)..(698): n is a, c, g, or t
  misc_feature (702)..(730): n is a, c, g, or t
ctctactgtttctttctctgaccttgatgataagggtgatattgaatatgctgataactgtctagattcaaagagagagctacggccccaaagtgtagatcccaataaggactaggaattccgtggtgtgctgagggtatggactatggacataaaaactggacatcctatatcgtttatatgaattctgcctgttgttttgtttttgaggagcactattttacaattataatctgttttgcttttgctaggtggcgaatttggacaagtgcctatgcaaaaaaaattctaggaatgggcatgcagtaactgtttttactgttggtacgagtggcgagtggcatgtttgaccagagggtaattgggcctgaggatttgtcaaagccagcttagtggcaccacattgctgtccataatgaccacataggtgcttagagcaactccagtagttctctaataaactttctaaatcaacaatttaagtagctaacacaaaaatttatctccaacagttctctaaatgaactttctaaatttaacaacttctcatctaaccttatttcctctctacatttggcaaccatttagcaactccctaaacaaaaatgtttactgcattatgtagataatgaaggtaattgatgacatttttgactttatttttttannnnnnnnnatacaaaacataactacaacnnatannnnnnnnnnnnnnnnnnnnnnnnnnnnntttt

SEQ ID NO: 1633 - DNA, 244 bp, Zea mays
acgcgaggaaggtgaaggcatgttggtggtggcgacacaattcttgcgtggtgtcaagaaaggtggtgtgcaggtgaggatcggttgtgtcatggcctttgacctcgtagaacttggctgggtcatgctcatgtcctttgagctcacagagcttggagccaccggtcaacagtgacacgcgtgaaagcagcgttgtcgtgttcatcatagttcgcaatagagttcagatgatataatagttggt

SEQ ID NO: 1634 - DNA, 429 bp, Zea mays
  misc_feature (408)..(408): n is a, c, g, or t
tattgactgcagttctcaatgctgctatttttaatgagaatggtgatacggtctaaagtatctctccttgcagtaaaatacaggaaaatctgaaggacttaactgaagatgaaggcaaccaggggtagtcatatactcatattaatttgtgtcaagatacttgcatattgctgtcactgtttcactttttaatcatgtctaattgtctattattcctgtttaggtggctattccttactgaagatgacatcaaggggttgccctgctttcaggtttgcttacatgttaaagaaatcccaaattatggccttttccaaatttcatattatttctgactattcagagtaaatttcatcctatgtttgactattcaggctgtctttaataccaaaaataactaaggatagntgattctggtgtgaactctga

SEQ ID NO: 1635 - DNA, 334 bp, Zea mays
  misc_feature (303)..(306): n is a, c, g, or t
  misc_feature (320)..(326): n is a, c, g, or t
tggatctgattcttttaggaaaagagacagcaacagctttgcatgcaggtccaagggcgctgggatcttggaaggacatgtgtggagcgcacgtttagtcagattaaatgactgtttgtcctgttttagaatataatcttgctcatcatcaaccaaccaaaatagagcttttcaatcagcgagtcattgagactagttctattgtgtagaaacaagtgtctgaagagcaacacactgtctctttctttgtaaggtgtaagtttttacatgtgagatttttccaggttatatgcatgcatgccnnnnactacctactcgcnnnnnnngtgtgcgt

SEQ ID NO: 1636 - DNA, 516 bp, Zea mays
gcaccgacaacgacgcggacgccgcggcgtccgaggaccccgcggtcgagctccgcgaggcggaggttctgccctcggccgatgccatctctagcttccctgccgccaagcgccgcgtggtcaaccggccgcatgcgtccatcctcgcgctgctcgaggccgaacgatctgcttgttccggcgatgtccctaccgtggcactgccggcgctagagaacatctcgcacgggcagctgcaggtgctgtctggggtgcttccggaccacccatcccttgcgacagaccccgacaagccgtccttgtatgtgtgcacgccgcctcccctcatggagggtcacggggtgcccaagcagttccagggtcgcttccatgtggtgcccaagcactcaggtttgcttttcgtctaaacaaggatagctgagctgtgctggaaaatgtgctaatttaagtaacctatgtattttggtttgtaatttgtagattggttctccccagggacagttcataggctggaaa

SEQ ID NO: 1637 - DNA, 227 bp, Zea mays
ttgtcgagttttgaggataaaagtagagaggatgatcattgggttggtggggaacccagccaggtgaattcctcacatgggaggaggctgggtctggaaggaaaaataagcaaagccacaatggaaaatgaaagatcctggagagattttgaggagcgaagagaaatgccacaagcaaggctctttgatgctacgatatatgcatcaagggaggaagatcatctaaa

SEQ ID NO: 1638 - DNA, 395 bp, Zea mays
ccgccgaggtcaaggagttcctgcgcaagctcgtcggcgccaacgacgacagctgatgatccggcccgcgattcgtttccctttcccaccgtgaccagctccgagcctccgatccgcctgtgtcaagccgctaactcaacctcggctacctacctgctgcaccggcagagggcttccttgttgttgcaactgcatctccatcgagcagcttgctttgggacaagaacagacctagctagtagtacagtagagcccttttgtatcttcgtttcttttttttggtttccatctctcttgttcatcatgcatgcctgctgttgtttaccatttgcctcggctgaaaaggcttgtattttcggcgcccttcccgcgaggcactgtaactagttgctttg

SEQ ID NO: 1639 - DNA, 362 bp, Zea mays
tctgagatcgatctcgattcaaaaatcacattaaagaagctcggccgggatgaattgaacaagaagcccttttctttttcgtaataagatatatacatatgaatcaaataatagcttcaactctttggtttatttttgttgcttttttttctttttttttgtttggatgggaaaaaacgtagactatattgtagcaattaatatctggaggatatgcttctagatggatggatatatgaacgaaagggccggccgccgggaaagctcagctaactttgagttacctctacttttccctatctctgtactgtagagtgtattttggatttcctcgaggtatggtgctgcccgctggaacttga

SEQ ID NO: 1640 - DNA, 455 bp, Zea mays
tcgacaacgcgagtacgcgaccacaaaccggcgggctgcgcctgcgccaatggaaatgccggcggcgacgcagggactgctggcgaccacggtggtggactggaagcttgacgagctatgcgcctgcctcgacgacgcgctgtcgtccaggaagcggagcctctacacggaggagcggctccgcgcggagatcgacgcgaagaccgacttcctccggtcgctcctgtcctccgtggcggagtgcaacggcggggcgctcccggagcacctggccgaggccgaggcacgctttgctatcctcgcggccacgtccgatcgttgggcgcggcgcgcagtcgctgcacctgaaccattgccaggagacggcggaggaggacgccaagcgcgacgctgtggaagcccgcgccaacaaggagggggcgttggatggcatcgccgaggagtcgaggacaacg

SEQ ID NO: 1641 - DNA, 394 bp, Zea mays
agcccgtgttgggttggggccagaaggggcttctgtagttctgttcttgtgcttgtggttaccaccgaccgagctcatcttctgatcgtttcccagttccccaaaccgaacaggatgaattggtacattgcagctggcactactacactcgagtaaggggaggagatggctggacagagcaaaaggggcacgcagtcgcagctggacaacggcgagcaggtccacaacggcaagaaggcgagggcgcaggccatgcccgacggcgtggtcaagcgggagcagcaagagacaggcgaggcagcggatgagggacaagagcaggaggaaggggaggttagccaaggcggcggcgcgggggccatggaggaggcgcagatcagtttgaggttcgggc

SEQ ID NO: 1642 - DNA, 268 bp, Zea mays
acttattagctcctattcaccatcttagcatgaattgccttgcaggtagctcgtggtgctagggagggatcaaatgactcgggtgggaagtgggacaaggagtgaagcgtcgaggaaaatttagataaaaattaaaatttcattagatttaaccatacctactatgtaaaagtttgtttattttgatgtatatatatatatatctaaacctagtataagaggttacaaaattaaggtggggccatagcctaccttgcccacccgttga

SEQ ID NO: 1643 - DNA, 1328 bp, Zea mays
  misc_feature (385)..(387): n is a, c, g, or t
  misc_feature (389)..(400): n is a, c, g, or t
  misc_feature (402)..(403): n is a, c, g, or t
  misc_feature (405)..(406): n is a, c, g, or t
  misc_feature (417)..(417): n is a, c, g, or t
  misc_feature (445)..(456): n is a, c, g, or t
  misc_feature (463)..(466): n is a, c, g, or t
  misc_feature (471)..(476): n is a, c, g, or t
  misc_feature (504)..(505): n is a, c, g, or t
  misc_feature (508)..(516): n is a, c, g, or t
  misc_feature (520)..(523): n is a, c, g, or t
  misc_feature (526)..(527): n is a, c, g, or t
  misc_feature (530)..(533): n is a, c, g, or t
  misc_feature (536)..(537): n is a, c, g, or t
  misc_feature (539)..(540): n is a, c, g, or t
  misc_feature (547)..(558): n is a, c, g, or t
  misc_feature (563)..(591): n is a, c, g, or t
  misc_feature (594)..(594): n is a, c, g, or t
  misc_feature (596)..(611): n is a, c, g, or t
  misc_feature (615)..(616): n is a, c, g, or t
  misc_feature (625)..(626): n is a, c, g, or t
  misc_feature (629)..(637): n is a, c, g, or t
  misc_feature (643)..(664): n is a, c, g, or t
  misc_feature (667)..(679): n is a, c, g, or t
  misc_feature (682)..(684): n is a, c, g, or t
  misc_feature (688)..(688): n is a, c, g, or t
  misc_feature (691)..(700): n is a, c, g, or t
  misc_feature (702)..(704): n is a, c, g, or t
  misc_feature (707)..(707): n is a, c, g, or t
  misc_feature (709)..(715): n is a, c, g, or t
  misc_feature (718)..(721): n is a, c, g, or t
  misc_feature (723)..(733): n is a, c, g, or t
  misc_feature (735)..(735): n is a, c, g, or t
  misc_feature (737)..(739): n is a, c, g, or t
  misc_feature (745)..(754): n is a, c, g, or t
  misc_feature (756)..(760): n is a, c, g, or t
  misc_feature (763)..(793): n is a, c, g, or t
  misc_feature (795)..(795): n is a, c, g, or t
  misc_feature (797)..(799): n is a, c, g, or t
  misc_feature (803)..(814): n is a, c, g, or t
  misc_feature (816)..(819): n is a, c, g, or t
  misc_feature (825)..(854): n is a, c, g, or t
  misc_feature (856)..(861): n is a, c, g, or t
  misc_feature (863)..(870): n is a, c, g, or t
  misc_feature (872)..(873): n is a, c, g, or t
  misc_feature (875)..(875): n is a, c, g, or t
  misc_feature (880)..(881): n is a, c, g, or t
  misc_feature (883)..(886): n is a, c, g, or t
  misc_feature (891)..(894): n is a, c, g, or t
  misc_feature (898)..(904): n is a, c, g, or t
  misc_feature (906)..(914): n is a, c, g, or t
  misc_feature (917)..(920): n is a, c, g, or t
  misc_feature (922)..(924): n is a, c, g, or t
  misc_feature (926)..(932): n is a, c, g, or t
  misc_feature (935)..(939): n is a, c, g, or t
  misc_feature (942)..(965): n is a, c, g, or t
  misc_feature (967)..(977): n is a, c, g, or t
  misc_feature (982)..(987): n is a, c, g, or t
  misc_feature (989)..(991): n is a, c, g, or t
  misc_feature (993)..(993): n is a, c, g, or t
  misc_feature (995)..(996): n is a, c, g, or t
  misc_feature (998)..(1002): n is a, c, g, or t
  misc_feature (1005)..(1014): n is a, c, g, or t
  misc_feature (1016)..(1021): n is a, c, g, or t
  misc_feature (1024)..(1040): n is a, c, g, or t
  misc_feature (1043)..(1043): n is a, c, g, or t
  misc_feature (1046)..(1052): n is a, c, g, or t
  misc_feature (1062)..(1074): n is a, c, g, or t
  misc_feature (1076)..(1076): n is a, c, g, or t
  misc_feature (1078)..(1085): n is a, c, g, or t
  misc_feature (1092)..(1094): n is a, c, g, or t
  misc_feature (1096)..(1099): n is a, c, g, or t
  misc_feature (1105)..(1125): n is a, c, g, or t
  misc_feature (1127)..(1130): n is a, c, g, or t
  misc_feature (1134)..(1136): n is a, c, g, or t
  misc_feature (1142)..(1146): n is a, c, g, or t
  misc_feature (1151)..(1151): n is a, c, g, or t
  misc_feature (1153)..(1157): n is a, c, g, or t
  misc_feature (1159)..(1159): n is a, c, g, or t
  misc_feature (1161)..(1165): n is a, c, g, or t
  misc_feature (1167)..(1175): n is a, c, g, or t
  misc_feature (1180)..(1196): n is a, c, g, or t
  misc_feature (1198)..(1199): n is a, c, g, or t
  misc_feature (1201)..(1207): n is a, c, g, or t
  misc_feature (1209)..(1221): n is a, c, g, or t
  misc_feature (1223)..(1225): n is a, c, g, or t
  misc_feature (1227)..(1231): n is a, c, g, or t
  misc_feature (1233)..(1233): n is a, c, g, or t
  misc_feature (1235)..(1247): n is a, c, g, or t
  misc_feature (1253)..(1264): n is a, c, g, or t
  misc_feature (1268)..(1273): n is a, c, g, or t
  misc_feature (1280)..(1280): n is a, c, g, or t
  misc_feature (1288)..(1306): n is a, c, g, or t
  misc_feature (1308)..(1320): n is a, c, g, or t
atggcgagcttgctttcagcgtgcgcgcagctcgggtcgctagagcaggggaagaaagttcatgacttcattaaccaggagcatatccggaagaaccactttgtgatgaacggtttgatagacatgtatgccaagtgtggtgacctcgcgcacgcccgatacatctttgatagcatgagatggaagaacaacgaatgctggaacaccatgatctcctcacttgcaagccatggtcagagcgatgaagcactccacctgttcttccagatggagcgctctgggcggaagcccaacacgatcactgttcttgccgtgcttggagcttgcacgcacggaggcttcgttgatgaaggattacaaatcttcaacaagctcgatgcacaannngnnnnnnnnnnnngnngnnttcttttaggngatcttctaagaggacgtctatgtgggnnnnnnnnnnnnatctgannnngagannnnnnaatgtctgagcaaatcatggtgacctcnngannnnnnnnnccgnnnnatnngtnnnntcnncnnccaaccnnnnnnnnnnnnctacnnnnnnnnnnnnnnnnnnnnnnnnnnnnnatntnnnnnnnnnnnnnnnncccnnccctcatcnncannnnnnnnncccctnnnnnnnnnnnnnnnnnnnnnncannnnnnnnnnnnnccnnnccanctnnnnnnnnnncnnnaancnnnnnnnccnnnntnnnnnnnnnnncnannncacaannnnnnnnnngnnnnncannnnnnnnnnnnnnnnnnnnnnnnnnnnnnngntnnntcannnnnnnnnnnntnnnntcaacnnnnnnnnnnnnnnnnnnnnnnnnnnnnnntnnnnnncnnnnnnnntnntnacacnnannnncaccnnnncctnnnnnnncnnnnnnnnnacnnnncnnncnnnnnnnccnnnnncgnnnnnnnnnnnnnnnnnnnnnnnncnnnnnnnnnnnctccnnnnnncnnntntnncnnnnncannnnnnnnnncnnnnnntcnnnnnnnnnnnnnnnnntcnaannnnnnngccaaccacnnnnnnnnnnnnncntnnnnnnnnccctctnnntnnnncctcannnnnnnnnnnnnnnnnnnnncnnnnttcnnnttctcnnnnnttctntnnnnntncnnnnntnnnnnnnnnttaannnnnnnnnnnnnnnnncnncnnnnnnncnnnnnnnnnnnnnannntnnnnncncnnnnnnnnnnnnnacgctnnnnnnnnnnnncagnnnnnnactatcnccacctcnnnnnnnnnnnnnnnnnnncnnnnnnnnnnnnntccaccta

SEQ ID NO: 1644 - DNA, 706 bp, Zea mays
  misc_feature (569)..(570): n is a, c, g, or t
  misc_feature (576)..(576): n is a, c, g, or t
  misc_feature (586)..(589): n is a, c, g, or t
  misc_feature (647)..(648): n is a, c, g, or t
  misc_feature (652)..(658): n is a, c, g, or t
  misc_feature (679)..(686): n is a, c, g, or t
  misc_feature (691)..(701): n is a, c, g, or t
tatcctttgcttggatgtatattttatcagttatatattgggcccccacctgaaatataggtccagtaggacattgatattgtctacaacatggcagtttgacgattaatagatatataaaaacatgctatttgaaatagaaagaattattcactccgttccgaattataagatgttttggtttttttcctagatatgttgtttttaatataaagggcgtacccagtgccgtaggcttcatgcactgtgcggagtctgtggaagggtatctttaagcgccaagccttacccgcataatatgcagaggctggggctcgaacccgggatcttcgggttacagacggtagactctaccgctacaccagtcccgcccttccatatgttgtttttaatatgcacttagaaattagacgtcggtgttcttccttaaacgctgcctttaagatacgttgttgtcaagattcatgactcttgggaccacttctgtgattatttcatgaaacaggtgatgatggattatccattcttcggtatatttaactgccgattacttttcagcatgatcacgnncttttngccccattannnnggagataaaaggctgttggcgttcaccaaaagaggcacacacatccattcagtaagtnnccgnnnnnnncttcaagtaggactgtagtannnnnnnnccgtnnnnnnnnnnnaaaac

SEQ ID NO: 1645 - DNA, 300 bp, Zea mays
ctccaggttgacttgcgaatccgaggcttggatttagcggtaatttaggttgcttcactagcggttggcctgttgccttgagggttgtcgtgatttagcttagttgttattaggcctataacggcttttgaaagcagggacaacatcaaaggttcggacctttgggtcttgttcttcccattcaggtcacaccttgtgttaagtactgagtacttccctagagcaaatttagaaaaaaatgggagcttcatctcgtgtgatgcaaatttaaaattcctatgacccaacttgtcaaatttc

SEQ ID NO: 1646 - DNA, 283 bp, Zea mays
gcctcccctcctgcacctcgccattcttcccctcccacacctcgagaagcactacaggtttcacctgcccgttctcctgccccaggaaccgctagatctggggggtactacaacggtttggcggtggtggaggagggcgacgaccacagtatgagttgtgatgattctaattgttcctttgctggatccaaattatacactataagtatgtattgtgatgattctatgttgtcttaaagaataaacatcatatgagttgtccccaaatggtaaccaaactcag

SEQ ID NO: 1647 - DNA, 358 bp, Zea mays
tgtgagttggttgtggtgtgcttggttcttcaattgaagtgagcacccaaaccgcttgccgcacaaggttgatccgatccgaggcctaggaggaagatgaatgtgccccgaagaatacaaagtgggcatcaagccaagtcaataggtttaatatgaataatatgtgttattatactacacagaggatgtggtcaccgagtatgaagtccatagtgcctaactcgtgcaaaatgctggcaacttcaacctcttgttgagacacatatgtaaaatgctagcagcttcattctcttcttcagactagcggcagttcctcttgattcatctttggcgtggtatcgagctatcaatgttcatc

SEQ ID NO: 1648 - DNA, 413 bp, Zea mays
tgatagtgggcaactgtgagcacaatgtaggacatgggcatattcctgctacatggaacatacaagaagagatacctgttgcagtgaacatagaagaagagatgcttgatgcaatggataataatttggaggaagcagatggaggatttgcatgggcagaaatacctgaatatggggaaacaactgcagggccaccaatggctaaagaggaagaaaaggagcactttatcactgttgggtgcgatcctaatggagatgagccagctggaataaatgaagaatggaggtactttaaaagtgttgatcatgtagctattgatccactgcaaaatcttaaagttgagggacagaaaagaaagagggcaagacctgttttagaaataagagactttgatactgaagctgttcctgag

SEQ ID NO: 1649 - DNA, 368 bp, Zea mays
  misc_feature (14)..(14): n is a, c, g, or t
  misc_feature (19)..(19): n is a, c, g, or t
  misc_feature (26)..(26): n is a, c, g, or t
tgaaggagcaccancaccnccggcancagatgttgcttcaggaccaccacctgtaacggcagcagcaccaacaccgcggccaactactgtggcgccaccaaccccaccggcaacagatgctgctgcaggaccaccacctgtagcagcagcaccaccaccaccggcaacagatgttgcttcaggaccaccacctgtagcagcagcaccaccaccgcggccaactactgtggcggcaccaccaccaccggcaacagatgttgcttcaggaccaccacaaccggcagcagcagcaccaccacggccaactgccgcggtagcatcagcaccaccatcagggaagctgagcagcaaatccaaggtggcctcca

SEQ ID NO: 1650 - DNA, 362 bp, Zea mays
  misc_feature (335)..(335): n is a, c, g, or t
  misc_feature (337)..(337): n is a, c, g, or t
cgccgacgtgacatttcaggtcggcggcgagaagttcatggcgcaccggtgcgtgtttgccgcccgctccgctgtcttcagggccgagctctttggctccatgaaggagggggcggcagacaccgtggtgcacatccatgacatggacgccaaggtattcaggctgttgctcggtttcatgtacaccgatcatgtgccggacattgaagaggaggaggaagaagaagaagagtatatgtggcaggacctgcttgtggctgcagatagatatgacatcccgaggcttcgactgatctgtgagtacatgatgtgctcatacatcgacacggatacgntngcagatatgcttgagcttgctgaca

SEQ ID NO: 1651 - DNA, 380 bp, Zea mays
ttgcgctctgattgccccccaaaactgcgtgcgtgtctcgcagcgtgctggaattgctcatctgttcgtctggcgaagcaattggctagccgattacatctccggctcaccttgatctcactgcagtctgctgaaatcgcccatctctgcgggccattgccgctcgcttcaatcgtgggttgctgagggcgccttgggggcctggggcctgaccgcctgaatttgcgtggggcagtcttgggaaagcgcaagggaacctttcctcgtgaccatgaatctactggaggagttgatccgggcgatagagctctggctccggattgttaaggagcaggtgcccttgatcgaccccacccttgacccagtgttacttgttccta

SEQ ID NO: 1652 - DNA, 441 bp, Zea mays
tccccgtcgtcctcctcctcgccgacggccgcgtcctccccgccgtcctcatcgtggatccacatccggtcgctcctcgtcgccgccgcgtcctcgtcctcatcctcgtcgtcctcctccgcgccggctgcgtcggggagcgcggtggctgtggtgtcggctgcggccgccgccccgtcttcttcctcgccggcgtcgtcctcgccgcactcggatcggtgggtttctcccttcggatgggcgaaaggaggctccattagggcttgaaatgcctctcatattcggttcttgttacatgagcttcatttggctgctgctgatctggttccgatccgtggaccctgaccgagcttgctgtgttgtaatctgtggtctggatgcagcctaggtactcaattactcaaattagggtgttctatgtgctcttggtgtagcaatgat

SEQ ID NO: 1653 - DNA, 597 bp, Zea mays
  misc_feature (590)..(590): n is a, c, g, or t
tccctgctccaagagagatgggtctcgccggcggcattgtccggagggtcttctccaagagcccttgctcgtccgccggcagccgtggccacagtgtacgtgctttctcttacatcgcatgttcttcacttgttggcgttttcactgtgtccgcggcggggcacgtcgttcgttctagtacagtatgtagtggtagtactgtagttgagtgcaacaacaacaacaacaaaaagagagtgaaggtcacttgtttgctgtgtcactggacagactgacgcttgcatgagcacggccgattcgcaggagaaggggtctgctgaacacaggaggagatggggctcgctacggctgtacctctgcggcgaggagatgaacgcggccgcagaggaggaggaggacggggacggcgacacggtgtccgtcaagagcttcgagacctgctgcgtgatgccggaggaggcgcacgtcgtcgtcccggtgcatcatcgtctgatgagcgccgcacacgatggcaacgaccagagcagggtccctggtggtgccgatgaagagggagcggcgacgctcatccagtccgcgttcagagggtncatgtcg

SEQ ID NO: 1654 - DNA, 347 bp, Zea mays
tagctcagggtgcgaatcacagtgcagctctcctctggcatgaaggctgtgagagaggcatgacaatttctggccttgccctgccaaaggagagctgtcctgccattcattagccctgcaatcagcatgcacattggtgttttcagtggatcattgttgagtgtactgagcaaaggtatatgcgtccatggatgtgttttgatatatagaaatatttgtgtggatctttctcgttagtgaacaatgcttgttcttattgtttatagttcttgaacaatggctcgtgtaccatcgccagctgcaccaagcaaaggtggcggcatgaaacacaatcctcgtctcatcat

SEQ ID NO: 1655 - DNA, 450 bp, Zea mays
agagcggtcgcatcgtgacgaccgcctcgaccgcggagcggcccctgcgagacgggctggagtgcggccgcgcctgcaacgcaaaggcggcggcagccgtcggcgaggtgctcgccatgcgcctcaaggtggaaggcctcgcgcgggagcccatatacgccaacgcggagaaagaggtcgcgaagaaagggttcaagaaccagaccaaggtctgggccatcctcaatgcgctgcgcagtcacggggtcaacctccacatcgacgacgatggcgaccacaggccgcacgtctgaagcaaccataagttcaggagtttgctcctccaactaacaaaagtatgagctttgagcatgttgattgttgcgtgctgttttatgttgcttcagtaaccttgcccttgactctcatttaattgaacactatgactttctgtgtgtagcaatatcactg

SEQ ID NO: 1656 - DNA, 371 bp, Zea mays
tgatgtttgagtacttagataagttccatatgcctaatactatgtttctagcacttttggttgatctctaactcaattctatatgaaaagtgattcgaggacttagtttgagtcagaatgcaaatcctggtgaaactatggtaaaatggtgagttctctacacttagtcaattggattatgtactaactatgtttgtttaagtgttgaaaagcctcacaagaaagtccaagtcgaactgacttagtttgcaaagacaaggacttaacttctctggtttgggcaacaccgaaccggtccggtggcgcacctagccgagtatgtgatgcgcccagactcatgcgttttggcatcctagtgcactgaccgagtt

SEQ ID NO: 1657 - DNA, 257 bp, Zea mays
cgccaggtagctgcttcctttctcgctacgtgctctagcgtcccggccgctgattgggcgccgcagacggccggttcctgtggctgcctggctgggatttccagcgacccttctccgcttttctgttgtcctcacggtccgagctcgcatagctgatgcatgaccatcatcattttggcagaaagctggtagaaaaactcttgatgaactaatgaaacgaagctttgccgcttgcgtgcggacctgtattttattta

SEQ ID NO: 1658 - DNA, 1008 bp, Zea mays
atgcacatgctctcagtcctacattgcaaaggctattatattggtaagaaaataaccattgtttacttatctgcatagttgaatgatacgtgaatgtgtaatattgccaatatagtcagtttatcatctctgttacctcatatagttgccccaggttgtttcatttgtgttcacttacatttcttgattatgaaacaacctttattttatgtgcatagttgaataatctatgaatgtgtaatgctgcaaatgaacacccataaccatttaaagaggtggttattacgtgtgcttgcctccattaatcagagatcatgtctcctaaataatttatattgtagtgttaatagttgactaacagttcatccaccaaactataatattttaggttgtagctacgttacctacaagtatcctaatcctccttatttgagcattgtgcagctcctcatgctctttctctaaaaagtccatttacatattcatcaagtactgaatagacagaacaataataacagataatgtatagcttgttgtttttctatttatgttttcgactctaacatctctatttatgtaatcgactctaacatctctctagcatttaaatatatgtatagcttgctaaagcatttagatatgcagtaatcgactctaacatctctgtttctgtttctgtataccaaagcacaatttaacatggaagaaatggtagcagcaccatttcaggatggacaacaaccaaaatctcctacagaagttgtttctaatgtgctactgggctccagtgtgttcctacacaatgttggtcttcagtctgccttcaagaaaagctccacaacaactgtttcggcaatggctcaacaacttcaggatgaactagagatcgagaagcaagaaaaagatggccttcaggaagaagtggaaaccttgaaggctcaagcacaagcatctcagaagaccattgatagtatgaagaggtcgatggaagaaaataacaacctcctt

SEQ ID NO: 1659 - DNA, 349 bp, Zea mays
  misc_feature (260)..(260): n is a, c, g, or t
  misc_feature (268)..(274): n is a, c, g, or t
ctacactttgccagaagaaccgagccagacacaataacatcaaactgagtctgagatactgcactttacaaattctttcgatattggcagattgaagaccaacaagatttgaagagcagcaagatcagcttgcacctgcagtttgaagaaatcctttcaaagaagactgcttgcggcaatcttgccttcactccacaagcatgtgctgtgttatgcgtaccatgtaatgattgtagtacttgacaactgataccaaagangtggatgnnnnnnnatggctctatcggtgaccatatggggcaaggacgcggcgttctcgttcggcgacatcctgtcggcgacataacac

SEQ ID NO: 1660 - DNA, 381 bp, Zea mays
aggccccgtctgcccggagaggcccgccgccgccgctccggtgacccctgtagctagcttctcctttctcgccttctaattaagtcgccgttcttcttctcggagcaagcaaattaagccatcgtctatggagctcgccgtcgtcagcagcgggctaggagagccagccgcagccgggctggcgaagaaggatcggagcaaatacgtgtccccggcgatacgtgcggattgttagtatttggcatgcgggaaagccaggcatcttttcttttttcttcttttctcgatgattattgtgactcgttttcgctacccttggtgattgttgttgatttagcctttttccttttcttctctctctctccttctttcttcggtttg

SEQ ID NO: 1661 - DNA, 338 bp, Zea mays
tagatgtggagcaacgcttgggtataagaggaatcaggaaagaaaccaggatattaaagccttggttgatctcttgatctgacttagcatggaacatactgataaactttagctccaactatacaacacaagggtgattagttgtgcagtctatacctgttcctgctactggtgccgagttaaccaagacatgtggatcagagatttaaaatttgtactagtctgtgcataactactaaacatgtttgtttctggtgccgagttaaccaagacatgtggatcagagatttagaatttgtactagtgtgtgcataactactgaacatgtttgttagtgg

SEQ ID NO: 1662 - DNA, 443 bp, Zea mays
gcggcggctgttctgctcgttcagcgattttctgaaggcagcggaagccggtccagcgcgtcatggcgcgctactgtcgttcgccgtggcccggaacaggctccaggacgccgtggcggggaaccaccgggaccgggcgctggaagcccttgcggagctcaaggcgttcgccggcagcgagcactactacggcgacggctacagagcgacggagcttctcttggcggcactgtcgcctttggctcggctgtgcaagggccaaggactagtagtcgacgacgacggcgccgtggtgactaaggaatcactggcggtggcatgcctgctgctgcggaacgcttctgcggagatcggcgccacactgtgcgaggaaatctcgcaggaggaggacgtcaaatccagcttggagaggatccgagaccgaagtggttgtgattgtgacg

SEQ ID NO: 1663 - DNA, 400 bp, Zea mays
ttttatctgtctcaatgaacttagattacaatataagttggtttggttcctctttctagagacaaaatcggatattctttccattattaaaaaaatcaagaagataattaaattgaaaacatagatgagggcataatcacataacccctcactctttggtcagcataatcaagaagatgaacatcaaacaatcgattaacgctccagagcgacacaacaaattaacgtccagaggcagagagacccgtgattccgagtatcaaggattcaagggagcccaaggtggactggagccataggcgtttacatcgagtaagtagtgaccatgatggttactatgtatgacccttacgaattgaagtactaaaaaagttgcaggatttagcagcagtttagctca

SEQ ID NO: 1664 - DNA, 765 bp, Zea mays
gtgtcttgggcttttgcctttcctggagctgttgcgaactggacaatgcagtttgctgcaaggataaccggtactgctgccctcatgactatcctgtttgtgatacaggtcgcgggcagtgtctcaaggtttgtttgcttgacatttgtgtaatctatttgaactttagccatgtttgtgaggccactggcccactgacctgcatcgaagttttctagtgtttgttctaaacttttctaagctagttttgttctttatttattatgttacctttcatatttcagttatgaactttatcgtatatggtcgtttaaagcatttcagtagctgacatcttgactgaatactttgatttatggtatcaggccagcggcaacttctctgctatagaaggaatcaggaggaaacagtctttctctaaagctccctcgtggactggctggctggagttgatggaccaatgagcgtataatcagacatggatagtaggtaagattacctaaaacttgcttttgctagcaccgttatactttctgacgcccattccttattgcaacacacccatgctgaccgttctgtgtctacaacaactaacagcttcatgcaagttgtgcgatccgtaggtcggtcattggccttgttccagtgccctgccacattcctgtacgcctactgcccgctgcgttgcaccgagatgcccttattttctctttattattgaaccctatggtgtaaagtttcacgattgtacatgtatgtcacact

SEQ ID NO: 1665 - DNA, 620 bp, Zea mays
gatcatgcctagtacatttttcttcttagatgaaggcaagtgaatgtagcggtggttgcttccgttctgacctgttatttctgtcgcctacactctaatattcagaattattggattctttcataactggactctatggtgatgctttacttgcttgtattggattctttcataattggactctatggtgatgctttacttgcttgcattatactgatgctcaatcatatattgatgatggttatgattcgagtatgactcatgagattaattcacacccctgaaggtaaatgaagtattgtttgaggtttgtattgtatctgaaggtaaatgaagtattatttgaggtttgtattgtatgtgaaggaagtgaagtatattgataaatggagcatgccatatacattgcatgatttacttgcatctgaagttgggtcgtgatctatggcccgaccgtaccggtacaacttagcatcgtacgttgcccgaggaggggtacgatgcagcttcatacccttagaggtatgaaggcagatgacatatgcattgcattcattgaagtgatatttgcagatgatgtggttttatacccttagaggtatgaagacagaggacctaca

SEQ ID NO: 1666 - DNA, 438 bp, Zea mays
ctccgcactccgcagcaaacaaatcgaaagggagacagatttggatttgattgctcacggaccacggccacggccacggcaaagtaaatgcccccaagaacaaacggagctcctagatcgaatcaaccggcagaaggaagctaggttcactcaccaccaaggcaccagcaggagaagaaacggatccgaggccgggcggatctctccggctgtgtcagctgttcagcaccaggacggcggccgagagcaggagcacgctccgtggggcaagaatgcggaggcgggagtagcaggcactgccttgatgcgtcttgtcgacggcgatgaagtcgccgatgatgcggcgtcagaaaaggtggcgcggttcgtggggagaggagagagaaggtggggagaggagagagaactcagagaatgagagaagtgtggacagagaaa

SEQ ID NO: 1667 - DNA, 431 bp, Zea mays
ttttgcttgtcgttcatgtatatgcatgaccctttcacacatatgatcagaagataagcacatgcaagacgatctcgcgtggatatgatgcatggatcagacctaacctctatatcatcaccaaacgctcgtagatgatgctatacaattccatgattaaattatatataagtaaaaaaaaaagaaccgtacgtgcatacataaaattaagaattaatggctgccaatggacgacatatgcatggacaggtaagctggtgatcccactgaaccgggaggcgcccaacttccggtccatgatcgggatgatcgacgggaggacggagctgaagccgctgccagccagcggcggcccagaggaccggcggctgcaggtggtgggcgtctccgccgccgccggatccggcggcgatgactactacttggacgtg

SEQ ID NO: 1668 - DNA, 405 bp, Zea mays
tttgactccatgtcggcggcgctcgcggtgacggacgaggtggccctgccgatccgggcggtgggggatctggcggccgccgccgaggtctcgcgggaggaggtcgccgtcatcacccagtgcgcggcgctcggtgagcttagctggttccgccctcgtcttgccctctctccattttttcttctatttctttccctcgaggcgaccatggcaagttgccaagttcgtgcttgtggatgcaggaacccgtcgatgcgtgctgttctttttgctgccttgcttgcatgcttcaattagcgagccttctggcgtgattccgcggaatgggctagattcttttttttcttttgcaatcaaatttggagtagtggacgtttggttcttaagggttcccacttcaattag

SEQ ID NO: 1669 - DNA, 546 bp, Zea mays
cattctcactgatcaaacaccactttaggccatgtttggatggccatgtactggacgtggaatttggttaaatttcacatcaaatcactccaatacgtaaaaattgaggtcaatacataagcatgcaaacaattttccttccgataaaaaggccactcacatatcgccatggttctatcagctttgcttgacatggggcgcttccttattcttgagcaattcctagcgccgccttattcttgagcaattcctggtttcgtccaggtattgtgggcggtactaaagcacaacgattctgagcccaaatagttaaatgtctgcaaatagcttgtttgccgtgctgaataccggggctatgtcaacaggtacctggaaacgaacataaataagagtctaaaaactgctaacctatacgaaaatgaatatagcaacatagcagcacagctgaactcggtgcactatagtcagggcacgaataaacataacagaagcttcaggggcacctacctgcatgtgctctatcctctccaatgccattcttaatga

SEQ ID NO: 1670 - DNA, 237 bp, Zea mays
  misc_feature (229)..(234): n is a, c, g, or t
actcgaaccagcacacggccggccatcctgtacagagcaagtgagcaactacgcctaaattctaaaactctaccaaaatggatactagctccaaaccaaaaaaataaaaaacatctagaatggaggggaagtcatctcccatggagaccaatatctaatcgctccagcgaagcagcatgacgacgcagcggcggaaaatgtagaaccttgcccttttctccctgaaggnnnnnntga

SEQ ID NO: 1671 - DNA, 990 bp, Zea mays
  misc_feature (978)..(979): n is a, c, g, or t
  misc_feature (981)..(982): n is a, c, g, or t
tggaggtaagctataagcatgtcatctgttagcttctcttgtaacattctactatgttttatcatccaaatgcagccttgccgtgtgtttttgttcctactgtatttctagcagttaatttgacttgttatgattatatttctctctgcatagtgtacaattgcaaaagtaatgtcagcttgcattcctttttatcactattatgccttttttgttattatttcatgttatatctgcaaagcaaaatctgtgataaggacaacaaatattctagaggttgcctttgacttgttacatatctgttggatttaaacttacttttctgacaacgttgcatgttacaacacaaataagttttctgcgaccccagaaggtatattcagctctgaacagctttgcctgtaattttccagcttggagttgatattggttcatcaacggtggcacgaggtgtggtgagcctagtgcttggctacttgaacaatcttgtgatcgaaatggccttcttggtacaggtatccaatcgtgcatctagctaattcacaaaacccctgttcatatgaaatttcctcaagattgagcatacatctgtaaagatcacagaagatttaagacaatcgtgcatctagcttattcacaaaacgcatgttcacattaaaattgccttaaagttgagcatacgtccgcagagatcacagaagatttatatttctttctactatcacttagtacatgctttaaattcattatttgcctcatgcagggaaacacaaatgaagaactcccggaattcctcctaggtacctgccgactgaattacctggatgcctccaaggcagtgtccatagacgagtgctaggaccccaactgacctcattttttaaagccaagtacaccaaaagacaaaaaaaaaggctgaatccccattccttgctgccgacacaatcggcaaccctagcccagatgcccattttatgnntnnccgcaaaa

SEQ ID NO: 1672 - DNA, 321 bp, Zea mays
ttgattcgttttcagattgtcataaattaatctgtcaaagttatttagaggtgttaatctgataaggtaaacagacagagttactagattagaaataacttttgagtttgtgtaacaatgtccgagttagtctaatgcgtatccccatgattgctggcgtctgtggtgatgtaatactagcatgtgtgttaatgtatatagtgatgggtggtttaaggtgtggtgacaaccacaaacattagaatcaaatacaaaactttagaagtgacaactcgtgtaacacatcgggtaacctggcggtgtcaggataattgaactgtt

SEQ ID NO: 1673 - DNA, 421 bp, Zea mays
cttggatccatagcgagacagagagtagaatcctaccgtgaattgtagagtaaggggtgtgaatgagcccaaacaccttctctattttataggatggatttatgactttcctttttttggaatttcttaaaaaacttagaatataaacgattaaaatagtgttagccaatcagaagatgctacatcaacaacaaaagattagtaccgtctaggccaatcaataataacacgtactccaatgcaatggctgataccaaacaacatggtcccaacacgatcattactaaccacaccaatcggtcgacacacccattgaccgttcgaacacaacatttgttgatgcgactgatgcggttgataccgatcgcgcgcgagaccacatcatcagatagtattgatgagcactgaacccaaccttatt

SEQ ID NO: 1674 - DNA, 372 bp, Zea mays
gaccccttgaccaccccttgaccacacatctacaacttggtttgagcaggtctctcatgggcatcaagttttttgattttgtcggttgtggagaaaactccaatgtgaataatgatttgttggattttcactgatttgatggatggaatgggttgaaactctaagaggtgtagtcattgaactcggctagggtggaatccaaccctggccagactgacgaccatgcaccctgactaggctaaattaacccagctagactaacttctaaccttggtcaggccgcccttgcctgtgcagtttgagtgttggagtggttttaagttttgtgactccgatcttcaatcagtttcttccatgggtttccaatagtga

SEQ ID NO: 1675 - DNA, 397 bp, Zea mays
ggatagggtggtgtttgatggagccactccagacttcacccttctgctcagatctgctgaggaggaaagacacaaatggcaattggccggtgccaaagggctctccttcttggtggcgccaatgtcaaatgtttaggggaggtgctgagcgttgtcgctgattattagtgaacagatggatagtttcttgtacacttgtttctggcctttctaatgggaaggtttttttgtaatttttgggtcttcttcagacctcttcctctcttctaatatatttataaagcgtagctctcctacgcttttcgagaaaaaaaaatctaaacctaccgaggattttatgctctttattcactttttcttttgggtttcatctccattagaatcaaagctactgatg

SEQ ID NO: 1676 - DNA, 393 bp, Zea mays
cgcttattgatcttcacgtggaggacaatgcaaccgcgacgatacacaagtatattattcttcagtaccttggttttgcatgttgatgtcagttttgattaaaaaaaagtctatactcgcacaggataaccacatggtccaaacatcaaaaattactttttccaggttcaaagttcaacagatcatgtaacatttaggttttacatttttcctattgtatgttaaaaaataatgaaaatttgaattaaattcttactagccggttaatttactccgttaatccctcattaatgtatgtactgttttcatgctaattaaactttgggagaattttttttccaactgatgtggaaaaatgaccattcaggcatttgagaagggctacccatctgt

SEQ ID NO: 1677 - DNA, 622 bp, Zea mays
aagcatagcagcggcgacggcgtagcaagcaattcagctcagcacgtcaccggctcacccatcccctgccggtcgactccccctggtccccagcgcagcaagcagttcaccggagccggcgcagcaagtagccaagcaagtctccatcccctggtccgcggctccccgcgataccaccttcgtcctcgacggatctcaactataggtacaggctcctcttgccagttgccattgatgtcgagaagtctagtcgaggcacacattgcgaatgagaccagcactctagcgttcagaactagcgaccaaggactccacgttctttctagtttttgaaaacgtccagaactagctgcaggaggccgcaacgagagtacgggacctcgctcctatttccatatcctagtttttatgtactgagtatactagtattccatggcatacatgtatcgtgctctctcctatctagaaaaagaaagaataggacatttcaactcgtattatgtttaacaattataaattagttcatgttttcttagtgttcatgtgctgtgttcaggaggcttttgtagatttgtctgtgtttagcaattagttcctattgcaggttgattaacaaggtcat

SEQ ID NO: 1678 - DNA, 415 bp, Zea mays
agagagaggaggtactcacggtcgagcttgagcgactggaatgggacggaagacccgaggatggcgcggacctcctccagcttcttggcgttgcccgtcacgaaggtcaccgccttcggcagcactcgcgccgctgccgacatcgtgcggtggtgggatgtagcccgttagaaacttcttccgcaggatacggtgcgggaagctgcagatacggtgcgggaagctgaagatacggcgcggcggcgacgacagcggcgagagatgaagggaccgggccgccggggagagatgtcgtttgctggtttccgttctgagtggaccggagcgaacgtgggccggtccagcctgaggtcgacggctaagtccggcccgtgtctgtttaggacttaggccgtgcttgacagagatgaccaat

SEQ ID NO: 1679 - DNA, 415 bp, Zea mays
  misc_feature (132)..(132): n is a, c, g, or t
agagagaggaggtactcacggtcgagcttgagcgactggaatgggacggaagacccgaggatggcgcggacctcctccagcttcttggcgttgcccgtcacgaaggtcaccgccttcggcagcactcgcgcngctgccgacatcgtgcggtggtgggatgtagcccgttagaaacttcttccgcaggatacggtgcgggaagctgcagatacggtgcgggaagctgaagatacggcgcggcggcgacgacagcggcgagagatgaagggaccgggccgccggggagagatgtcgtttgctggtttccgttctgagtggaccggagcgaacgtgggccggtccagcctgaggtcgacggctaagtccggcccgtgtctgtttaggacttaggccgtgcttgacagagatgaccaat

SEQ ID NO: 1680 - DNA, 622 bp, Zea mays
  misc_feature (261)..(261): n is a, c, g, or t
  misc_feature (263)..(264): n is a, c, g, or t
  misc_feature (379)..(379): n is a, c, g, or t
  misc_feature (381)..(381): n is a, c, g, or t
  misc_feature (386)..(389): n is a, c, g, or t
  misc_feature (391)..(413): n is a, c, g, or t
  misc_feature (415)..(417): n is a, c, g, or t
  misc_feature (420)..(428): n is a, c, g, or t
  misc_feature (431)..(445): n is a, c, g, or t
  misc_feature (447)..(456): n is a, c, g, or t
  misc_feature (458)..(458): n is a, c, g, or t
  misc_feature (460)..(465): n is a, c, g, or t
  misc_feature (468)..(470): n is a, c, g, or t
  misc_feature (473)..(473): n is a, c, g, or t
  misc_feature (475)..(490): n is a, c, g, or t
  misc_feature (492)..(494): n is a, c, g, or t
  misc_feature (499)..(502): n is a, c, g, or t
  misc_feature (509)..(511): n is a, c, g, or t
  misc_feature (513)..(515): n is a, c, g, or t
  misc_feature (521)..(523): n is a, c, g, or t
  misc_feature (526)..(546): n is a, c, g, or t
  misc_feature (548)..(552): n is a, c, g, or t
  misc_feature (557)..(558): n is a, c, g, or t
  misc_feature (561)..(563): n is a, c, g, or t
  misc_feature (567)..(567): n is a, c, g, or t
  misc_feature (569)..(573): n is a, c, g, or t
  misc_feature (577)..(579): n is a, c, g, or t
  misc_feature (581)..(583): n is a, c, g, or t
  misc_feature (586)..(596): n is a, c, g, or t
  misc_feature (598)..(598): n is a, c, g, or t
  misc_feature (603)..(605): n is a, c, g, or t
  misc_feature (609)..(612): n is a, c, g, or t
  misc_feature (617)..(618): n is a, c, g, or t
cctgtctccttgaggataaggatcagtgggaagccggtggagctgctttagagccaacgtaacgtacagctgaactgctccagtgcagatctactgatcttcttgatcgaaagccgtacgtagtgcagtagtggctcgattcagcaagcgattttcctgatgcgtgcgttattgttctttcctgctgtgttgatgactaggggaatcttgtaataatcggcttggctgtatacggtgatcggtcctctcttgttctctagncnncgctagctaggggtggaaaacccccgccgcctggaggcacccggggggcctcctttattttttttccggggggggccaaagggaaggccggctttttttttttccaaaccaaaananataannnncnnnnnnnnnnnnnnnnnnnnnnncnnnccnnnnnnnnnggnnnnnnnnnnnnnnncnnnnnnnnnncncnnnnnnccnnnccngnnnnnnnnnnnnnnnncnnnctccnnnntctcccnnntnnncccccnnnccnnnnnnnnnnnnnnnnnnnnntnnnnntttcnnttnnncctntnnnnnctcnnncnnnccnnnnnnnnnnncnccttnnntccnnnnctccnnttct

SEQ ID NO: 1681 - DNA, 362 bp, Zea mays
acctcctcctctgcctcgccctaatcgccgaggaaggacgagggctccctgacgtaggaccagccccgtgctcgtccacggcagcctgcgggtgccacctctgccgctgtcgtgaaggagaacaccgcacccaagccacaccacctccaccgtcgttgggaaggagaacactgcgtccaagccgtccaagcccacctccgccgtgcggtggtccacgtcgtcgctatcgcagtcgcaggccagcaagatccaaagctcggtggactccaccttctgggctcccgtgctgctggggagtcgcgccagcggaggatggcgacaatggagacgggtgtgcctccagctctgccagaaccatatga

SEQ ID NO: 1682 - DNA, 502 bp, Zea mays
agaagagatggctagtaccgcaagccaaccgtttcaagaagggaagcagcacctgcacctgaaccatggtggccgtgctcttcattcagcgtacggtggtactgctgcgtggcctgccagctcggtgacgccgcctctgaccaggctggagacaccagcgtcgtcgagcaaaagcacggcggaggcgcggcaggccctcaagatccacagcgcggcagagaagcggcggcgggagaggatcaatgctcacctcgcgacgctgaggagaatgatccctgacgctagtcaggtctgcacatcttgccgtttcagagtttggttccataagttgcagccgagcatgcagtttttttttcttaatgcacagttgaaatcctttttttttacggacggaatcagtactgcaccgcaaatgattaacagcaatgtcactgtcgtctgctcgtgaacagatggacaaggccaccttgctagcccgggtggtttgccaactcaaggacct

SEQ ID NO: 1683 - DNA, 346 bp, Zea mays
gctcccgggggagcagcccggctttctgctgcgcattcaagaaaaaggacctctggccctttgccgcctgtgtcgctcgccctcgccctcgcctccaccccatcgctgatcggccgccgggaagaagatgcagcagctggcggagcggcagatgggagctgcccatggatcgcatcgatcggcggcaaccgagtcggaggatcatggtgtgaaggaaaaggaggagctcctcggcgtcggtctgggttgaagccggaattaggcagctagacaccaacgtttcatcatgtttttttttctttctctgtcccagacgacggacgggcctcatgaatcatgatgtctc

SEQ ID NO: 1684 - DNA, 366 bp, Zea mays
tatagcagtccacggcaatgagccaatgatcccttgcaggacaatgatctggaatgtcttcactttcatgacagatcttgttgccacccaagaatccctccagatagaaggcggaggaagaacatctttgcttgatagatgcaacctgggagacaaggataaagttcatattcagttatagcaccattccagatcccatgttggtgtaacttggctacaatacagaaacctactagaaggctctcaaataacattagagttcctaaatgtggttttgctacacaacgaatgcaaaatagttcagactgaaaagaaaaggtaatgaaacatacacaaaacatccgaccctggtttaattcctacaag

SEQ ID NO: 1685 - DNA, 374 bp, Zea mays
caggagctcgcgctctgcaaaccttcatggcctccgaggcggtcgtcgttcacaccggcggttgccactgccggcgcttgcggtggcaggtcgaggcccccgcgagcgtagtggcgtggatctgcaactgctccgactgttccatgcgcgcgaacacccacttcatcgtccccgccgccaagttcaagctgcaggccggcgctgacgagttcatcaccacctacaccttcggcacgcacacggccaagcacaccttttgcaagacctgcggcatcacctccttctacaccccgaggtccaacccggacggcgtggccatcaccgtggcctgcgtcgaccccggtaccctgaagcacgtcgagtaccggaagttc

SEQ ID NO: 1686 - DNA, 380 bp, Zea mays
ctgaaagtatgccaaatgtgttactaaaaaacactgccttcttatatagcctaacatcaatatgttgttgaccaacatgttcagtaaaataggggaagttgtcacatgtcaaccattcctgtgcccataattttgaagctaaaaattgtcattacctgcaacattgcactcccattttctgaatggaatgcctcttgaccatttacattatttctgatcaaagatgatatagcatacaatgcttttgcagcttcatctctagatatggaataacccgtcttcacttacctcgctaaagctccataaccaaggatctagacaagggtgaagccgtcagtattagaacagctaaaagccaccactgtgctttgtgtacatca

SEQ ID NO: 1687 - DNA, 443 bp, Zea mays
atacctacatgtttactaaaccaaaaaaaagaattgattgaacatatatgtacccgatttgaaattacatagagcttactttttataatgtacatgcgtgtgcgtgtaattgatgtactccacttgaaatgcatgggactcgatcggaagaccctgatggagtgcaagagagcccaggcgacatgatcgacggagcatgcgtgagcagcagccttaggaaaacgactggagaatttgtgaagtagcaggatggccgaggcattggtgccataaggacgctgtggaggatgcctgcctgaaaagccttcatgttgaggaagtcggagtggatacagatcgccgctcacatcagagggtccaaaccggttactgatccaaatactagtacctgagattttaaatatcgcattatccagatcataacagtaccagttgatgtctcg

SEQ ID NO: 1688 - DNA, 444 bp, Zea mays
gtagacctagtgcatatcatgtaagattgtaaggcatgtcaccacattataggaaaataacaacatatgtttttcggccttctgctaagctgtaaaactctctatttctataaagtagtccacgccttattcctctgcctcccttccccttcctcatgtggctgcaccttctacttcctgatcccttcctctcaatcagtcgctcgcagcggacatccagaagaaccaaagtccaacgacgtcagtaacaatcgctcatgtcctctgtcggtgtttggagcccgaccgcacacccggggttacccctcgcggtgcttttgggtagaatggtgcttttgattgtaactcaatggttcgtacaagatgcatgagagacgacaggcgattttctacaggttcgggccacttggagaggcgtaataccctacttcctggtaaggatct

SEQ ID NO: 1689 - DNA, 463 bp, Zea mays
atcgcagccgacaggcaaacgcctcgggaatcagctgtgccccgcgcctcgtgggccaccaggagctgttgctgcccccggtgtctccgccctcaacttccaaaccctaggggcggtagaggctccaaactcgggcgctttggccgtgaccgtccgaggtgggcgtcattgcgagttggtgacccacgggttgcgggtaacgagctgtgtgctttaacttaaatccatattccactcgtacagaatacaaatcacagaaagcagttgaaacctgtcgaaatttcatgtttctctttgaaatatgacctaacattttacctctttctaaatagtggttggattgggttgggttaatatttgaggtgtctgaactgatcgtatctacctttcttctgtgtagttgactagtgccttttcttttcttcctggactgaatggagcaaggggagaaccaatcagctga

SEQ ID NO: 1690 - DNA, 967 bp, Zea mays
  misc_feature (57)..(57): n is a, c, g, or t
taccacaatgggtaaataagcaattcgagcctaactcaaattctcaattggaaatcnttacattccatctgttgctgttgctccaattagtttatttgtactgtacagtttccatggcgagaaattgcaattatgcccgttcaatggcatgcattagctcttggcttgtttgcttcaataatagcaccatttggtggcttttttgcaagtggattcaagagggcattcaaatttaaggtgcttagtttgtttggaattatttgttgaaaatatgtatcaccttcaaaatctcactatgtttatacattcaggattttggggacagcatacctggtcatggtggatttacagataggatggactgccaagtatgtacttttaacttgatttgtttccagaaggttacacatttattggtggtgattttgaatgggttaaatcaatttctgaatgtacctgctagtttgtttctcgtatattctctgtaacatatttactgtgaattggtgattaaaaaagaatgtgtctttatgcatggtcataaataatttttttttaattggagaatcaggctttgctgccaattccagagcttaggacaagtatgtagttatgctcattctctctgcatgcagttcagacttcaactatgttttttttaaaaaaaatttgtgtgtatgctttgcaatgtgaaacctggtagattacagtagcgttttttttcttcttttttctgagaaactccaaaattatcttgcagatggtcatggctgtttttgcgtacatctattaccaatcatttgtaatggtacaggacttatctgttgagacaatcctggagcaggtaatctgggtttgccatacctgtgactaaatttagttcctttgctccataacgatatctagttgctaaacagcagcatacctttcaatgcagatactacgtaatctcacctttgaggagcag

SEQ ID NO: 1691 - DNA, 375 bp, Zea mays
cacccaccacagtctcacatctctctggtacatgtacatccacagttctgcaagcaaaccattcactcctccctctgcctgtattcttcgtttcgcccctgggatcggatcctcgtcacgactcacgccatccgcccccaccgccaccaccagccacaccatctctgttctccagtcacgccagacggccagaacccacaattttcatcacaccaaaccatccactcctcacctttcccccccaaacaagtccaatctttacaacgacattgtcgccaactacaacccctttcccttctgggtgcctcaccagattacccactcaaatccagctaccaagcacaaaagctgcggcatttgccatactgtttcatc

SEQ ID NO: 1692 - DNA, 625 bp, Zea mays
  misc_feature (235)..(237): n is a, c, g, or t
  misc_feature (250)..(264): n is a, c, g, or t
  misc_feature (267)..(269): n is a, c, g, or t
  misc_feature (272)..(275): n is a, c, g, or t
  misc_feature (280)..(280): n is a, c, g, or t
  misc_feature (283)..(284): n is a, c, g, or t
  misc_feature (293)..(297): n is a, c, g, or t
  misc_feature (313)..(320): n is a, c, g, or t
  misc_feature (328)..(336): n is a, c, g, or t
  misc_feature (345)..(347): n is a, c, g, or t
  misc_feature (350)..(353): n is a, c, g, or t
  misc_feature (365)..(365): n is a, c, g, or t
  misc_feature (368)..(369): n is a, c, g, or t
  misc_feature (372)..(381): n is a, c, g, or t
acttttttcaggtattggaaaatctgattgagaattccattccttaccttaagtacagctacaaaaagtacatagctgttcactaagtttcacatgacctcttgtccttatacttattattcccagatcaatagagtaatacaagaattctctcccatcttgtagcaagaaaaagcatgagaaagaatcaccagtgggtaggtcagtgcggttatcaacaagagtggagcaagannntttaaccccattnnnnnnnnnnnnnnntgnnnctnnnnacaancanngttcatttnnnnntataatacactcctcnnnnnnnntcccgctnnnnnnnnnactctctannntannnnatttatcactcntcnncannnnnnnnnntacgctacaagaacaccgactgctgcgggttgacgacgatgtggcgcagcgggttggggacctcgccgccgccggcgtgctccacgaactcggccggcgtgaggaagctgccgtggcagacgcacacgatccgcacctcctcccccttcctgtacttgtacaggaacccgtccgtcttgcgcccgccggggccctccgccttgtacgacaccatgggcatgtcctccgccatggcgctccggag

SEQ ID NO: 1693 - DNA, 319 bp, Zea mays
ttggctcatggcgattactggcaagatcatgatcgatgttggattggtggtaatgttctgaacagccgacctcagtaagtacctcttgggtaacacggtttcctttttctttagtgaaatacacatgcgaaggtttcttgagtggagctcacaagcaggtaggtattgtgggcactgcttgattgtcgtctcggctttgccttgtccggtttgctggaaggccctgagctgccgctgctagctgttcctatctcgttttgtcactgagcagttctccacggaagacggaacctctgaatgctgtgctggcatacatatt

SEQ ID NO: 1694 - DNA, 248 bp, Zea mays
ttgatacagggaggagtcgcgaggggacgtagatgccgacgctgacaaagctgtacagcatgaaggaggctgccctccacaacacgcccgacgactgctgggtcgtcgtcgacggcaaggtagcgccagccgccactgtatcccttcctcatccgcccttgctgtagataggtatgtaggtgcgctgtatgcagcggtaggtagagatgtaaacccgtggggagggaccgagggagggagggcatact

SEQ ID NO: 1695 - DNA, 273 bp, Zea mays
ggtgccggtgccggtgccggtgccggtgccggtgcgttcctgttgcgctggtcttgctctctgccgacggtagtgtcttggtacaacagcgcgcgggaggatgtgtagtaggcgaggtagctagtcgactagatgcgatggtgtgccgtgtgtgcatgtcggcgttggtccaactccaggcgcgctctccattgatcgcgcacactgtctctgtctcccgggccgggcagacgtgcttggtttggttctatgcgtgaacaacggcggcaattt

SEQ ID NO: 1696 - DNA, 985 bp, Zea mays
  misc_feature (7)..(7): n is a, c, g, or t
cgctggntctccgcggctgccgcgacgagtgctccgcctccgaccagctcaagcaggttgtcctctcaccccaaaatctgtttctccccctcgatttcgaaagaaccacgatggaaaaggaaggttgcccccctcgccccttgccatttgagagtcttggggtaaaggatgatctcgtctacgatgttgccaagacgaatgaagacatgcggaaactgtgaggtagagaaaattgagcagttcgtgtgatgtgtcgttttcggactaggtgttccggtgtgctccccttcgcttacctatgtctgtgttgttcacttcctggatagacttcgtcaatatttgttgttttgtcaaataaactgctagtggatcaatgtgtgggtttccttctgctacctggattaatgagtttaatatgcaagttttcgtagctccgtgttgggggaaacatcagaaacttttttgttttcttcggaaatgttgtttcacacccctctacattctctaactaggacaaattgcatcatgcacttgcagttgtgctcactgaagttaatgcagtttcatttcttttatttactgtgctgctgaaccaaccaaaaactcaaaacttactaaattaaactaaaagagtgtgatctgatctggttgacgtaattcatttctcgatgctgaattgatcacttgcagcatgtgctggctctgcaggctcacgatgtcttcaaggcgaaagaggtggtcctgcaaaagaagatctctcaagaggtggaacgggccaaggagttcacaaagtcgggaaacaagcaggcagcaatgcagtgcctgaagaggaagaggtactacgagagtcaaatgaaccaagttggaagcgttcagctgcgcattaacaccaaggagagaatgatcgctgatcacacgggcaacaaataacacaaagtgagaccgcatctctggaaccgtgtatcgaacacagcttgttctgtca

SEQ ID NO: 1697 - DNA, 336 bp, Zea mays
ccgcctcgagccaagctacaactgcgtgtcaggagctacaaccaagcatataagagaacatccatattccatagtaaacataatcgactgacatcgaagaaagaaaggtactccattgtagtcagcgacatcccgtccaagggcaatggggcctacactggaatcaccggcggtgtttgcaccagcagcgtgggtttcccatcttcagggatattcgtcaagaataccggatccgatgggatgatctgcgttggcgtcatcgactgaccttgttgtgcccgaggactataggagatgtttgcaatgccgccaacggcgctcctgtcgagcaactcc

SEQ ID NO: 1698 - DNA, 461 bp, Zea mays
gcaagcgcgaatacgaggacttcgtgcctccgcacaaaacggagcgcgagccggccacccacaccctcaccgtcaacctctccggccaaggcaagcaatgcgcgcgcgcgcgcatacacacttgtcggtccattcttccccttgcaagcaatgctaatcattgactagctgggaataatggcagggttcaagaaggagcacgtcagggtgcagatggtccacagccaacggcgcctgatcgtgcgcggggagcgccccgtcgacggcaaccgctggagacgcttcggcctcgagctcctcgtccccgacggctgcgacgccaaggccatccacgccaggttcgaaaacggcgtcttccgcgtcaccatgcctgccgtcccgccggagcaagtcccggtcgtcgccagcgctgcgaagcaagacggtggtgaccgtgccgcgcgagggcgagaagacaacaa

SEQ ID NO: 1699 - DNA, 366 bp, Zea mays
  misc_feature (19)..(21): n is a, c, g, or t
tggagccagtatcctacannncatttcgcttctactgtatctccgtgaaggcatgaacgatccacttacttttcattcattctgaacagagagtatggacgaagaggaacctgttcaaggaagtttcttaggtatgttgcccccaaaggaagggcaaccttcgtcccactccagcgttccacaagaaagacaccaacctcgacgtaaataggatatggaggttcaaaacgtaaagcataggaaagtaaaacaagtgggaaaaaaaaaatcttctgctgccttttgatatgctccctgtctaagttttgtaaatcctaaccattgcgttctttagccaaatgtttaaaacaaaaaagatcaccggcc

SEQ ID NO: 1700 - DNA, 352 bp, Zea mays
gtggtagggctagtagtgagcagtagacgacaactagtcctggcagccagttgtagtgaggtgacatggctgcatacagacatccaaccaaaggaaacagagggtgtggaaagaaggggagagtggacaaaagccagaccggacagacatggctggcgctgctgctgctgctgcataggcacaggcacagggaaaggtgatgagacgagaggggtggggtggtactctgctgggaccggcgcactcacgggtgcggagaatcagcttcgcctcacgagcgatgcagcagcggagacacagacacagacacctctcgtctgcgtactgtttcgcccatgctcttgtcttgtac

SEQ ID NO: 1701 - DNA, 137 bp, Zea mays
ttttacaacctcacatgtaaccagagatgtaattttatgcaaccaatctaagacttgctagcctaaaccataaaggcatagaccattctcaagatggactgaaaaaaaatctaacctcaacaactaatctcacttcc

SEQ ID NO: 1702 - DNA, 831 bp, Zea mays
cgcttgcttcctctgctcggttctattgtaccccgcccaggttcttcttggggacgtgggcgccggcaagtccagcctggtcctccggtttgtgaaaggccagttcgtcgagttccaggtgagattcttcgacccttcaaacgcggattgcctctgggttcagcaggatcgtgatacagagtgggtgcttgaacgtgctgtttcgtttggccgcaggaatccaccatcggcgcggctttcttctcgcagaccctggcggtgaacgacgagacggtcaagttcgagatatgggacacggcggggcaggagcggtaccacagcttggctcccatgtattaccggggcgctgcggctgccatagttgtctacgacatcacgaacgcggtcagtacaacgacttgaatcagtaccggttaatacacacattgtagttctctgcctcattgttgagtccagaactgaaatgcgtcaatactactgaaatgaaataataactggaagcagtgttctggagaattgttctgcactcacccatccttctttgtgtgccacgattgcttagcttcgcatccaactttgattttacagcgtatagcgatcaaactgttaattgactctgctctgagctgtgcaaagatgcaatgttataggtttcccaacttcatgtattgtacccttcgagggtgcgttttgtactgaataagtcggcataaatgaatcagtatgatgttgtaaacctagagcaactggatgtttgcacctttttctgtctgcatttcaagagcaacctaaatcagaacaaaattccataactttcgatgctaccaagcc

SEQ ID NO: 1703 - DNA, 657 bp, Zea mays
tatacccaaggataagaaggtatggtctattataaagactaagtattttgattaaatacctatattgcatgctacgagtttataaaaaaaattctagtattcagctgttaccttatggttgtcattttgtgaactagcgctttccatgtttagttgatccgtttctatttggatttgctttagttctgttactttttatgtcttgctttcgtactttatttcacttctcgataaattatgcaagcttgatgtatttatggagcgacattggtaggaaatgcatgcgttcacttccatatgctgattgtatgctaaacactgcagatccagctagttgaagtttcaaagccctctccatcattaccggagatcttatccggcattggaggttcgttgcttggagttgacagggcagtgaagggagtgctccaggacatgacctccctaagtggagtccaagctaggatggatggaattctgtttgaaagtttaggagacatgtcaggagaaaaccagttattgttgcttgtaaaagatatcatgaactattttgattaattctagcattcaggtccttatgttccaaacatttgtatttagagatgaggggaaattcataatgtcactacacatctatcttgcacagaaacaggtagc

SEQ ID NO: 1704 - DNA, 385 bp, Zea mays
ctgactatctgaggcacttcagtccaacctgacagtccatctcgcacggtgcacgatcagagtcactatccagtgcacccctgcagcgacttgcattgggaccgggagtcgaagcctcgtctcggctgtggaggctggaagcaatgcagggcagcatcgatcagcagttgagcacgcatggaggaggccggccagctgcgagtcaggctacaagttgccatatcttcttgtgtcgctttggcgtcttgctttctacttaggttgttagagcatctccaaaagaggctctaaacatggtcctattttaaatatagggctcaaaaccataaaacattctttcaacagcggctctattttataaaattttatcaaatggttatagcac

SEQ ID NO: 1705 - DNA, 343 bp, Zea mays
ggaggtaggtcaagaatattttgatcctaatgttgtaccaagcgatggagctaccatgattggtgatgcagttgctgcacaaacaacatatgatcgagacaatccaaatataaaagttggctccacatttgtcgacaaggatgagtttatgctacttaagacaatatgaagtcaaaagggaattggaaacaattgtagtgcatagtgatataagtcggtacaaggcaaaatgtgtagattcagaatgtgattggaagatttatgtaatgaagcttcttgattgtcctacattcatggtgaccattatattgtttattaatgtttacaaacttggttgtcctac

SEQ ID NO: 1706 - DNA, 337 bp, Zea mays
gagacgggttttctacatcttcttgcgcctctactgctgacgggagggaagggagcggatctggtgatccgtggtaacgtagttctcaacacgttatcaacacgctctacctcgacgttgctatggattcgatctgcaccgaatctccatcaagtcggcaggtctcccggccttgccgaactatcctacgcgatagccttcgatttcctttctatgcggtcacacggtatgtctttctaagtagattggatgtaccgtttatgggcgatcatccggtcgaacaagtacacggcgcctgggcacgtcttcaacccggcactggaggggagttggacag

SEQ ID NO: 1707 - DNA, 451 bp, Zea mays
tgattttggatttttgctctagcaacttaacatttcatatctcagaagtagcaactatgttgaacgtaggcatgaccttgacactcaagtgttgctaattgggcacttattgtactcaggcaaaagtggagcatcataatctggctggggcttcttgtgggtcatcttcttcagtcttgtcgcaacaggaattacaggatatgcaccgtacaagtatagggcccgggtaagaaatagtatatgctgacacttttatgttcattaccttctgataacttgggtgcatctaattttgttcttgcattgcatatgcctacagaggtacatggattcagagatatgtgccatcatggctcactacatgagctgtacaaccaaggagagatccaaatccattctcatcacattgagatgtgacgcagtaggacacagactttgacgaagggagact

SEQ ID NO: 1708 - DNA, 410 bp, Zea mays
tggtgactgatcggagcgacatcaagaggtggagattggagatcaaagccaaggtggtaaagatgacagaagtgatgaagacgctctagggtaaggtgaacgcgaagtcgagtggggaatctcctgttttggtggattcgatgaagccgaagacgactggagggatggtgaccacgtcgaccggagaaccatcggtactggcgagtgcgtcggcgtcgatgacacctgaacccacggtgatcggatcggtgaccagaccaactcttcaccgtgctgctaaacccttccgtcgatcggacgctggaccggagatggcacgtacaccatactctatgggaggtattgtcgtgttcgcgttgaatacccagcacccttggtcctttgttcctatttcagtagtgcagactgca

SEQ ID NO: 1709 - DNA, 304 bp, Zea mays
tgacgcccgcgcggccgcgctcaacactcacccgtgatcaaggctacatctagtaattgctaataaaatttgaccaacttattaaaagcaatgctcagcttgaacccctattattgatcagccttacaattcacatgaactctcacctttggtgagttcatgcacattattccccataatttgttgagctatgatcttttatgagctcacacttgcgacatataaaccccccacaggagaagaataggtggtccaggaggagccgtacaatgaggagtacgagttgatctaggtggtgtctccc

SEQ ID NO: 1710 - DNA, 554 bp, Zea mays
cgattcgggggtgtgttgtcgaaggcggcaatggcgagctactcgtcgcggcgtccatgcaatacctgtagcacgaaggcgatggccgggagcgtggtcggcgagcccgtcgtgctggggcagagggtgacggtgctgacggtggacggcggcggcgtccggggtctcatcccgggaaccatcctcgccttcctggaggccaggctgcaggagctggacggaccggaggcgaggctggcggactacttcgactacatcgccggaaccagcaccggcggtctcatcaccgccatgctcaccgcgcccggcaaggacaagcggcctctctacgctgccaaggacatcaaccacttttacatgcagaactgcccgcgcatctttcctcagaagtgagtccgatgctgccgccattgttcttgcatccatccagcatcgtacgtacgtcctctatacatctgcggatcatcatgtgcgcatgtttgtggcatgcatgcatgcatgtgagcaggagcaggcttgcggccgccatgtccgcgctgaggaagccaaagtac

SEQ ID NO: 1711 - DNA, 261 bp, Zea mays
tgcttttgggagagcatggagtgtttgatttgtcgctaatgtcatgttaaggcttgttcattgtactaggatttagttatctatggaaatttgtcaaggattgctgggcttgaagattcagcgtgtttgtattatggttttcatttactagcttatccaggtctgctcttaaacccgtagggctttgtacccagaaaagtactggctgctttcagacgcaggcatcctgttggggagagttggcagcgtatcatcatctta

SEQ ID NO: 1712 - DNA, 459 bp, Zea mays
atctcctagtctcaaggaggttacctgggggtgcactggtggaagtccccaacgctcgggacatcaccaaggattctcctcgttcttcccacccctacttcttgagttcttgcccacaaccctttgttgtgttgcttgctgcgcatcaatcccctgctagaccacgaaggtatcatcatttacttctttaatgtagtagatgctaatttacttttccacaaatttttgtcaaacttaggacaaactcagaaattgttatattttaggactaagggagcagtatttatctatgccatatgatgaaatggtggggtggaggactggggcacgaacaccttttataacaatggctcgtggttcagagttggttgaatcctattgatgtgtgaaacacttgatccccggtgtcgggtctagcggaaatgtgtaatcaaagctaagcacataagccactgtaga

SEQ ID NO: 1713 - DNA, 765 bp, Zea mays
  misc_feature (367)..(367): n is a, c, g, or t
  misc_feature (369)..(369): n is a, c, g, or t
  misc_feature (372)..(380): n is a, c, g, or t
  misc_feature (402)..(409): n is a, c, g, or t
  misc_feature (411)..(417): n is a, c, g, or t
  misc_feature (419)..(437): n is a, c, g, or t
  misc_feature (440)..(758): n is a, c, g, or t
gcgtgtcctgaaagagatctactgttctttgattgagatccatagtagtgctgctggcaaagctgcattggtgaattggagctattttgtggaacatgattttagctagctaaaattctttggaggtatgtatgccgttctctcttcatcctggtcccggagtggtcgacatgcacagtatcgatacctgtagattgtactgatgactgctgcggtgaatgtgttgccacgtcgctggtcagcgacagatcggatgcgagatccagatcatgtgacgggtagccgttggtaccggtacggtgcctcacgagtgccggtcctgggcagtgggcaccatggaaggcaggaaggaagggtatagcttatntnctnnnnnnnnntgaaacacttgatccccactgnnnnnnnnannnnnnntnnnnnnnnnnnnnnnnnnncannnnnnnnnnnnnnnnnnnnnnnnnnnnnnnnnnnnnnnnnnnnnnnnnnnnnnnnnnnnnnnnnnnnnnnnnnnnnnnnnnnnnnnnnnnnnnnnnnnnnnnnnnnnnnnnnnnnnnnnnnnnnnnnnnnnnnnnnnnnnnnnnnnnnnnnnnnnnnnnnnnnnnnnnnnnnnnnnnnnnnnnnnnnnnnnnnnnnnnnnnnnnnnnnnnnnnnnnnnnnnnnnnnnnnnnnnnnnnnnnnnnnnnnnnnnnnnnnnnnnnnnnnnnnnnnnnnnnnnnnnnnnnnnnnnnnnnnnnnnnnnnnnnnnnnnnnnnnnnccccccc

SEQ ID NO: 1714 - DNA, 420 bp, Zea mays
cttctgcatcgtcaagcgccgcctccccgtcgcctcctccggtgccggcgctaccgcaaggcctaccacggctcataccggtgtggacgtcgctgcccgtgaatccgttcacggcgaaggcggcgtttatccggtactggaaccggaaggtgagcagcaaccgcccgcacccggccttcctcttcgccaagctgtcgccgctctcggccccggacgcggccacgttctccaacctggcctccgcaggcaagctcgcctcccgcatccacgacttctgcgatgcggcgtccctgctctgtccatcgacccccgcggcgtcctggtcggcgtcgtccacgtccatggacggtgccgcgggcgtggcctcctccggcggtggcagtggcgctgcctccgccgcgccgttcaaggactacgaga

SEQ ID NO: 1715 - DNA, 705 bp, Zea mays
ttcactttatttctaaacgttagtaatgtatttggtagtattctaaattgccttcactttcagataaaacaactgaggaaaatccagccaccgttctccaatcttctccgaagataagcgaccaattgagaaagatatcaaattcactgaagcttcttaattctatggcacctagtatagtaaaacagaaaacagatatagttcgtccacaatcctttgacttagttgaagcagaaccaaaaactcctgaggtcaacttaaaactttggcatgctcaagatgcacaagaatcacttaaggctcgtagcacagggattaaggtaactattttgaactcattacatacactttttattgtatcattagctttggtaataaattgtttactctttttctctacaaatgcagaaatctctagctaaggagtgtttgttgtttctaaacagcgctaataagtaagtattaccaataacatattatattatttattgttgaatagacttcatttatgtttctctaatacatatttccgtatcaaatgcagggagcagttaaaaagtttaaaggtgctcaaaaaccttaaaatattattacttaaccaaacataaatgattgcttatgtcttgctaacatgttggtgatgtgtagggtattggagagaaaagggcaaactatatacttgagcttcgagaggagtcaccattg

SEQ ID NO: 1716 - DNA, 695 bp, Zea mays
cgaggacaggttcaatagatcagtggtacgtgtccaagctttgttccgttctcatcgggcgcagcaggagtaccggaggatgaaggttgctcatgaggaggccaaggtaagggtttcacccttgtgccttgctggtactgactgacatgtgatacaatctccagaaagaagttaggttcacaggaacaactgctttgactactgccagtaatcctgttattagaatactcgcctactgtagttgagtttatgctttcgtccactgttctgaatggagtgaatctgctgtatgttttcagaaagtcagatttgctaaacccaaaacttgatatgggatttcaactagggagctgtgcatgcaattatcgttataaacacttctagatttcgtttgtagacactgccatatttgctccttacatctgtgcttgtcattgtattttgcaggtggagttcggtcgaaagtagttaagacgggcatagattcaagatctgaagtgacttgttgttccttgtagggggttggctagttcttctagttctttgtatatccgaaggaacaggcgtagcttgcggatgacgtacattctaggaacatctgacgctcgtagtcagtctgccaactgccgttaggcttcttctgtggtgtgtatttggctgggttttagttgggcgaaaacggcattgtgctttat

SEQ ID NO: 1717 - DNA, 571 bp, Zea mays
catttatatattcaaaacatctgcccgttaattatgatatttgaagagttcctttttgaggaaaaatgcaagtacagggacatggcccttcagaacttctaagtgaatttacagtttatctcgtataatgaccccttgatggtcatctggtttttcctccacgggggctcaagtcctcgattatatgctttgcatcgtagagtaatatgcgtttccttttgtagtagcccgtctttttcagtttcccgtggtgttatgctctattgttttgacacctgtaaatgcaacgtcttcagcatgcctacgatgatggccgtttggaagacgctttattgaatcatcatgatgccgacgatgcaagcgcagcgattgccaaacttatgaggtgggtactctatatcctaccaagcttcctttacaaaattcctgggtatagtatagtactcgcttcagattagagccgcagccacagtttgattactacgaaacgcagctttttactcgcttgctgatatgaaactcctgtttatttcccaggttgtcgtacttactgactcggctgcatgtgtaa

SEQ ID NO: 1718 - DNA, 701 bp, Zea mays
  misc_feature (695)..(696): n is a, c, g, or t
tttgcactttttaaaacatgttatatgactacaacctaatgaagttcatttgctaggcccgacgattgctagcatatcccgatgtgccacagaatacagaggtaaatttgatatacttatatagttatcttctacacattgaaaaaagtgtgtacctttacatacctaatactctcgtagcatatagtaagaaccattctctttagctacacatctatagatttaggaaattgaccttccaatctgaactaccaagataattatacatgttttattgtcttcatcacaggcggatgaacactacacagatcaacttaacaagaaggagctttcctcaccaccgaaaatgtaagtattcgagtattataaaaaaagtaggataaacaacagatacattttaattttaccactaaaacttatgtccaggatgaagcacacccaagttgacaaagtcctagattctataattccagaaaaatgaagcttgttacatcctcatgacatgcatgaaggtataatactatatatactcctttgtgatacaaaacatattacccccacatattatctttcactcgccttagtacccattaaacagcaacaaataattaggcaaacattgttagcacaactaatcctatcttcctctttatgtaaaggaatttgcttttgcgtatctgtggagggcttcgtcnnttttg

SEQ ID NO: 1719 - DNA, 338 bp, Zea mays
cagctccaaacattatacacgtagattgagaaaattcttgagcccttgttctacccattcataacgacactatagcctatagttgagacatgtactttatcgtgggatagatgagacgattcttttacctcagcctgaaaatcattcccatgaaggagtcaaactcaagacatgagaagtgttatttacatcatctaacaatttagctagaggcctttcatgtgaacatgttagttttgattgaatatttaatttttgtaggttttaaactgaaaagtatcatgtaaccaacttgattttttcgctgatttgttcggtgatgtgtaatttgtagtcct

SEQ ID NO: 1720 - DNA, 717 bp, Zea mays
  misc_feature (628)..(630): n is a, c, g, or t
  misc_feature (632)..(632): n is a, c, g, or t
  misc_feature (646)..(648): n is a, c, g, or t
  misc_feature (681)..(683): n is a, c, g, or t
  misc_feature (691)..(691): n is a, c, g, or t
  misc_feature (699)..(702): n is a, c, g, or t
  misc_feature (710)..(711): n is a, c, g, or t
atttgatgcaatactgattgttccaatgtttcaaattacttggaccttcttctctatttttataggatttgtttactttcaagaatatcaagtaagttcctatttgttataatcggataatgaagtgaatcatgcatttcctaattataaaccgatgattctgtttttctgctgtcaggtatttgatacactcaggataattatgtttgtgttaggcatgacatttgtctttgttgggatctccttgctagcacccgatgacagtaaaggttggtaaaacattgattttcatgtgtttgcacatagaatattttgactcttggtgaactgtcggcagctgatacgaaagatggttcaagcaccgccgaggactccataattgacatagacaggttctattccacgaacttgtagaaagtttcaagatttgctctgttgcattttgtgttcagtattgcattcagtgttctgatatataacctagacactgcagaaatggaaagatgctgatggaggagacagacacagatgatagcatctcctttgttacttctgtaaaagtaaatgcaaaacgtgtactttcaaaggcaaaggtcatttttgtttcttcctagatctgattgtaccnnnanaaaaaataggaacnnnctggatattcttgaaagtaaacaaatcctatannnatggagangaaggtcnnnntaatttgnnaacttt

SEQ ID NO: 1721 - DNA, 276 bp, Zea mays
gcgaagtaagcgagactccgcaacgcgtttgtgcaccgcgcgtccgggacgggacgggacgggacgggaggggcaatctcgtcaaataccagcgggcgcgggcgcgggcgcgggcggcggcacatgtccacgcagatccgcgatttgcgtgcgcggattgacccaagtttcacgcggtttcctttgttttcttccccgtctatctactctgctctgcctttttttaaaaaaaatccgcgtgctgcatttccgtatatatatatactgttcacgtct

SEQ ID NO: 1722 - DNA, 396 bp, Zea mays
atgaatccacgttgcgggtcagttcacacaacatcatcatattccttattctccactcgattctcgacgccctcgtctccatcgccgccccaaccacccaacgccgactccacctcgttctgcagcgccctcgtctccaccaccgccccaaccaacattgattccccttgatttgcagtgtccttgcccccacccattgcattagctccgtctggcgtgccgcctctttgtcatggatgaaggatagttgtaagtgattagtagtataataccagtagttgttaattgttatgtggtttgggctagcccagattacggttaacaactggcttaaagccttgtaaaggttttgtgatctatctaggcctgtattatgaagtgtcctcaatcctctgg

SEQ ID NO: 1723 - DNA, 465 bp, Zea mays
tctctactgtggtccgagaaagaaagttttgaagagtataatgagtcttttatccctggacgcccagaacgtctctcatttgctgcgtaccaaacagtttcaggtgatgtttcattccgatttcatcgctccagttcaaaatctttaggtcgtatcatattgatcaaaactttcactgcacatctatatattctataaatgagaaacatatgttttaaatatgagcaccatccaaatagatatacctgttccgtatgttcctaggtatctaactttttaagctgtacactacaggcatgtcagatgaagaacttctcactgtgcaaaactacaagatacaagcaatggattcgacagacacccttgaaaggctgaacactggtatcaagtttgtagaacataacatcggaatgatagccgcaaggcttgccattcaaaatatatgatcctcattggcagtgttta

SEQ ID NO: 1724 - DNA, 359 bp, Zea mays
tactcatccattaaaactgtatatgattatcatgccacatcgaagtattatagattgtgtcatacttagatctatttattttactcctaaattatacaagctagattatggtaaaaaggtaaaagatagaatcataaataagctgaaataagctatcaaataatagtttattttaacttatttatggttttaaagtaatattttaccctcttaacttttcagcataattcaacttatataatctattaataaaataaacgtcttatataatctattaataaaataaacgcaccgttacacggcctgttcatacgtgctgcagtgctgccaagttgctgttgaccgactttgttcttctg

SEQ ID NO: 1725 - DNA, 497 bp, Zea mays
ctcggcctcgccggcttggactcctcgtgcatgggcgccatcatcagtgccagcgccagcatgagctgctacgacgagccacagcagcgtgcacaggctcaggcagagcagcagcagcagcaaagcagcaacgagcaatggcacagcatgggcagccatcatagctaggtcgataaagctactttcttcttcctctcgccagccgtcgtcatcggtacgtcgccatcgctgcatctcatcgctgccgtcgctgtgcagaggcaaagctagctagggccggccgctcggtgcaccgtgccttttgctcatcttttgcttctgttcaggatatcatctcatgcatgtggtaaccacgcaagcgatcaaaccgttccgatcaaactctagcccggtcgaaggatggtgatgacagattggtcatacagactacagaggtatgcagggagttgtataatttttttttgggttggcgaagagatcggccaacatgtaagcta

SEQ ID NO: 1726 - DNA, 245 bp, Zea mays
gatgtcagcaagattgatggttgctaacaatgaccttgtgctgtttcttaccgggttttgacgtgttggatttgtgattaccactgattgctattgtacttcaaacaggaatggctggaaatgcaactcggcttctcttgagaccttgtcatttgctgtagttcgttcgcaactgtatattgtagcttggaagactctgtgccgtggtgcgtgtatttgagaaatttctatgcaaagtgagctgg

SEQ ID NO: 1727 - DNA, 356 bp, Zea mays
ggtccggccccaagcctggccagtgcgatgtcgcctggaggttccggaaccgccgggagaagtcgtggcgccgctacagggactaccgtcgcttcagcctcgcctcgggcgatggctgcgctcttgacatcgtcagcgtcggcaagttccgctcggggacgaatgcagctcgccggccgtatcctaagggctcgaagtcgaagaggccccgcgtgtcgccgccgcctgtcgatgcggagatcaatgacacaatccctgtcgtcggatcagaggcagagttcaagaagggaaagtacttgtactacatgagaggaggtgaccattgcaagagcatgaaccagttcgtctggagcttc

SEQ ID NO: 1728 - DNA, 377 bp, Zea mays
gaggaataaattataatgagaggacttaacatctttggtacagcactggttattgttaagtggaagcagtaagctctcaatgcagaaaattgtcaaaattaaaattatgttttatcttgtagttactgttgacattgcatagtacgtttgatcaattgcagggcttcgagctctcctgtggcttcgttaagcaatgggagctgatacgtgaatcacgtgatgagggtttcaaggatggagtaggtattgatgttgctatcagtatggtttctgtagtcccatggaacaatggtccatggatagtctgacaaccttctctacagaactttggaacattcttctctcatgtatgttgtctgtcttcagttaacatgcca

SEQ ID NO: 1729 - DNA, 360 bp, Zea mays
aggccgagttccaaagaggagcagggcaccctgaacctggaactcggcatctccacgaccccggacaccttcaagagccacacatccggtggccacatggtggccgtaccgtgcgtcaactgccacctcctcgttatgctctgcaagtcctccccggcgtgtcccaactgcaagttcgtgcagccctccgtggcagggatgcccaagacgcctcctcgccgccggctggaaaccgtcaagccactgctggagaccttgagcctcctgcactagcagcttgcgcgccatgcagtaacggcgggcgtgtggtttattacaaagggcaaatgcaaatcgagttgctcaaactcaatactccct

SEQ ID NO: 1730 - DNA, 447 bp, Zea mays
agcgctacgcggccggggagagatagggaaagcgggaagcaaggacgatggcgtctctgctcagcctgtacggcggcgacgccgccggcggtcggaggaggatgagccgaggtagcggcacggcgccggcgccggtgaggcgtctgctgaggaggctgaggtccagcttcatcagacggagcgcggcgcggccgaggacgagggcggcggcgaggttcgcctacgacctgcgcagctactcccagaacttcgacgacggcgtcatttcgtcgtcagctccggcggccacggctcgtgcgtagctgcgactccaggaggattctgcttcttctgtgtagtaacaagtaactgtagccaagatgttagctactagctagtgtggtttagtgctagtgcttcctcactgagctagagactcataatcgagtccagtgttaatttcttgtg

SEQ ID NO: 1731 - DNA, 217 bp, Zea mays
acgatgtcttctagttcttgctatgcttggctggaagcgcatacacacgacggtcagagcaagccgccgccgcacgcttttcctcatgttactttttttttctctctctctctctccatattttagttttaccgggcgaattaatccgactacgacaaggtaaacgccgtcaacgtgatcgtggcgttatgggcatgtgtatagagatcaagattga

SEQ ID NO: 1732 - DNA, 250 bp, Zea mays
agaagagatgaagccaccaaagcgtgcagttgaagagtcgagtcgaggactctaagaagcgactacaggccggctttcccatatgagattgtggctgtttccttcattcctgcagggagttgttggctgctgtgggctctccgcgccgggctgtgggtgctgctgtttaggccaggggagtgcaaatagggtaaaaatgtatatactataaggcttttggtatttgggactgggtgcggccgcacccagt

SEQ ID NO: 1733 - DNA, 256 bp, Zea mays
acatggtgttcctgcctgccggcgccgtggtggtgcaggtggtgccgtacgggcggctggagtggctggcgcggaacacgttcgcggagccgtcggcggggatggaggtccactacctggagtacgtggtgcagctggacgagacgacgctgagcgagcagtacccgagcgatcacccggtgctgagggaccccatggccatccacaagcaggggtggaacgcgctcaagaccacgtacctggacaagcagaacgt

SEQ ID NO: 1734 - DNA, 1250 bp, Zea mays
ggcgatcatgagcatggtcatgtgccgaatgagattgacaggaagggccatggtgatgcggctcatgacctgaggattgtagcagagagagtgcaggacctgaggcactcgcagtcggaagctgacaccaaacgagccaaacagtgagttggattgatattattgtttcactcaatttgaaaaattatgttactccatccaattataaattataagacattttgtttttttctcaatacatagattttgctatgcacttagatgtacactatatctaaatacatggtaaagaattgtatctagaaaaaaacaaaacttataatttagaacggagagagtagtttttgtggactctgtggtcttgagacatcagtagtggtaataagtctgattgttgaaagcaaacacttaagtggaaccataattctaatttgcaatattcttttagactaaaaggtaagcacatagctataccacaagctgcacatcaggttgatttctcttatgatgtgctttgcttaagaactgaattaagtgttactaaacagtgcaaatgtgtctgttctgaatgtcttgtctatgtatttggatagacattttattggtctattggctgtggcaattccacaggagtacaaacttaaagtgggaaactctactcatgtggagtagagtccctaaaactcaagtaactgatttcaaaacaaaatgattgtatgcacaatagagggttttagattagatgaccactgagcaatcaatttgtaaatagattatgcgggaagttctttagctccttaggatgtttaagtcctaataagatggaactgtacatgtggaatgtgtttgtcagtgtgtgccatctttaaatttggaagaagcttgaatgcaaaataggtgcacatcttcatgtgcatcgagtttcattttggcttcagtatatgctgacttaagtctgcacaatgatatttttacttttgttgacaactgcagacaatacgctcagagatctcgtgttcgcaagatccaatatattcagagctcgagagaagagttcagtccttacaggtaatctttctttttaaacaaatcatatgagtcatttattgcacgagttagaaagctttaacatcccaaagaattcttaattttttatgcttgcagacagaggggatagaagtaactgctgaaattgattttatcggtcagcaaaatatcatgttagacttggaaaataaggcctgaagcaa

SEQ ID NO: 1735 - DNA, 324 bp, Zea mays
tggctgccaagccccttccatggcgctcgccaccgtctcctgtctggtcaccccatctccagcccgatctgctctggctgtcagccgtgtcaccatggctgtcctcctccgctgccactcgttggaccttgcccctgctgtgccgccggcagttccccgcgccctatcctccctggtgctcacctctgctccccctgcgttggacggtcgcccctgtatcattgcgcgtgcccctcctcacaagccatagcgcagcagccaagccctagctcgccaaccccctccgttcggtcggccatggccacctcgtcgaggccccagcca

SEQ ID NO: 1736 - DNA, 743 bp, Zea mays
gaggaggacgccaagaggacaggactggaaggcactggcctgccgctgcaaggcggctcccacggcaaccttcgtagcgctggcagcgaccagcagttgaggcagatgctcgattcgctcaaatcctcaaagtccccggtaagtacagttgctgatctgcagttctgcactcgccgatagaatggtcgaaacgacctatatgactctaatgtcccttatatcaaaaaagaataagaagaagaagaagaaaatgttttgctcttaatgggaataatagtgaaacagagaacgggacagcatttgtagtgttttcagaacacgggtgtactactaccattagtccatagaattttgatgttcagatgtttgttttgatgaaagctctttggcgtgttcttttgcaggctgtgatcaactatggtgcctcatggtatgcccctttgtctcttgcttgtgtggagacattcattatttttttttaaaaggctacacatacgttaaagctctatagtcctatggtttggacctaaactctctaggcagcctgatggtttgcgtatttacatttgttctgttgaaatatgcattccacacttcaattttttaaaggttttggaaaagtagatcttttgctatgccatggaagtctaaagttctgcttatactgataaccatatgtggtgattgaatttgcctgtccacttgattctgcatgatcaatcaaactcactcctccttatacg

SEQ ID NO: 1737 - DNA, 438 bp, Zea mays
atctgagacacattgttatggtaaaaaatgcacgaattgaggaagattatggcacccatatcgctgatcttgacataaatgagttacaagagcggcgcaagcgaaggattgaagaactccaagtaattgaaaggacacaccatgaatttctcagcatgaaaactaggatggtagctagcattggggagttattgtcaaaaatggaggcactgaaacaaaaccgaagcacatgaactgaggttactattgcagaaatcgaagttactcaacttgtttaaggaagcctgcacatattgttgtaagtttctttttcttttattatgatttccgcttgttctaggactagctttctgtaatattattctttttcactactgctgtgatagagattccttcacttttggatcatttcaatcacataggcagaatgatgagatg

SEQ ID NO: 1738 - DNA, 416 bp, Zea mays
cgaggcgatgaacaggctcctgccggccattgtgctggcgagctcggtgttgacgccccccgcgacccagccgctggtggcctgcggcgcccggaacgcgttcgccgcgtggttcgtccagtacaggctggcgccgcgcacggggaggttagtgcaccgctggaacaatcgccctggcggagaacatggcggacgagcaattctgctgctgctgcaccatggcggtggacgcgaagagcaccagcacggcaacgagaaggagcagcgccgactggcgacgagaagatgctcttactaccatgagttctgttgcaggacacacatggtgaacttggtcatggtttttgtattggggctagttctttatgaatttcgtttagtgtttggttcgttgccacaaccataaactgtaatat

SEQ ID NO: 1739 - DNA, 416 bp, Zea mays
  misc_feature (124)..(124): n is a, c, g, or t
  misc_feature (330)..(330): n is a, c, g, or t
  misc_feature (381)..(381): n is a, c, g, or t
cgaggcgatgaacaggctcctgccggccattgtgctggcgagctcggtgttgacgccccccgcgacccagccgctggtggcctgcggcgcccggaacgcgttcgccgcgtggttcgtccagtanaggctggcgccgcgcacggggaggttagtgcaccgctggaacaatcgccctggcggagaacatggcggacgagcaattctgctgctgctgcaccatggcggtggacgcgaagagcaccagcacggcaacgagaaggagcagcgccgactggcgacgagaagatgctcttactaccatgagttctgttgcaggacacacatggtgancttggtcatggtttttgtattggggctagttctttatgaatttcgtttagngtttggttcgttgccacaaccataaactgtaatat

SEQ ID NO: 1740 - DNA, 370 bp, Zea mays
aatgcatagtggtgaggcctagcgcttcaccaagcagtgacagtaagcataagtgttgtccatgagtgcaacactgtcctaccctcatggatagctcattattttgagagcttttagagtttagtatgcctgttttgcgacctatttaatcctttgagttcttatatagcctagaaatgtttttggttgtccctgagtccaacaactagttagttatgatgttttttggttgggctctttcttcattcctattagagtagagaacttaattttctgatatcagaaaattttacctacgtacttggttttggtatgttcaagtcttctagtatgtctgtcggtcatcaccgagaatatcgagaacctaata

SEQ ID NO: 1741 - DNA, 434 bp, Zea mays
ttgcgatgagttctttatgttttgtaggctcgctaccactcatgattattttttgcatcaaatttgggataggattccaaggattttggttgtcgtgcacatcaaatttgtctatctaggcaactacatgtagttttaagaatccaacgtgactcgtgagttcatgttctgtagactcaccaccactcaaatgattattttttgcatcaaatttgggataggattcaaaggattttggttatcttgtacattaaatttgtctatctagtcactcaactacatgcagttttaagaatccagcgctcttagaccgactttgatagttttcaatatttttttgagctatagttcatgaaattcatgtgttttggggtgtcctagaaggctagaatggtcaagccctatacactctaagggcatagttaaagccaaca

SEQ ID NO: 1742 - DNA, 451 bp, Zea mays
agagggtctagcaaaaaccagcaaaagcatgctgatacgaccaaggtaaaacatgattcttctacagttttcaccttgcatatgttcttttttttaaaaaaacgaccctgcatatattctttgtatgtcaacatgttcaaagccgcctgtgtttttattaggtcggcccacatgattcatgaaatcacaggtttacgctagcagctcttttgtgattcaggagatcagtcatcctcatggggaagcttaggggccaatgggattggttcatgcaagctaataagtttgtaagaatagcagtgatggaggtgggcagatgtatataaatctgttcattcatctccagatagccaaaagataggtgtttcctgttggtagtgtatctattaggaatgtcgtagattgctaatgacttcctgtaaaatcgtccaggaaggtttcagatattgag

SEQ ID NO: 1743 - DNA, 399 bp, Zea mays
cgctacgtgttcctcgcacggcagcccgtgcccgtgggccgccaccacccggaggaggacgatcgagacgcgagctttgcgaatgatgacgacgacggtgatggtggcgatggaacggcgggggaggaggaatcggaaggaggcgtctgtaggaggaagaagaggcctctcctggagatcttggacgacgacgccccgccgccgaccaagaaggcccaggtcgaactgatcatcgcgtcgccgctggcgacgcagacgccaccgagcggttcggagtcgtcgaacttagcgtccccgcctttggccggggagtccgggagcgaggggagccacgagaaggcgcacgagcatcgccctccaagagagcaaggaagggccaagaacgcgacaaagaagcag

SEQ ID NO: 1744 - DNA, 452 bp, Zea mays
tgtcgcatgctggcgtctggtgaaggagaggacaagcggcggcagagttggcgcgagcggatgtcggaggccccgatctagagactctataagcaacaacgaaaggtcatacctgcgtgtgcatgagaggataggggcaggcgaggggatgagaacctgagaagagatactcgcaggcgcggatgggaggagcgtgtggacttgcagagggacgacgcggaggaagcaagaaggggatgagaacccgacgaagtgatctgtagagggatgaggcggagggagcgaggaggaagagagacggggcagatggagcgaggagaggcagccaaagtcaaagcattaggtggaactctccagatgcgaggggaacgatgtgagagagcgcgattaaggtgagccagtgatccacgatcgagcggttaagaagattttcgatgacgtggatgggctaa

SEQ ID NO: 1745 - DNA, 1370 bp, Zea mays
  misc_feature (67)..(67): n is a, c, g, or t
  misc_feature (1321)..(1328): n is a, c, g, or t
ctcatcctgtctggtgttctgaagtcactggctttgtcacaagcaccgtgttgaactccaaaccctntcaaaagtttttcaagttaatgcctggcgaagttattcttgcttcacttgatggatttggtatgtctgatttacatttctttaagatttgcttgagaaatataggttcattcaggctagtttatatgtttctggggtgattgaatctaaaaaatgataggtttgtaaaaccagaagatataattgaaatcataatatggcttctgattctacccactccacaatgtttaacttctgctgcatgtctgcattgcatgtatgatcggttgatttaccccttattcaatgatacagggaaaatatgggatgctgtggaagtgtctggcaaaaatgtgatgcagacatcctcagttgtgaccacttctgttgtaacacacaggtaacatacaatgcaatggatacttcgtcgaatcaactgctttgtactccctctatcctaaattaaaattcgtttaagaaattaatagattcatagaatacttgatgtacatgttttttatgtgtcagattcatcatcaaacatttgaatatacacataaaaaccaatagctaaaatgaatactattttgggacggatggagtattatttttgggtatccactgtaacatttttttggttaggagtcctccaattttctgaactatgtgaatgtaactctttttggttggcagactttccatgccattttggcattttagcagcaaagtccatatggtgtatcatacatataagaatgaaacaggactttaaaaacaatttagatcaaattcaaataataattcaataaccagaagagattagaaatgcaagagatccaagaaatattgttcttttagaaaaatggcaatgaacccatgaactaggaagtactgctcttatgagataacagcatgcgggaaatgtttcttctgttcctttagaaaaccttgttccataacatgattttgcacctacttatgcgtagaaacggctcggctcttgtctggttgccacctggctattagtcaatgaaaaactaagttccagtgaactatatggttgatactagaactctagaagggggcatttagctatttgccgtccttcgtgtgtcactaacacataagtcactaacggcaaaaattttgccacccacttaatttttccctctagaagagtttaatggttcgattgatgcagatacggtgaacaagcaggtgaagccacacacaattacctccacgctacaggaaatgttctcggagctgcgtgggnnnnnnnnaagattagaaaagccctcgaccctaagggtaatagtgggagt

SEQ ID NO: 1746 - DNA, 285 bp, Zea mays
agtgaggcattttgggatttaggccatgaagccccccgatggttcgatgttcgtttccttctgcctccagctagcttctctggagcgagcacagcacatgctttaggcgggagcagaatcagtcaagctcatcttgacgaaggcaagcatgaaaattggaaagcgaagagcaactcttccccggcattttccaccccccacagccccttacgtttttcgtcctattctccatttgttgattacctgcttaatttattctttcaatctgtctcgtccgtacatcat

SEQ ID NO: 1747 - DNA, 931 bp, Zea mays
  misc_feature (228)..(230): n is a, c, g, or t
  misc_feature (248)..(248): n is a, c, g, or t
  misc_feature (253)..(256): n is a, c, g, or t
  misc_feature (280)..(286): n is a, c, g, or t
  misc_feature (301)..(310): n is a, c, g, or t
  misc_feature (316)..(316): n is a, c, g, or t
  misc_feature (322)..(322): n is a, c, g, or t
  misc_feature (354)..(365): n is a, c, g, or t
  misc_feature (367)..(367): n is a, c, g, or t
  misc_feature (371)..(374): n is a, c, g, or t
  misc_feature (377)..(388): n is a, c, g, or t
  misc_feature (390)..(390): n is a, c, g, or t
  misc_feature (394)..(403): n is a, c, g, or t
  misc_feature (405)..(405): n is a, c, g, or t
  misc_feature (407)..(407): n is a, c, g, or t
  misc_feature (410)..(422): n is a, c, g, or t
  misc_feature (424)..(432): n is a, c, g, or t
  misc_feature (437)..(437): n is a, c, g, or t
  misc_feature (441)..(441): n is a, c, g, or t
  misc_feature (449)..(457): n is a, c, g, or t
  misc_feature (459)..(465): n is a, c, g, or t
  misc_feature (468)..(485): n is a, c, g, or t
  misc_feature (487)..(490): n is a, c, g, or t
  misc_feature (493)..(496): n is a, c, g, or t
  misc_feature (498)..(499): n is a, c, g, or t
  misc_feature (501)..(501): n is a, c, g, or t
  misc_feature (503)..(513): n is a, c, g, or t
  misc_feature (517)..(521): n is a, c, g, or t
  misc_feature (525)..(540): n is a, c, g, or t
  misc_feature (543)..(543): n is a, c, g, or t
  misc_feature (545)..(546): n is a, c, g, or t
  misc_feature (548)..(549): n is a, c, g, or t
  misc_feature (551)..(558): n is a, c, g, or t
  misc_feature (576)..(583): n is a, c, g, or t
  misc_feature (585)..(585): n is a, c, g, or t
  misc_feature (587)..(593): n is a, c, g, or t
  misc_feature (596)..(597): n is a, c, g, or t
  misc_feature (599)..(599): n is a, c, g, or t
  misc_feature (604)..(611): n is a, c, g, or t
  misc_feature (613)..(616): n is a, c, g, or t
  misc_feature (618)..(618): n is a, c, g, or t
  misc_feature (620)..(625): n is a, c, g, or t
  misc_feature (629)..(633): n is a, c, g, or t
  misc_feature (635)..(637): n is a, c, g, or t
  misc_feature (640)..(640): n is a, c, g, or t
  misc_feature (642)..(644): n is a, c, g, or t
  misc_feature (648)..(657): n is a, c, g, or t
  misc_feature (663)..(670): n is a, c, g, or t
  misc_feature (672)..(682): n is a, c, g, or t
  misc_feature (688)..(689): n is a, c, g, or t
  misc_feature (691)..(707): n is a, c, g, or t
  misc_feature (719)..(722): n is a, c, g, or t
  misc_feature (730)..(733): n is a, c, g, or t
  misc_feature (735)..(736): n is a, c, g, or t
  misc_feature (742)..(752): n is a, c, g, or t
  misc_feature (758)..(758): n is a, c, g, or t
  misc_feature (760)..(762): n is a, c, g, or t
  misc_feature (769)..(771): n is a, c, g, or t
  misc_feature (777)..(780): n is a, c, g, or t
  misc_feature (782)..(784): n is a, c, g, or t
  misc_feature (787)..(791): n is a, c, g, or t
  misc_feature (800)..(801): n is a, c, g, or t
  misc_feature (804)..(805): n is a, c, g, or t
  misc_feature (811)..(815): n is a, c, g, or t
  misc_feature (817)..(819): n is a, c, g, or t
  misc_feature (822)..(840): n is a, c, g, or t
  misc_feature (850)..(853): n is a, c, g, or t
  misc_feature (860)..(868): n is a, c, g, or t
  misc_feature (872)..(877): n is a, c, g, or t
  misc_feature (880)..(885): n is a, c, g, or t
  misc_feature (888)..(896): n is a, c, g, or t
  misc_feature (904)..(906): n is a, c, g, or t
  misc_feature (909)..(916): n is a, c, g, or t
  misc_feature (919)..(921): n is a, c, g, or t
  misc_feature (923)..(926): n is a, c, g, or t
gaagcggctctcctcggagtcaacggcttgattgggcctactggatcccaaacaacatgggcctttgctcttggaaccatcagtagcgactagcgatagcgagtgcgaggcttccaccaccaccagtagcgagtgcgaggccgaccgtcaccgcgagcggcgccgaacgcggcaatcccccctcgatgacggtggctccaggccggggcgtcaactccaacggcaaannnattggtatgtcttgtagngcacnnnntccaggggacctccggaagatttnnnnnnntgcttatgacgcgtnnnnnnnnnnggatcngcagtnggtggcggtcgatgactgagactgtcggcgannnnnnnnnnnngncctnnnntannnnnnnnnnnngntttnnnnnnnnnnantntannnnnnnnnnnnngnnnnnnnnngttanctcntaccttcnnnnnnnnnannnnnnntgnnnnnnnnnnnnnnnnnncnnnncannnnanntntnnnnnnnnnnncccnnnnntccnnnnnnnnnnnnnnnntcncnncnncnnnnnnnnacccttttccacctttannnnnnnntncnnnnnnnatnngncattnnnnnnnncnnnntncnnnnnnctannnnntnnncgncnnnttcnnnnnnnnnncccccnnnnnnnntnnnnnnnnnnnttcttnntnnnnnnnnnnnnnnnnntcccctcgtctnnnnctttactnnnncnnccttannnnnnnnnnncccacntnnnccccccnnnatcctnnnntnnnccnnnnntcatctccnnctnnccttcnnnnncnnnacnnnnnnnnnnnnnnnnnnngcactaaccnnnnccccccnnnnnnnnncctnnnnnncannnnnnccnnnnnnnnnctgatcannntcnnnnnnnnctnnntnnnntttcc

SEQ ID NO: 1748 - DNA, 452 bp, Zea mays
cctccatatttcgccgtccacaaatagtcgaactgaatcccagatcactcagaaattgccaccaaaaagggaacagagtgagcgagacctcgccaaattgccaaccaagcctgctccccccgcctaggccagtatgataatagagaaaaagcaagcaggagggatgggcgagtgagatgcttcgttcacgttccagcgacggttaaagctggtggagctggtgccattggcgatgcccagatgcgagcatgtgcagcctggttgacgtcagacgagctaggcacgttggacgggcctaaagcgttcggcgaaatacctccccaagagtgcgctgtgtgccagaccggcatagcgtcttggtttcgttgcacattaatctaacctttgatgcaactagaagaagagattttattatccaagattgtgaaggtcagacatttgcttgtaccttc

SEQ ID NO: 1749 - DNA, 376 bp, Zea mays
cgccgcgtctgcgtgctcggcaacagcttccggcggtacgcgctccaggccgaggagaaccgctcgggccccgccgccaaggccccacatgtcctcgctgcagagcggttcgcgcgcgaggagcggttcggcgacccgagggatctggatgacgaagattggttcgcccacgcgttcaacgagacgagctggcatttcttcgagctgcgcgacgacgtcgacttgtccgccaccattgctgtaggagggagctaagttcattgatcagatgtaatatggtaactggatatcttcatgcgttgcttgattgaatgcaatggtgatcaagattctaagtttatcctatttatcggattctctgtgggatgcatactgt

SEQ ID NO: 1750 - DNA, 252 bp, Zea mays
gtagaccgctgcgctggacagcacagcagccattgtacagggagtacactagagtatgcacggatctcagcaggtgtcaaagaaccatgaagtcgccgcgcacggtccagaagagtgccacgagtaaacaccgcacgaacacgtgttggcaaagcatgcgtacgtgtcctctccagttctcccccaggaggccaaggacccagtaggacgtcgatctgttgtgtacggactggcgccgccacttagtcacca

SEQ ID NO: 1751 - DNA, 585 bp, Zea mays
  misc_feature (577)..(577): n is a, c, g, or t
ctccgatcgttcatccaattgttgatggttcgtttgtttgttcgtccgatcattcgatcgtccgttcgtccgttcgtccaaattaagttattattcatccgtcatgtagccacttccctgttttacttcctgtgactgagcaagcaaaatattttgggggagatggatacttgtcgttgaatgtcatggcactatgtgacttcgatatgaggttcacgtttgtcgttactggctagccaggtttggtacacgatacccgtgtactacttgacactttgatgacctatgataataagtttccacacctaccgaaagacaattacttaaatagaacaatttaagtgttctccctcataattactttataagagagtgacaaatttctatgttattgcaggcaagtattaccttatcaattctggttatcctaacagagaggggtacctcgcatcttagatggaacagaagtatcatatatcagaatggcaaaacggaagatatctcgtaggtgcaaaaggggtattcaactacgcacatttatcactaacaaatggtagagcgatcattcggtgtctanaagatgta

SEQ ID NO: 1752 - DNA, 343 bp, Zea mays
taggataagaattgagcttggctgtccatccacagtcgaggaggaagcggaagccatcgacgacgaataggtagcaccgggggtcctccccgtacaccccactgagaggcgtcacctacactgacgtccccatctgatctggaaaatactgcaaacttctaacaatttgacttgtagtcttttatatcttgtagataaactaatacacttttatatatttgttactgatgatagcttagtatcataaggcagcaacatcatgggtacccgggaaactcatgggcttgacaacatcgatccaacgttgctgaggtacaagaacacatgtatcattatcttcaat

SEQ ID NO: 1753 - DNA, 1129 bp, Zea mays
  misc_feature (17)..(17): n is a, c, g, or t
catcagaaggcacaatnggtataaagacataatgaaggtaaaccagctatttcttggaaacccatgtttccccccttgttacatatctggtcaactgtaattaaactagtatatatggttgaaggcgcactgagcttttaaatggggctgcccattgttacccaccaatgcataagctgaataattataaaattaaagcttcttgtgaaggtgaatgaatggatactaaatgacataatacgatttttaactgagtctcttgtactatcagttctgttcacatattttatcttccttgttgaatggactttccatgatgtaaatagttcttcatcaaatgttaatgggtgtatattataatgtaagtgaagtataaaattatctctttttttgttgttgtatttcagagaatcgtctttatgtatttatcttttgtgctcaagtgttgatcctatcgatatgtaatttaattgacaacactggatagtctattctgctttgttaaatcattttattactgatgtgagccctagctttcttcattccgtaagccatttgttaaaaccgtttttacttgttgttcacataaacttgaagatgcacttgaaaggtgactccaatcaaggggccattctgcaagatcaagataccagcttgttgttgattgcaatgcttcatcagtagatattgacaatgagattactataatccacaatttcatacgtgacaagttcaagctaaaggaccctctactagaatcctgtgttcactatccgattgattatgcccgtgttgtctggaagattggaaatgacatggacttaacacttgatttgaaagttatttaccttctgcagacatgatcacaatggcagaaacgacaactggtggggagcctctttctgaagataatttagtaaatactattgaagcatccgacagagctcttaaccttgatgccgacaaagaagatgatacttgaatttttgaagggcagaatgggatacgttgcacgaaaccttgccgccattgttggcagtgctgttgcctcgaaaccgagtcgtgctgccgtgttggtggtttgggagcactggccaaaatgcccgcttgtaatgtgctgcactgctgc

SEQ ID NO: 1754 - DNA, 499 bp, Zea mays
  misc_feature (444)..(496): n is a, c, g, or t
taattctccaggtatgtgtatagtataatcaagtactgcactttcatcaaatcaaattatctggctggtacgttttcagtcaccatgtttgctgcagtagattcttagttatcaataatttatctctttgcatctcccgcttcttcctccttcggcctaggcgcaatggttctttcttactcgtgggctgcggttttgtgttcaaaggcgtgatctttacgcttggaatggttttattacacaagatagggttctagaagaggtgccaatttctcgttgccagttgactttcatttttcttgtcgcgcattggttgccatttggaaagggcgttttatttgtttactgtcggtggtgtgttaattttctatgtcatgttactcacaccagggaaacaaaggatgtgatcaagtctataaataagtctacagggaacaagagcannnnnnnnnnnnnnnnnnnnnnnnnnnnnnnnnnnnnnnnnnnnnnnnnnnnnccc

SEQ ID NO: 1755 - DNA, 405 bp, Zea mays
aagcactgattaacgaattgggaggatattagatctccctcgtgtacagggggcgcagaggctgatacccttttgagagggtccccgagcgtgctccgttggagcggcctggggtatacggctccctccatttggtcagggggagcggacgagggggttccgttggaaccagcctcagttcaattatgcaactgttagatttttaatgttagcttactcgtattatggaaattgaaaaaaaaaacatttattttgcacgtgacattctttattttgtccgatgttttgattgcaaaacaggaattcagtgacccccgtgatgctgatgatgcgcagtacaacctagatggcagggaagtcgatggaagccgtattattgttgaatttgctaaaggagttcctcga

SEQ ID NO: 1756 - DNA, 307 bp, Zea mays
tggcgagtacatcgtcttctgtcccacatcatagtcggagtctactttccccttactcgagttttaggtcctatttggcacaacttattttcaacttcttcatatatttaagcagaagctatactaaatagggagcttctacaacaatttatcaattcaactgaatttttgaataaaccaaaaatagataataaacagaagctgcttttcaccggtttataagataaattgttttttcaacaagcaccgactataccaaacagaactttatatcgaaggttaggcttcttacacttaatgctatcct

SEQ ID NO: 1757 - DNA, 851 bp, Zea mays
  misc_feature (77)..(77): n is a, c, g, or t
  misc_feature (749)..(765): n is a, c, g, or t
  misc_feature (780)..(787): n is a, c, g, or t
  misc_feature (791)..(791): n is a, c, g, or t
  misc_feature (793)..(795): n is a, c, g, or t
  misc_feature (797)..(797): n is a, c, g, or t
  misc_feature (804)..(804): n is a, c, g, or t
  misc_feature (806)..(809): n is a, c, g, or t
  misc_feature (814)..(838): n is a, c, g, or t
tgttttccttgacattaaaacaagcgcgcaattgttgtgctctgactatttggtgatacttgtgaaggtaagcatgnctcagaaaatggcaactgttgagcgagtagaagagcttctcgagaagctgcgtgctgcttcctgggatcatgctgtcaaaggtacaaccaaccaaattcctattgttcttcctataggtttcttcttttgcacagtgacaggattttttgctttcttgcatttcttctgcatcgcttgcattatgtactttttttatcaagttgttctccttgataccattatcagatcaaatatatcaagtttgtattcaggattccagagatatggctattattctttcacaacctgaattttgtattacttattttgtacttgctattgagcccatgcaccaaactttaggttttctttaacctctgaaataccctaacgtgaatatttcttttcagcaatcattgtctcttttgtagggaaagtaggctgaacttcttgcttttctccacacatataataacagctgatttgtgtattcagatatggaagatctgaaagtctttgcgaaagattctggttctcctgaagctaatgatttgactcactgggaccttaccttctggagtgaacgactgagagagtctaaatatgatatcaatgaggtttgctttttttattttgcttcatttaagtatctcaatagttttagctgcaagctgctaagtttcttttactgnnnnnnnnnnnnnnnnncttttctttattgannnnnnnntgcntnnnantttgccntnnnncttcnnnnnnnnnnnnnnnnnnnnnnnnngatactcatacac

SEQ ID NO: 1758 - DNA, 366 bp, Zea mays
tcgtggtcaccacggccaccatgcaccagcaccggcgccaagccatcacggtcatcacggccatcatcacgcaccagcatcggcgccaggtcctcatggccaccacggtcaccaccacgcaccaggtcctcacggtcaccgtgccccagcaccggtacataacgaccaccaatcggctcaggctccgaaactgcatcatcatcaccgtcacgctgcagcgcccgcccctgttcagagctcctactagtctagatggcagatggtcaaaacatgcgcatgtgtggcaataataagaagacgatatttacgttttggttgtatttttgtactcttggctatgcctctgcgttgttcatggtaatctct

SEQ ID NO: 1759 - DNA, 500 bp, Zea mays
attgggcgatgcctagacgcgagcgtgtgcaacccggttgacgtcagacgagccaagcacgctggatgggcctaaggcgttcggcgaaatgcctcccgaagagcgcactgtgtgccagaccggcatagcttcttcgtttcgttgcacattaatctgatctttgatgcaattaggagagattttattatccaagattctgaaggtcagacatttgcttgtacctttccagtatgaatggatattctcgaagatggaaaatattctcgaagatagaaagtatgagttaatattcatcgacacatatacatacatacgtttacatgaatctgattttattagattctctaagcaagaggattatgattctattttgttcttagccctagaaagtttgtgatttttattaatattgtggaccttacagcctttgcacatggtcagtctcttgtgtatgccctgttggttttaattcagtattgacagatacttggattgctgct

SEQ ID NO: 1760 - DNA, 459 bp, Zea mays
gcagcttaactgcatacagctagcccgacgtacaggcgtggtttcagttctgacgcttcttcgattcctgttctccaccgtctccagggccgttgcccaaggtggagtgcgcgcgggtcttcggcgtccgcggctgcagcatctgcctcaacgttttcgacagcagcgccgccgtcagataccaccgtgcggcctgccagtactctcgtgctgctccggtatgatgcgtggtcacgcctgatcacttgagagctcgatcggatgcattggcttccatcgccttttgcctactagctagctagattctgatattgtttcccactccaccatcgtggtcccagatgcccaggggcggtggcatgactggccgcgcggtcgccttggcttgcaagatggtagggggagggagcgacggctccatggacctttgtgcgagggtgtgcctcgttggagaagatg

SEQ ID NO: 1761 - DNA, 300 bp, Zea mays
tatcgttcgctaaaatttctcgtccagcaaacctgggggactggtaagcgatcgcaatacactgtttcactcggcgcgcgtccttctgttcactcccgcgcaaccgaaggtagaagaagacgtggagtcgccgagccgacgcagcttcgccaccaactccgcgacgttcgacgctggccaccgccgtgcgcagggcagcgaccttcctcctgcgctccttctccgacgaacgtactcctccggcgaacgtactcctgcgctctctctctccgacgagccatgccgctcggcaaccgatat

SEQ ID NO: 1762 - DNA, 525 bp, Zea mays
tccttcctcctgagattcgagtcagggaaattagtgcagcacgtcctgaattccatgctcgctcatccacaaagagcaaagtctatcgctacaagatctataatgaagcaatcatggatccctttcataatcactatgcttatcatagtgcttataaacttaatccccatgccatgcaggaggctgcaaattattttgttggaatccatgacttcacgtcttttgctaatgctgcacataatgacggtgagcgcaggcccacaaagaagataacacgttttgatgttactgaaatggtaattgatttccaaaccaaaatgtttttattacttcttttttcacactgggtgtgctgttcagtattggttttatacttttatctttacacattggccagcttccatttggtgttcgttgaggttgacatggtatttcttttttgttcgtatactctacagggtgctgtcttacagctcgaggttgaaggcaccggttttctgtacagacaagtgaggaacatggtta

SEQ ID NO: 1763 - DNA, 533 bp, Zea mays
ccttgctcgccaggacgaagacgtccttgcggctgtcctccccgaacgagaagacgtacccgagcagcgggtccgtgctcccggcgacggactcgcagccgatcggggaggccttggagcagctcaccggcttcacggccgacgtgtagttcccgctcccctctggggcctccgtgcccgtccacatcagcgatgagtacaggtcggtgtagaggtacctggcagagaatatatatggggaaaaaaatttaagaaatatatgtatgcaggtgctttgctgggcactagctgcagatgtaccttccgtacaagcaggggtcagcggaacctcggtacacatatccgcctgtgatcgatgctgacccgatttccttgttcacagcagaatggtcgtagcccatgacggggaagattgcgtttatggactcgggcgaagtgttccctccaggcgatttttgcgggtgaaagatgtatggcccctcgtatacacgccatccgtagtttccacccttggtgactaaatctacctcttc

SEQ ID NO: 1764 - DNA, 538 bp, Zea mays
gcagcatggttgttgattgaaatggtcaacgatagtaatacgaaggagaaattgaggaaacttcctgtgttgtctctgggaaggatggctaaatcttcttccctcccagattcaagaaccatatgcaacgaacagggatcagttgaaaacgcaacagagacactcgaattattcaaagtgcagttgaagaggcagaagaatggtggcactgaaggatcattcagtacgagcaccccaaagaaacatgacaggtggtccatagcaaaatcatggactccctgtccaataggaacagcaccctgttcatttagttcatgtgctgttcttcctgcctttgacagcatcggtcatgaacaaaattctacattagaacatgggacctttgaggaggtgatcattctggaaacagctcatctccattcaactcgtgtattgggaacttttggatatcatgcacctgagtaattgtttaatactcttattcatgataattatcttctgccacattcattttcatttttttacacttgactgcaac

SEQ ID NO: 1765 - DNA, 830 bp, Zea mays
  misc_feature (783)..(790): n is a, c, g, or t
  misc_feature (796)..(800): n is a, c, g, or t
  misc_feature (814)..(822): n is a, c, g, or t
gggcagcgagatcaagcggctcaagctatcaggtgtggaggtctgtctggcttggtggctttggagttcaaaaatcgaagcatggtctagtaacttgttgaagggagtatggcttctaacccccctcaccaatttataatttttgcagatcacaaatacggtgtccacccctgaaattgctttctcgggggatacaacagcagatttcattcttgatccggataatgcagatgtgctgcaggcaaaaattcttgttgtcgaggtattttgtcatcacttgtcgctttacagctaagttctcagtttgcaacatgtcaccaattgtgtggcattaacaagcaagtcaacatacttagaaacacattctattccactgctgaatgttttatcttctgtagcctttcccctttaacctagtgaatgtgctgtgtcaatttcagagtacctttctagacgactcaatttcagttgagcatgcaagagaatatgggcacacacatttatttgaggtatctgatttaagtttttatttgaggtatcccaaacttgtttattcaactttcaaaatgtcaaattgtatgtacctacccttggaaacacagataacaagtcagaccgacaagcttcaaaacaaagctattctactgatccacttttctgctcgttatactacagaggtgggctgatacctaaccattttttcagttctatccattgaaatgctatggctgcctgcattttttggttttcgattatttaattccattttgactacttctatgnnnnnnnnctatcnnnnntccattcatacttnnnnnnnnncacttcca

SEQ ID NO: 1766 - DNA, 302 bp, Zea mays
ggggagtccctgatgaagccgcagactatagcttcatgttccctctctggtcccgggtgtccatctactggcacaaacggtggcgtctccctgaggagtggagggattcttgaaaaatctgaagttcttttagaataattcaagatgtggtacattgatagataccaaagtatcgacatacgacacgtcggtctacactgtataggtcagatgtagatgcagggtttgtaaatgtgcagtttttggagtttgcactgaaatcagataaaactttgtggccttttgggcgaggtgttgtggag

SEQ ID NO: 1767 - DNA, 358 bp, Zea mays
acggcgtcgccgagttggtggccgccattgtgtccccgacgacgacgaacactgtctgccgccgccctcttcacctccatcggattgtcatctccaccggcctcctcgcgctggtcctccgatcctctgatgtctcctcgcgcggtcgcgcccgtcctccaatgcccgactccgtcgtcctcgccactgacccatccacaggtaaagcctttatcccaatattaattcgtatcctgcaccaaggagttgctgtgcgcttgattcgccgcatctgagtgtcacggccacgactgcgcgccctccaatcctccatcgcctcccgtcgccgccgcacagttgcgataggcatcgaccctgc

SEQ ID NO: 1768 - DNA, 375 bp, Zea mays
gtcggcgtcgacggcatggaccggaacctgagtgggttcctgatcgggtgcgtgggcaccgccgtgacgctgctggcgtaccagcagacggcggtgaccagcacgcagtgcgtcgccgcgggcttcgtcgtcatcctcttcgccctcttcgtcaaggaaggtttcctttccctctgaatctctgatgcgccccagccatgcgtgactcgggagtcaggaggcatcatcgctcttcgtcttcgtctccgctgcttgtacttctacttgctagttcagtcccgcagctgccgctgtgctcctcaggttcttggaaaaacactgtgatgttaacatttatgtagtgcttggttgagccatgtgacatgaataattgtt

SEQ ID NO: 1769 - DNA, 752 bp, Zea mays
tgggagtcagaagcgtcatccttccacgacgacaggagggtggctacgccgatggctctcaagcgcatgcaagccttgcaggacaagtgagtagatggccgaaatgcatctaacagaatgaaaattgctggatgcctgcttctttttaaattctacggtgtgatactggatcaagaaatcaacatcatatccacctgactgtgctttcccttgttgtagaattgaacaaggtatccataacactgaacgagtaagggacagtgcaggcggaaggtacaaggatcttaagataccatgggaatggatgctcgactctggagtcataagccaagtacgcattcctaaactcctttcgctcacaataaaggagatgcattttagcatttcacaaagtatggagtccaaatacaaatagtagaaacaaaacatgacacatggtgcatgcccatcctacactaaacagctgaagatggcttccttgaagcttgcaaaagagtacatgaaccgcatcgcgaacactctgaagtcagatccatttgcgaacgacgaggggctacttctgcaaggcgtccgctttgccttccgcgtacaccaggtaacctgctccgaaccacggattattacttggcaacgacacatttgcatagactgattaactgactgcaccgtccgagacaaaaacttgcagcttgctggtggctttgacgaaggatgcagaaaggcgtttcaagagctaaaaacttacgcaagca

SEQ ID NO: 1770 - DNA, 399 bp, Zea mays
tttcgctcggggttccgtcgaggaggcttacagtggcgcccttctcggtggcccttactcgcgacggtggcggcagccttgatgcgtacggaggccgcggcacggtggccaggccgcagcacggccgtgcgggcgtggcgcaaggagagaaaggtggcagctctcgtacgcggggcagatggctggtgtgcgaggccagacgtgatcaacttcatcaatctgagagcaaacgctctctcttgtgaagaactcgatctagatctgtcctaggcttctggaacatagtggctgtctaaaccctagaaacgactaattgattattagttagttgggtttaggtgtggagggattaactttaatcttgaaaccagctgtaaaattaaccaggacagaccttcg

SEQ ID NO: 1771 - DNA, 1270 bp, Zea mays
  misc_feature (603)..(609): n is a, c, g, or t
  misc_feature (613)..(615): n is a, c, g, or t
  misc_feature (617)..(632): n is a, c, g, or t
  misc_feature (634)..(637): n is a, c, g, or t
  misc_feature (640)..(656): n is a, c, g, or t
  misc_feature (658)..(658): n is a, c, g, or t
  misc_feature (660)..(668): n is a, c, g, or t
  misc_feature (671)..(671): n is a, c, g, or t
  misc_feature (673)..(673): n is a, c, g, or t
  misc_feature (686)..(686): n is a, c, g, or t
  misc_feature (690)..(695): n is a, c, g, or t
  misc_feature (699)..(703): n is a, c, g, or t
  misc_feature (705)..(719): n is a, c, g, or t
  misc_feature (722)..(722): n is a, c, g, or t
  misc_feature (727)..(728): n is a, c, g, or t
  misc_feature (730)..(737): n is a, c, g, or t
  misc_feature (739)..(741): n is a, c, g, or t
  misc_feature (750)..(754): n is a, c, g, or t
  misc_feature (756)..(770): n is a, c, g, or t
  misc_feature (775)..(777): n is a, c, g, or t
  misc_feature (780)..(786): n is a, c, g, or t
  misc_feature (788)..(795): n is a, c, g, or t
  misc_feature (797)..(800): n is a, c, g, or t
  misc_feature (803)..(818): n is a, c, g, or t
  misc_feature (821)..(828): n is a, c, g, or t
  misc_feature (832)..(834): n is a, c, g, or t
  misc_feature (839)..(858): n is a, c, g, or t
  misc_feature (862)..(868): n is a, c, g, or t
  misc_feature (871)..(873): n is a, c, g, or t
  misc_feature (875)..(881): n is a, c, g, or t
  misc_feature (883)..(894): n is a, c, g, or t
  misc_feature (897)..(898): n is a, c, g, or t
  misc_feature (902)..(911): n is a, c, g, or t
  misc_feature (916)..(927): n is a, c, g, or t
  misc_feature (929)..(929): n is a, c, g, or t
  misc_feature (931)..(940): n is a, c, g, or t
  misc_feature (943)..(943): n is a, c, g, or t
  misc_feature (945)..(950): n is a, c, g, or t
  misc_feature (959)..(972): n is a, c, g, or t
  misc_feature (976)..(986): n is a, c, g, or t
  misc_feature (992)..(1000): n is a, c, g, or t
  misc_feature (1002)..(1006): n is a, c, g, or t
  misc_feature (1008)..(1012): n is a, c, g, or t
  misc_feature (1015)..(1020): n is a, c, g, or t
  misc_feature (1025)..(1027): n is a, c, g, or t
  misc_feature (1030)..(1035): n is a, c, g, or t
  misc_feature (1037)..(1041): n is a, c, g, or t
  misc_feature (1044)..(1046): n is a, c, g, or t
  misc_feature (1051)..(1059): n is a, c, g, or t
  misc_feature (1061)..(1076): n is a, c, g, or t
  misc_feature (1078)..(1083): n is a, c, g, or t
  misc_feature (1085)..(1098): n is a, c, g, or t
  misc_feature (1106)..(1109): n is a, c, g, or t
  misc_feature (1111)..(1113): n is a, c, g, or t
  misc_feature (1115)..(1124): n is a, c, g, or t
  misc_feature (1126)..(1126): n is a, c, g, or t
  misc_feature (1131)..(1148): n is a, c, g, or t
  misc_feature (1150)..(1152): n is a, c, g, or t
  misc_feature (1157)..(1160): n is a, c, g, or t
  misc_feature (1163)..(1168): n is a, c, g, or t
  misc_feature (1175)..(1175): n is a, c, g, or t
  misc_feature (1179)..(1188): n is a, c, g, or t
  misc_feature (1194)..(1195): n is a, c, g, or t
  misc_feature (1197)..(1203): n is a, c, g, or t
  misc_feature (1206)..(1209): n is a, c, g, or t
  misc_feature (1211)..(1215): n is a, c, g, or t
  misc_feature (1218)..(1224): n is a, c, g, or t
  misc_feature (1232)..(1232): n is a, c, g, or t
  misc_feature (1234)..(1236): n is a, c, g, or t
  misc_feature (1238)..(1238): n is a, c, g, or t
  misc_feature (1241)..(1265): n is a, c, g, or t
gccattcatgctattgaggttagtattacaaaacacatgcaactcctatgcagtttgatcatcgggaccaatttgtccacataggattataacctacttacacaaaacttaagaaacacatgtttcttgtcggatttatttattttttataatctgtcgcatgtaggcatctatgcctgaggcagcttttactggttcttggatgaagtctgctcacaagctgtgggttaagcggctgcgacgaacgtcatcattgccagagcttttgcaggtcagtaaaagattttcaggtctttatttttgttttttaatacctgaaccttctattccagtaatgtttttagaaccttctattccagtaatatttttagtttctactgccttttcttttaccatgcttatgttcccctgcaggttcttgtcgattttgtaggggcaatggatgttgattggttgtacaaaagttcatctgcgagattgagaacaaatctggatgacatcattgtcgactttcagacaatgccacaaacaacatcagcagttgcacttacaaaatcgacaagaacctgcaggggaacataagcatggtaaaagaaaaggcannnnnnncaannnannnnnnnnnnnnnnnnannnnaannnnnnnnnnnnnnnnncnannnnnnnnnaanancacaaaacaacanaaannnnnncacnnnnncnnnnnnnnnnnnnnncanaaccnncnnnnnnnncnnnacccccacnnnnncnnnnnnnnnnnnnnnacaannnacnnnnnnncnnnnnnnncnnnnaannnnnnnnnnnnnnnnaannnnnnnnacannnaaaannnnnnnnnnnnnnnnnnnncccnnnnnnncannnannnnnnnannnnnnnnnnnnacnncacnnnnnnnnnnacaannnnnnnnnnnnancnnnnnnnnnnccncnnnnnncccaccacnnnnnnnnnnnnnnaaannnnnnnnnnnccccannnnnnnnncnnnnncnnnnnccnnnnnnaccannnacnnnnnncnnnnnacnnnacaannnnnnnnnannnnnnnnnnnnnnnncnnnnnnannnnnnnnnnnnnnacacacannnnannncnnnnnnnnnncncaacnnnnnnnnnnnnnnnnnncnnncaaannnnacnnnnnnaaacacncacnnnnnnnnnnacccannannnnnnnacnnnncnnnnnaannnnnnncccccacnannnanaannnnnnnnnnnnnnnnnnnnnnnnnaaaac

SEQ ID NO: 1772 - DNA, 381 bp, Zea mays
ttcgtccatggaagttgtagactatctaattgcaaagaagaaagattctgaccttgaaaaggacttgaagaaagaggagaggtgcaataaagcctttgctctacaagaagaaaggatcaaattggacaaagaaaagtttgcgttccaaagacagctcgaagaggacagaataattggtttggaccttagcaccatgaactataaacaacagcagtattatgaagatcgtcagaacgagattcttgcaagacgtttcaatatctagaattttctagttttagttaagtatgctttgtcaacaaacttgttttagttcaacatttcatctaagtaccatcttgttcaagtttcagtttgtaatggtttaaaggtcatgaatca

SEQ ID NO: 1773 - DNA, 385 bp, Zea mays
ctctccgagtccgacggccggccccggaccctggtgctggccacgttctcgccggcgcacttcgacggcagcccgatcgacagccccacggcctgcaccaggatggagccgtacagggaaggcgagaaggaggtggcgtggatctgcaaggaggtcagggacatcgtgtacgacgaggcggaggccgccagggcgaggggcgccagcgcgacaagggtcgaggtgctcgacgtcacgaagctggccaccatgcgcccagacgggcaccccggcgtgtacatgaaccgcgaccccttcaagcacggcgtgccggataagatctactccgactgcctccatttctgcctgcccgggcctgtcgacaccttcaacgagatattactga

SEQ ID NO: 1774 - DNA, 353 bp, Zea mays
tcaccagccatgtagttgctgggttttcctgcttgcatgctgcaacagcttcacattattgaagaaaccgatgaggcttctgtggaattatgagctgagatgaacctggcaagcattggaatctggtttcagaatgctctaattttgaagattaacttgtgttccattttaagcgtgtagtaagatgcaaggaagccctttacttctgttcataggttgcaatcagttttgtgtgctccaaaggtaatatttgattgccacagttgcagggattcaataaatccacgagttagaaatgaccatttgatgatgaataagaatgaatgtctgccttgtgctattggatatggata

SEQ ID NO: 1775 - DNA, 366 bp, Zea mays
ctcctgtccgtctgggggcaaggaaagcccgctggcgcgaggcttcaacagcgtgttgtggccgtcggcaagcagcaaaatcaatggcttcgtggcgatgaaacttgaaatggaataatggaggcacaaatttgtggaggtccaacggcgacggactcaaccttcctctactcttaggctctaggcgataggcaaggtgtgttggacagtgtcgtccaccaatggtagacattgctaatgttgatttcgattccatgtcagaagtaccttactcatctagtgaagacccatacattgagtaggatcaatctgcgagtggcaacccatttgttaatggtatgtgaatcaaatgcttatgaatggaat

SEQ ID NO: 1776 - DNA, 660 bp, Zea mays
gccctgagataattcaggtttgcatgacttcatctctactcaggatttctgtttcatttgtaactggttcctgaatgtatgctctttatgtcagggaattgcaattgctgttaaagctggattgacgaagcaagattttgatgccaccattggcattcaccccacatccgctgaggaattcgtcacaatgaggagcccgactagaaaaattcgaaaaagttctacagatcaggtccacaatgccatttggaaatgaaatctttccttggtttactggcatatttactaggaaatataagttctgagaataatttgctttaaagtagaattattgtttgtgcttgtcttttatatgtttgatcacatcattacacctccccccttccaatttcaggtagaatctaaagatgaggttgtaagtaagcagtagatagcattttttcctaggaggtaagcaatttcttcttggcgtgcacatttatgtttaggcagtgctacattgtcctaaaacttgtttctattaaaacaatttatcacatggattgatgaattttatttaactgatggggctattgctatgaactctttgatcttttacactactaatttgagtagcaaaacccacttaaaagccatcctgaatgacacccaactataggg

SEQ ID NO: 1777 - DNA, 460 bp, Zea mays
cgtctatctgacatatgcatgtgtccattgccattcttcatgtttgttgaccttttaggtgtgggaccaaagccttcagcggaacccatgtctatacagcggtacaaagtttcgggtatgtatttttagctctaccttggtatgctcgtttttttctgctccgttgatacttgaagtcttgaagatgctacaatttactggtaaacacgtatttaactaaagaaaactggaagcttcttgcatgttaagtgatttggtgcatgctttatagaaagacaatctctctgtatatgtatctgttctactgcattcaccagcaggtagtagagtgtaaatactgacaacaatcaagaatttcagtatggaggaaatgccttgcactacaaagatgactcagatcatgatcttgagtactgtgtctcacttcatttgggtctcacagactacaggacatttgtgg

SEQ ID NO: 1778 - DNA, 448 bp, Zea mays
tccttgctcgcctctgctcgcgctcagaactcccatggccggcgcttggcctcagctcgccacgcccctcagctcgcctgcgtgtttctctactcgccgacgcaaccttcctgctgccgcgctcggtcttcgtctctgtcgcgccgatctgcgctcgtccgaggccgtcgaacccgctcagctccttactcgccacggccctagtcatcgcatcgctgtgcgcagcggtggcgtggtgggtattgatcgcgagcatggtcgggcgacgcgagatctgggcacgccgtcatttcattatgacgagcgtcgtgccttttgtgccagtcgtcgatttcctattcaccacaacgccgtcgtcccctgccgtttcccggatgtcgtgctcgttgtggccggctctggtggtcggcatcgtcgaccgtcaattctgtcaatagccacgttcata

SEQ ID NO: 1779 - DNA, 365 bp, Zea mays
ggcggcggcatggaccggaacctgagcgggtttctgatcgggtgcctgggcgccgccgtgacgctgctggcgtaccagcagacggtggtgaccagcacgcagagcgtcgcggcgggcttcgtcgtcatcctcttcgccctcttcgtcaaggaaggattcatttccctctgaatctctggtgcgcgtcagccagccatgcatgaggaggcgtcatcgctccgctgcctgtatttctgctcgctagttcagtcccgcagctgccgctgtgctcgtcaggttcttggaaaaatactgtaatagcgtagtgacttttatgtacgacacggatggttgttgctggctgaagggtctactctgtcgaaata

SEQ ID NO: 1780 - DNA, 755 bp, Zea mays
ggtaaacacatttatattaattggctcgctctattatagcatcttaaatgcgtgcatatatgttttaaagagtggtacgaaccaacaacttatccagaattccagatgacttgcggacttgaagccctaacccagtagggccataccgctccattcaattcctaatatgtgagacatggatttgcgctatgacatacttagggactaaaatggaataaaatggagggactaaaaattagtccctagaaaccaaacatccctttgggcatgagtttttttgggtgaaggacagctatgtttttttatgacactagaaaatggctcttggacataaagaatattcataaataaatgtattgacttgatatgatttcgtattttaatcagtcagcattcttgcttgcttaattctctagtaagaagcatgattaatacaccgtttcattctagactatcttttagagttcagttattagcgtctgtatgttctttgaacgaaaattatgtctatatgtttggcagatcataaaaaaactgagtgagttagatgagctgtcccggacaatctttttggtgtgtgaagaggaggcagaacttgcattggttgcagcaaaaagtggcatcaaaacattcagcagtgactggttcatgagctgtgtcatgaaacaggaacttgaccttgaggcccctcagtttattgtatctctatgatgtacctacagttcaagtcctcctaactcctaattatctcttcc

SEQ ID NO: 1781 - DNA, 375 bp, Zea mays
  misc_feature (8)..(8): n is a, c, g, or t
tctctcancgagcagcaagcgcagggagcagcagctttcccagcgccccctctctcccatggctgagcagcagctctgctcgccccctcccatggcgcctccacctccctgcgtgctctctcctcgctccttggcgcagcagcaaattaccatggtgcctccctctgctgtccacgaagagcagcccagcagccaagcgccccactgttgaagctccctggatggcgcccagaatttcagcagagagcttcttctccatggccagccgcccctctgttgctgccgagctccagctctggccagcagccacggcgccgaggattacctgcaggcgagcagctcggcccttcttccctgcgcccagctattctccct

SEQ ID NO: 1782 - DNA, 327 bp, Zea mays
ctgacgcctcacacttcgccgcccactgccccctccaccccggtcgtctacgcccatctaccgcccttagccccattcgtcgctacccgctccctcccaactccctccgaggctgatctgtgtccccgccaacaaacttgtgttgcatcccgtcgtcgaccctgctcgccgtcatcgtatttttgtctgatactgaattagctgtgatttggttcttttacttgttttcctttgtcgaatcaggaaaagagggaggaatacttgtgaatgcaacccttctatctacattagatggtgccgtgaattagcaatgattgcaatctatct

SEQ ID NO: 1783 - DNA, 369 bp, Zea mays
agggagcggatctggtgatccgtggtaacgtaattctcaacacttttcacactcctcgatgtgtgtttgctgccaatcatccaccctctgtctcgcgcggtacgcccttgcatcaatggacgagcctcgagccctcgaccgacgagttgaaccaggcggtccaggcggaggcgggcgaccagccctctccgcgcggacgtctccggtcggggacgaccatctctggaccggatccgacgccgcatcgtcctccgccgatgcgggcagggcccagaatgtgtggtcgtcgtgattccagttaataatgtatcgccatgtatgttttaagtttattatcaatgccacgttggtgtatgagtctatatcgac

SEQ ID NO: 1784 - DNA, 442 bp, Zea mays
aatgttgagcaagatcattttaatcatttgcacatttggtatgtagaaaatgaagtgggcgtatattcctaaagaagccaagttactctatggacaagcaaaagatgattgtcgcagctaccacgtgcctgcataactaatacatccatgagaacgatcaagaagactatgaacacaaggttgatatgtgcacttgttgtttgggttgtgatgagttattgtcaacaagtagtggcttgggttcagtcgcgtggactaatcggggcatgagtgtgtgttatgcaaccatgtttcttcgctagcttgtggtgtgcaggtgtgcagttaggagacgatagtcgatagcgaaggtgaaggtcatgcgagttcgtgtcgatggaccgagagcggtgaaggacgagtgccgagtcatgactgagggactagagaagctgggtgacta

SEQ ID NO: 1785 - DNA, 329 bp, Zea mays
ggcggcggcagcggcagtgacggcggatcgtcggcggcgccggcgccggcgtgatgatcgatctctgcactgcagccttttgattgcattggtctgcatgcgtgatctgtttgagcttgttttgatcgcgttcctttttcttgaggtatatcgattggttgtgtacttgtgtgtgttgattcttgtcgtggattccagttgttgatttctcctttttcggtctctttccgagtttgtttctatatttgaattaacgggttttcaaattatggaaaaaggaccatatgtgaaacacaactgtaaacagagaagatgatctgtaaggctat

SEQ ID NO: 1786 - DNA, 419 bp, Zea mays
tgcacgagcaaggttttgttctggacattggcagctgcaatgagatgctagagggactctgcagttcaggagaggttcgcaaggcgaacaacctgctgacggcaatgatggacaaaggacttcttcctgataaggatacatacttgagccttattaatggatatggtaaggttggtgattcccaatgtattgtcaacatctaccatgagatggaacacagaaggcttgatcccggtgttgaggtttttaccgccttgatcaagggtctttgccggtgtggaaatctgaaggaagctgagaagctctttgcggcgatgaagaagaaaacgttggcttcgactagtgacttgtatgatatgcttatcagctgttactgtgagaagcgcaatgctaaaagggcacttcggttgtatgataag

SEQ ID NO: 1787 - DNA, 353 bp, Zea mays
aagctatttattcttatttcagtgaagggcctcataatcattccacgttttgacactggagtatgtccattttttctactattgttgaagtcttaggtacatttgcggtcaattgtccttcctaattttagtgacattacattctctttgaaacaatatcctgaaaatttgatttcatatttcatacgtgaggtgttttaactattgtagcattgatttcccccagtgcacctgataggctatcatcattggccttagagatatcttcaattagatgtgaagaagggcatgaccaaaacagcaacaaagataactgttggggaccttcggcttccgaagctcttcaaaaacat

SEQ ID NO: 1788 - DNA, 461 bp, Zea mays
  misc_feature (447)..(452): n is a, c, g, or t
agagccagaggcaaaggaaaagaaaaaaatgagtgggcggaagagttgaagtttgatccagtacactgcaaatgtggtattgaagctaagtatgaattagttccttccgaccttggtgttagctatttttgtggacatatggtagattacgatgaggttggtatttattttttgtttgcatcagctgcaatgttgcacccgtacttactctattttttgtaggagacgaggaaatgtggttaagagagttacgacgacaaaggagaggtgatgcgtacaataaagtccaagagactaatgggacagaagatgcgttgtggatctcagctcgtcgattcttacattaacgatcgcatacaggacatgcttaggttcgcaaaatcaatgagttttggcagcccgatgcgtgcagagcagaggagattgaaggcggcaaatgagaagagnnnnnnggatgtaag

SEQ ID NO: 1789 - DNA, 360 bp, Zea mays
tttttcttaaacttccatccgttgcccattttaaattttggttacaacagtgagtcttcaaataatacacagtttttttatacaagaattggcaacaaaagttttaaaaatctacaaactttcttaaaattaaaaatcgaaaacaggtgtaccagcgttatcggccgacgctgattagcgattattatgtatccggtcgataagctggaatggataagccgttcggtttcgtgaccctttgccttgcctgacagcaagctgcgactgcgagggaggcaagcggagacggggccgccctgggtagtcgctcgtcgggatgggattgtaggcgcacgccggatcagactggagagaaattgg

SEQ ID NO: 1790 - DNA, 852 bp, Zea mays
tggtaccagagttcattgtatttgcctaagaaagagatacttgcttctccctcccattcttcttcttctcctctttgtaattgcagctctgaaccgtgtcctgcaaaactttgtgcatttaatcatgctcttcaaaagtgcattaacttgctatttgattctatgtttacatgaaatttacatgtatctaatcgagtctcatctaaaacaatgagtggtttcaatttattttagcctcgttgcttttttcaccttccagactgaagttggggtcacattgactccgccaactggtaaggagagagctgaaggatggacagggcttcaaggggttcgcgagttgaagataaaatatgaggaacgtgacaggtaatgtttgcaagtaatggtgatgccatagctttactcatcattcgtttatatggtaaaaaaactgcatggttcttcttttactgtgaagatgggcagtatcttgtccggataacaagtgaaatgggagtaattgcatttttgtataatactaatttaaggtgctgattcgatgattaatgggtttaaggacttggtctgtaacaatgtcatgcaggcctgcctgtgacatcgcgatctctgggcttgggtggatttctgtggagccatcaggtgtgccttcaaacagcgctgaggaagtttatgatggcggtgagctgcatctggtggtacatgtgcccaaaccggttgaggtcttcatgcgtcctccattacctgtcggcaaagcagcgtcgcaatggtaccggtatcaagagctgacagaggaagaagaggagctgaggcctaaatggcattactgatgctgctctgtttctctagggc

SEQ ID NO: 1791 - DNA, 374 bp, Zea mays
gaagctgctgagaaaattctccagacttacaatggcacacagatgcctggaactgaacacacattcagattgaattgggcctctttcagctctggtgagaggcgccctgatccaggatctgatcattcgattttcgtaggggacctggcacctgatgtcacagattacttactacaggaaacattccgagtgaactattcatctgttagaggtgctaaggttgtcacggatccaaataccgggagatctaaaggatatggatttgtaaagttcgcagatgaaaatgaaaagaaccgtgcaatgacagaaatgaatggtgtgtactgttcaacgagacctatgcggataagtgctgcaatacctaagaaatccac

SEQ ID NO: 1792 - DNA, 263 bp, Zea mays
tcctcctttaatttgctcatgccaagctcaactgcagctgttggcgggtgcacttgaaaacatgttcatattctttaatttttccacacgctgctgtcgagttgccattgccagtggaagccacgacgccgtgctgcctctttgtgcgtcaaccatcggcttctgtagcatatatagcttgatttgctatgttctcttctctgatgcagtagtatagtagtacatctggccaagctaggccaactgaatgactgaacctcgga

SEQ ID NO: 1793 - DNA, 371 bp, Zea mays
tgtctgcttctcctgagttgcggttgaaatctagaaccattcaaaatggcaatgatggcactgaagctcctcagatcaatctgttcccttcaaaacagtagagtttgtaacaggacaccctgaaagtcggatcaggtataaatgaggctatgcacccaggtgagcacaaagctcagaggtccatgtccctcccatggctatggaagtgcgtgcaacttggttttgcatatggatgatctggatcgattatgtttccagtgcttgacatgttgtaattttagccagaaagtaggtttgttcatgaaggacattcagttcaaatgtttgacctattgttaaggcaaggcattgttctctgcaacatgtggtgt

SEQ ID NO: 1794 - DNA, 372 bp, Zea mays
gagaagatggaggatttgacattgacagagagggcaataaaggggagtgccaatgttaagcatgctcctgctgacaatggtggtgtggaagaagaggaggtgaagaatttgagcaagggagaggaaactcaagtatatcaggaattgagggaaaaggtttcaccagggtcaaagcctgatggtgttggagaagtggaaaagaatgaaaaaagggaagctgttggtgccagtggagagagaggccatgttggggttggggagcccaaaggaagacacagattggagaatatgacactgggggagtggtttgttcagatcgagaaataccttctagcaaagaatgaagaagctgctgaaaaggcgatagctgaa

SEQ ID NO: 1795 - DNA, 413 bp, Zea mays
cgaggcaccatgaaatgatgtccatgatggatcacgagactgacgaggaagatgaagatgctgaaggtgatgagaatgtggaagaagatgatgcagaccacgcagttgacgatgccgatgttgagatggacgaaggtgatgatgaaattggtgatgacggagaggatggcggcgttggcggggagatgactccggatgaggatccagatgctacttcatattcatctgactacagcgaataagaaagcagaaataagtgaccttatcctagagatcctccctcagcgtccctttgtgaaccaaaaggaaaagctaaggagcgatagatgtgcatactgtttttttaggcaccgcaggttctaatagatttcctgacgtatgcctactcattcgatgagtggttgtatcttgct

SEQ ID NO: 1796 - DNA, 390 bp, Zea mays
cgctcgatgttatttgctttttataaataacatatgagctttcacatatttcaaaaaacatatattccattgtcttcttgtcttgaaatatgagtgatggaagagtatcaggtatgaagtttgctgcaaagctataatcagagaaggcgatggtacaattgaagtcgtccttgttgcaagaaacgccatcctagaggatttgaaggcagctaaataccaaaactaaatgtgatgcatgctgccacttgtgactaatatatgttttgcaggtagccaggtacgtcataataggaaaatgtattcatcagctgcaccacaaatttcataccaatgattagagagaagtgggataatggtcatcatctgccacctactggtttcagacttcca

SEQ ID NO: 1797 - DNA, 207 bp, Zea mays
ctgcaggacctcctcctgcgccagctccctaggggaccctagcagtttgcctgctggtggtcgttttggtcgggttgttgctatgtgtgcgtggcgtgttgtgttaatgtcagggggtctcgcctttgtattaggggttgacaagtcttgtctctcctatgtttttttcttcttaatataatgacacgcaactctcctgcatttgtt

SEQ ID NO: 1798 - DNA, 328 bp, Zea mays
tcctgatagcatcattactaatcctagttatttccaatctcatcgacttgggtaatgtggcccacgctgcggtctccatggtcaccatcttcatctactcctgctactttatcatggggtttgtccacatccccaacatcctatgcgcatagatctttctgactcgggttcacggcctctgcattgccatctatgccttgacattttgggctagagacatcgttgtcacctactaccatcgtatgatgctagatgctattggactagttgatgttttggcatatatgcagacgtatgcttggttgacttcatgtttgtctttctcaag

SEQ ID NO: 1799 - DNA, 360 bp, Zea mays
ccagctccagaccctcactgacccatcgatctacagcaacaatcccgggctctgtggacctcctctcaacccttgccaagacacgtcacgtgttcatgatgaaagagatgtcggaggataccgggacggggacccatggctgtactactgtgtgatcgctggagtcgtttctgggttctggctgtggtacgggatgctcttctccgttgcgaggttgaggtgctctgttttcttgtttgctgatcgggtacagtataaagttatgcagaagatgcggcctttcaatcattttgtttcgaaagagaagagcgatccatcgtctgtgcctatgttttctacaagtgatacaagctgaagaat

SEQ ID NO: 1800 - DNA, 372 bp, Zea mays
tgtatgatcaaggaatggtctacaccaatgtgtttgatgccaactttgatactcttgtctggtcattaaggaaagctggtgtgcccgacatgagaatcattgttggtgaagttggctggccatctgatggtgataagaatgctaacaccaaatatgcacagaggttctataatggttttctgaagaaaatgacaaaaaatgtcggcacgcctctgagacctggtcgtatggaagtttacctgtttgcgctgattgatgagaaccagaagagtgtcctgcctggacgctttgagcgtcactggggactattcacatatgatggaaaaccaaagttctctatggatctcagtggaaatggcaagggcagtgtag

SEQ ID NO: 1801 - DNA, 290 bp, Zea mays
ggacccatcaatggcgccatgaagtccgacggcgccccattgaacagccggccacccctccctctctctggccgactctccctcttccctcctgctctctataaaaggcagcagagcctctctcccttctcctgcctaccaagctcaccccatctctctagctcgccagtacactgctcgacgccgtcgtttgttgccgttcgtcgccggagttcacggagcccgtagttcgtcgccggagccacgcactcgccgtccgtagtcgagccctgctcttcacccggccgaaa

SEQ ID NO: 1802 - DNA, 152 bp, Zea mays
tctcccatggcgcctcctctccttcccttcctcgagcaagctctagtgagcgcgcagtgcagcaacaccttcttccccatggaagccggcgctccctgtccatggcgccatctcccagcagccactcccatggcgtgctgctccagtcggtc

SEQ ID NO: 1803 - DNA, 807 bp, Zea mays
ggatgctcacatgcagactttcagaggtaggtcaaacaagagcagaatcaatttcttcacttccatatgaagcatggctctttattttttttttcatttccaaaacaaactactagctaggatacttgatttattaattcacgattgaatttagagtacaccttggaatgaacctgtgtgctttgtttactgaaatttgctttttgttgacttgttgctacttgctagttatacaaatagattttaattatgtgcctttaaaaagcatggcttgacaaaaacattagcctatcaactaaaatccttatacatgttatctgcagacctgttgtcaaaagttgaagttgaaaagaagaaattgcttgagaagtacgaacatcatagtaagtagtaggaagacttgccaaaatttgtgcgatggactcttgtttacttgactatcatcgtcattctttcaaccagtgaaggaggagaccaacacattatcggaacttgacgaaacaatctcagagaaggtaacacatgcggaacattctatcagaagggtgaaccaggtacatcttgaacatatattccgttcgcagcgtatcttcctctgataacccaaatttcttgagctcgagattccggtactgattttacatttcaatttcattgcttcatctatgcaggatggcaagtcatttatcgtctttcgcaagtctactggcttgtttcttgattgtggatctgatgatgattttgaccttgatgagtggcgctgctaataataattcatataacagataaatggaagcccttagtctt

SEQ ID NO: 1804 - DNA, 678 bp, Zea mays
cttttcataatggtgttgattcttcttcggtaattaactaataatttgcctgtcttagtagtgtggccttttcatttatctgatgggaattgctacccttgtatagttaaacaacatcctctacaaaaaagttaaataactctgctgttggttggtctcaccttttgtggctgttgcgaaaacatactgcagtatctgccggtggcttcagcaatcatagttggtgggattaccgcgacaactttcactctcagtcaaggtctgcctgccttgctagtctccagagttctgaagttttgatagactgttcacatcagttgtgcttatattctctttgaaaaaaactgaattgcacagacagcaaaattttatatccattgtctcatctcatctgcagttggacggaacgcgcagcacttgatctcctccattatctgtgcgggcttaacagtcggagtagtagccttggtgaaagccaatgggaaacagttttgctctaggccccgtctgtgtggtctaatctaatccttggtcttttccccccttccctttcatattgccctttgttagaaattgaatgtaaaaggattagaatgttgttttattcgttgcaagagtaaggttaaataaggaggcaggatggcctgccggtcccgtaatctgaagctggctaatttg

SEQ ID NO: 1805 - DNA, 353 bp, Zea mays
atgatggtagttgagtagttcttcttgcctctcgatcttgggcattgatacttcgcccccttatatggtgcaaggtatccttcgtggttggggtaccctgagtcaacaacatcaaacttacctgcaacatattaatatgcaatgagcgcatacgaaccatatagtaatattttaagaataaacacttgtcatgtgaatttacctttcggtggatgaggaaacttgtcaccatatttgtctaaagcatcaccgaataccctcatgtccatcccacaaccacaaatgtaaatcttatatcaaagtcacatattgccacatattctgacttgagtaaccatgacgacccacatatt

SEQ ID NO: 1806 - DNA, 336 bp, Zea mays
accccaggccggacgcgcgttagagtctccaaagcttatccttccatccactccccgcagccagcttctcttctcgttcccggttatattaataacgcggcggcgtgctctgcttcctccggtttgctctgccctgcttcctaaacacaaacgcgctctgcaccaagaactatatacaacgtagaaactagccgcgccgtcactcccttttgtggcaacctgcagcacgcacttgctgagacaggggtagccttgctataggctagctagtgtcacttgccgaggacaagcaagcaggccggggagacatggcactgacagtgttcgagaccacca

SEQ ID NO: 1807 - DNA, 567 bp, Zea mays
tggcttcggtcctccgttggatcctctgagaaagaatacgagcaaactcagcaaaagatatctgagctgagagcgttactggagcacgagaggttaggcttctgttgcaagttaatcttgcaatgccgctgtctctcgaaatttgcttgttacctttacttttttcaggagtgagaggcggcggcttgaagaacaatatgaagaggtgaaaaatgaagttatggagctgacctctgagactgaagagactactgtccggaaacttgaggatgaaataaaagaatgcaagggtattctcaagtgtggtgtatgctttgaccggcctaaagaggtaacatataatgtactgtacgtgtttctcaatcatgattttagaggtttacaccattcttagctccaccacgaagttcctgtttctttgttggatgatcaattttgccgcctaaactgacgaggattgtatttttctgtatattcgttgacaggttgtgatcaccaaatgtttccacctattctgctcgctatgcatccagagaaacctcgagattcgccaccgaaaatgtcctg

SEQ ID NO: 1808 - DNA, 401 bp, Zea mays
attttcactctgccatgcttggtattatttgttgtgctgctgcggtgcctggttgggatcttgtgaattttgtcttgcccttggagtctagatgttgtttttaattgctcttttgggtgggcgccgttgtccagaagaatcagctaaagttgatgatgttttggttggcgtcagactatgtgctgtccggatagttggctgttaaggatgtgaaaacgttcttgttagtttgcatatcgccttatatgagatgatgttagtatgtttcttagctggttatggtaaaagtcagtcagttttttttccttttcagagctttctcgatctggaaggattggctgctgaaatcgccatttcttgctgcgtgcttgcctggtctggttgtaacagtgatcgtgtac

SEQ ID NO: 1809 - DNA, 330 bp, Zea mays
gctgcctgtttctccaacaacacagtctgcgtgatggatttccggatgtagtccaaccagtagggtggtgcatatcaatcctaacacaaggctagatcataaatccgtcccatgcaaatttgtgaagagcggagttgttagcaaaatgtagatcctaggtggcttcaacttttgtccatgcacatttcgtttttcttggtcatacttaccttagagtagcaatgtagtagtggaaatgccttaacagggtttagtagcatggaaatgttttggtggtaaattaatgaattaatctgagatgtactagtttgtagtttgcacataccgtcg

SEQ ID NO: 1810 - DNA, 325 bp, Zea mays
atgggaatttcttgggcttagtagagatgttggctgaatttgatccaattattcaagagcatgtccgccgtattacaaatgaagaaactcaggttcattatcttggtcctaggattcagaatgagttgatacatttgcttgcttctgctattaagtccaaaattattaagaaaataaagagtgcaaagtatttctctgtcatacttgattgtaccccggatgcaagtcaccaagaacaaatgtctttaattataagatatgtggactcgtcgtcaggtcttgttcgcattgaagaatcctttctaggatttttagatgtaaatga

SEQ ID NO: 1811 - DNA, 528 bp, Zea mays
accaccgctcatctatcaagctagccacgccgccaaaacaaactagctagtgctcagctcagctcaggcaccaccacactagtagcaccagaagcgtgaccagctagctacagctcgctctcccatggccagcttcactgctcagctcagggacaagttcctcggcgtcatcgaccacatcaccggctggaccagcagcggcgtcgccaaggatacgccgccagaggagtccaccaagttacagtcacgcaccgtgcagcaggtataacagctgcagcatgtgcgagtggacagtcatctggtgcgattaattaattaagtaattaacaataacagccttgttgccggattatctgttcttgtttgcagcccgttgaggtccgatcgagaggtgacgaggaacccattgtgcaaaagggggacgaagcaggggcgaactgataccacccttgtctagaaatgtgtggctctactacggcgtgcatgtttgctgatgccctcaattctcttaatgttgcatccaccgta

SEQ ID NO: 1812 - DNA, 371 bp, Zea mays
attgcacgagaaagacgcaaaaatgggagacgccatactccctggtggcttgaatctgcctgttggtgggacaaacgatggcgagtactggattgatctccctgatgacgacaggaaggagctcgtcagagctggcaacctgaagagcgctgagctatacgctcatgtgaagccagctcatggagggaccttcactgacattgcaatgtgggtgttctgcccgttcaacgggcctgccaccatcaaggttgggtttgcgagtttcgctctgcagaaggtcggtaggcacattggagactgggagcacttcaccctccgagtgagcaacttctcaggtcagctgtcgtctatctacttctcgcagcacagaa

SEQ ID NO: 1813 - DNA, 444 bp, Zea mays
accccctcaacctgccataggtgaagaagctgatctcggagtgataatatttcttgcgatttatctttttctcccacatggcctgtgcttcctttcgatgaatcaaaaggattatacagatgcactgaatgaattgccacttcaataatgtgtgtcgttattattcatttttcttccaatctgtgcagaatatcagtttggtaacagtctggtttctgcattatgttgtaattagatttagttactacctggatgattactagtgcacttatgtatagccctgtaattctggaagtatatattattgtggaacaaagctgtatggatggtgctgacttctggtgaaaaagaatttcatctttttcattggtcgcagaggtggatcatatggatttgtattcaaggcacacatgactatatttttcattcggcactagttggtat

SEQ ID NO: 1814 - DNA, 648 bp, Zea mays
tggcgacgacgtcgacacgccgcactccgtccggcatccatatcctcctgtttccttctctccggtaatcttatttcctttctttggttatcgcgttctagggttctgcttcttggactcagcgattggggacttggggataggtttctgggcatcatactgcaaagttcttcatatctagtgctgatctgatttatcgtattgaggtttgagataagagaatgcctacgctttttcttttttgcgatcgaaatgcctacgcttttgtagaatctatcatggcataatatggtttactcagctttacgatagtttctgcaccctggtttgtctagttacccgagctggaagtctatacacacatagacggcataatatgcacatgaagttgatctaattaatgagtgcaaggaaagggaagcaatgcaactggcttgcttggacacctgctgcctgaatggttgtgtgcaacagctatgaagcctacagggtggtactcacagcattcactgcaatgataggatgacaggatcagaatgcatcatatggagtgctgatacatatgtagacttgccagatctttctgcacatcttactacgttttatgcatggtaacagctagtttcaaagaagaacaccagcaaagta

SEQ ID NO: 1815 - DNA, 212 bp, Zea mays
gtgcgcggggacggacggatgcggcgcctccctcgtgggcatagctggcaagttcttgccgggttttgtttcgtactactattcgtttcccccttgttctggcccgccggccggctgctcgtacgtttcgtttggttgccgacgagggtgacgacgatgcacgcagtttcagtgactacgtcccggcggccacaagttggaacaagaactgc

SEQ ID NO: 1816 - DNA, 400 bp, Zea mays
ccggcgggcgggagggctctttttattttgacccaccggaggacagccgccccatgggctggtcgcctgagcgcgctatgtatcagctcatcgaccggcggaaaggtactggttccatgtctccttgcttctctagatctggtgaattccgcgtagatctggtccggatggtacactgtgtcggttagttggtaattcactagtatcccgtcgcctgcatgctttgaaaaaagcccttcttttctcgccgctttaggttcgggtgaacgtcgtgagcgcgcaccgcatacgagagcaattaagcaaagcagctgcactctttgctcagatttttattgctatcttggctatgctcgagtgtaattattagtatgcttaagcctgttgttgcaagcaattg

SEQ ID NO: 1817 - DNA, 308 bp, Zea mays
cgatgcgcgggtcatcagtcttcgtcgtgccactgttccctgatccgcgctactccctggtcggtctcacgctcgcctttagcgtcgtggccgcacccaagttctttgaccccgttctagctgcaacgacctctcctatggggcatctcgtcgtcgtctggccatcagccttgatgtccattccactctccagtcaacctatggcggtagatgagagacctcggaagttggttagatgaagaaaagaaaagtaaagttcgtacaacgcccgtctggtgttcggcaaaatgagtggaccagtgcttgtc

SEQ ID NO: 1818 - DNA, 318 bp, Zea mays
ggaagggaaaggaagcagcaagcgctccgccgacctccccggtcgccgcaccgcttccctcccacgtcgcagacgccgcgcccgtcgcccgactcggaagaacggtcctggcccggcgctcgctcgcccgccgttagcttgtacccctcctgctcggatccaagaacgattccggtatccacggcggcggcggtgttcctgttgtcaccggcgcgtttcgtctcgtgcgtctcgttctgtaactggaaaagcagccgcatcattttctttttttactcttagttatttctgatttatttgggtcctgctctttctcat

SEQ ID NO: 1819 - DNA, 485 bp, Zea mays
aacatgttagatatcctgaccttacagaggcacttgaagcctggtgttatagatcgaaggttgctaaaagaaggctctctttcttgagcgacattggccaggtatcttgattcctgaccaattaacaattaaccgaagcggacatgagatatctgaattgaacaagtttgcatgctttctgctggggaaaatcatcaggttctgtgatcaccagcataaattttggaatttggaggcagtgcagaaaagggctcttgccaatattcgtatccatgacatgaatcctgataacaagtagccgaagcggggagggcctgttcggttgtttgggattggagccccgaattaattcctagccgaattacttatctaatttatatagattttaataagctggaatgaatcctggcttattccggtacaaccgaacgggcccttagtaaattacccagagtttgtctctatagattgcaggctaactttaa

SEQ ID NO: 1820 - DNA, 456 bp, Zea mays
  misc_feature (347)..(418): n is a, c, g, or t
  misc_feature (424)..(427): n is a, c, g, or t
  misc_feature (443)..(452): n is a, c, g, or t
atagtgggatgaaggttaattcaatagttgggcatgcaagtacaatgcggcccagctcatgggatgatcttgtagcactgaaggatgataagagtcaccacatatgttgtttctcttcacaccgtcaagattcatctgttaaaagtggagagcctatgaaagctgaaggggagatcaaggttgggattttggataagtcaactgctgataaggaaaataaaaaatggtataagaagccgccacgacctccaagatcacagactacttcaccattagaccctgctgatcagaagctcatcagtgcactatcggagcttgcggtgttaaagaaggctaggattgagcannnnnnnnnnnnnnnnnnnnnnnnnnnnnnnnnnnnnnnnnnnnnnnnnnnnnnnnnnnnnnnnnnnnnnnnttatannnntttttattttccttannnnnnnnnnactt

SEQ ID NO: 1821 - DNA, 350 bp, Zea mays
caaaatccttattaatagtccagttgagtatcctttcaagaaaggaagtccaggtgaaaatcctttcaaaacatgtagtccagttgaaaactccctcaaatttgcagctcaacgtgacagcccatctgagaagaggaaatcctgcatcagcaatccccttccgcccttccagcaggctgttcaatgcacaaagcaagtaggagttgcaggtcaaccctttgatattaaggaatattgcaaggaaatattgaggagcagaaatgacagtcaaggaggcgatccttttgctggttacaagagtatcttttcttttctatgatctgctgaacagctagcaaatatgatcctga

SEQ ID NO: 1822 - DNA, 402 bp, Zea mays
  misc_feature (337)..(339): n is a, c, g, or t
  misc_feature (381)..(390): n is a, c, g, or t
gcgtcatcgcatgaatccacgcagacaggacagaatcagggggccaatcggcggcgcgagcggaggcgtaccagtggtgagggccttgatcatgccggcgcggcggcctttgtagtcgcggaagacctcgtccgcggtgtgcgcggcgttgggcgccagcccagagcccccgccattcatcgggcgagcggcgcgtgggcaatggcagtcgctagggttccgggtcggggacgggctgcggcgggacgagagcagactgtcccgcggtgccggtggtggtggtagagagaacaggggaaggggaggagtgggtttataaactttatattttgctcgnnnagaatttcgtcggcgtttcgggggaggattttgagccctgtnnnnnnnnnncatcatgcttcc

SEQ ID NO: 1823 - DNA, 692 bp, Zea mays
tataaatccgtgcatttcagtttttgtttcttttttttcttctcctcatcatcatgaagtttttgtgcaattaggaatgctaatatccactcttcactagtatgacgagttctacattgacctgtggtgatcatttgacctgaatacttactttgtcctgagcttcccatctcctttacattatttggctggctgttccagtgtctgaaattcgcgttgaatatgccttgctaaacgcacgggcagttctgtactcaccaaagtatacggaaccctcgattcttacttcttaccgtcgtctgaaaattgcaaccggaatcaacacaggcagcccgaagacaggcctgccgggtgcaggaggtggccaggaaccgctgccagcagatgtttgcggatctaaactcccactgcagaatccccgtgagtagttgctatgccctgaggcctctgaatgacctagctggttcatggacgctaacctgtcgtttgaactcagggaccaagggttaggttcgccgaatacgtcgaggagaaggccgcgtcgtctccacgcaggagcagccggaggtgactggatttcaggaggtggcaggtgaactggcctgcccgatcgtgttgctgaattgttcggtacaataactaagtagtgctgcttggcgaaccatcacccttgtcactggtttgtgttggtt

SEQ ID NO: 1824 - DNA, 374 bp, Zea mays
cttgcaccgtcagttagggggttttcccaagctttcatttcccaagtttgacggcactagcccaaaattatggcagaaacgatgtgaggattattttgctatgtatgccagtgaaatcactgtttgggtcagagtagcgtccatgcactttgagggggttgctgggcgttggtttcagtctattgaaccacaagtgtcttcctggtcgtggcaacagttttgtcaagctgtgcacgatcgttttgggcgtgaacagcacgagcttgttattcgcaagctgttccatatccgtcagacatcttcggtccaggattatgttgatcgtttttgtgaacttattgatgtccttgtcacctatgagcacactacagatc

SEQ ID NO: 1825 - DNA, 1029 bp, Zea mays
ctcgttttgttctgtctctctttctcctcgctccctccgtcgatcctctgcagcttgcatcggtcgaccagcctagtcttccactgtaatcgcctctcattattctttctgccacgctcctcttcgtccttactccctccgtcttgtctatctgtagccacttcgtcttcctacgtttttgccaggttagaaaaaggcatgttttctttttccccgatactttgtccttctagcagatctagttccttctgcttcacatttattggatttgttagtcgcttcttacgattcgcatcttagatttttggattcgttgggcgccttaaaccgcgaccacatttctcctctaaggtctgtgtcttgtcttcggcgtgaaaagtgaatcaccccacctccaaaaaattactttgcccccccccatgttacagttaacgttcttcgctccttactctctgcgtgttatttcatatttacacagtacatggatgaatattctttcgaaaaaagatgttaagtaacttagtgactctccttaacactgtaggatttgaggctgtcatagtatgctctctgaccgtgctggcgggaggaaggaggtgtgtatatagttttcttgcattattttcctgtgattattctcatccctcctatatgttctttcagatgatttaagttctctgcgtttataaccaaaaagaggaggataatccaatcatggtaactaaatagtaggtagtaatgtttcacggtaaatcacagtgctcgaatgcgatatgatctttgactcggagtattgaagactaatttagtttgagtttgagattagttgtttttgtcattaataaactcacattggcgtctggttacgagctcactactagattttagatctccagttttggtgtacttttgctgcatgtgcctcccagagttgcagatttgcaggtagcacctgattcctttttatttttggattgagatacagtgaaatttatatttacctgttcccaccataatgtagcatacagg

SEQ ID NO: 1826 - DNA, 414 bp, Zea mays
agcttgttgtccagaacatcggcttactccgcgcgttcaagaagtaaggcaacgagggctctgtccatcttggatttttggtgcctgtaatagacatctctctgtttatagtaactcaattattgagctcaaataagacgagtagttctagcatagtagcacccccacccacacatacagatcataatggctccacacacacacagacacattccatgcatagcttgattaattattctacatttctacttgtagtttgcaccttcttgttctctgcgtcaatgcatacagtctgatctctgtcaacctggttctttctcccttccagtttgcatcttctgtgattgagtgctacctgaatagctcaagatgacagttttagtgtcatcagttaggtgttagttgtgtcatcag

SEQ ID NO: 1827 - DNA, 437 bp, Zea mays
aagggttgattctgtggtctgggttgcatccatctctggcaacttgggaggacctgattccacttcgtcagaggttccctcgagcgcctgcttggggacaagcggcgtgttatcgggaggggaatgtcagtctctccacgcgagtcgacttcagaagacctccaggtgcagcaggcggaagcagccgtgtccgaggagctacagcagcaacagagcaatgtggagactggtgggcctcaagaggagactacagctgggctgagaaggggaacacgccagcgtaaggccaatgtgagattccagggcccagaatggagaacctgaagatatacgctcgctgagacctacggagaaggcaggatgtaacagaactacgtttatcttcttcctcaagtttcttcttctcctctcgctactgtcttccctgctactgctac

SEQ ID NO: 1828 - DNA, 356 bp, Zea mays
gctcatcaaatggatgcatctatgagatccaaacaatacaaagagagatggaggatggtgttgtccatatgctaggagaagctaatgtggtggcagaaccaaatgcagatttcttcaagaagataatagttgactacgcttacaatttcatgaggaagaacttcagacaaccagagaagataacatgtgtccctcataacagactgctccgggttggaatgacatatgagatctagggcgatgctgaaatttgtggaacacagcaatttaatcaaagcaggcaggtggttagctacttgacaatggagtcggtcttctcagtatcaagtcaggaaatggaagggttctgttcaaag

SEQ ID NO: 1829 - DNA, 533 bp, Zea mays
tgagagagccttcaggagggggggatccaggtgagccacagtgcctgtgcccagcagccaagatgtgtactgtttagccattttgtgtatttgattaattgtttgtttctatgagaacttggttaatcatgtgttgtattgattgttcacaaatgaaattagcttttctcaatcagcatcggtcaccggatgcatgagaaatggatagcgggtgagttatgtattcttatgtttacaagtaagtgggcggtactgatcatctattcacttgtatccaggtaaggaaaagagcgctctaaggaaaatagggggtaagttgccaagtttttcttggagctctcagggtctcaccacaactgagaggtgcacgtgcacaagaaaaaggtaactataattatcacggtaaagttctaacaatttgaataggctttattagcattaagcacaataaattccttaaaagaccatcttgcatgactgacctggcataataccagcaactaaaattttcttttgtaggagctggatgagtt

SEQ ID NO: 1830 - DNA, 326 bp, Zea mays
  misc_feature (237)..(241): n is a, c, g, or t
  misc_feature (246)..(246): n is a, c, g, or t
  misc_feature (250)..(253): n is a, c, g, or t
  misc_feature (264)..(269): n is a, c, g, or t
  misc_feature (271)..(271): n is a, c, g, or t
  misc_feature (273)..(276): n is a, c, g, or t
  misc_feature (278)..(280): n is a, c, g, or t
  misc_feature (283)..(284): n is a, c, g, or t
  misc_feature (286)..(288): n is a, c, g, or t
  misc_feature (290)..(290): n is a, c, g, or t
  misc_feature (292)..(292): n is a, c, g, or t
  misc_feature (295)..(296): n is a, c, g, or t
  misc_feature (298)..(299): n is a, c, g, or t
  misc_feature (302)..(306): n is a, c, g, or t
  misc_feature (308)..(312): n is a, c, g, or t
tgtcttctggcgagaaatgcagcacccagcagtgtcccctgagcgaagcaaatgggcaacttttgtttgaaacaaaacaaaagtaccaggcttttttttgggggaggggcggttagatttcgctcttcttattttttttcttctttcttttgtaattttaaccctttctttcatcttttttttcctggtgtaaagtaagcgtggactttgtcggtttatggacgctatcttattaannnnngaagntaannnngaaagaagggnnnnnngntnnnnannnaannannnananaannannaannnnnannnnngccgccgctgcccc

SEQ ID NO: 1831 - DNA, 389 bp, Zea mays
cctatggacagctaggactagcggaaaaagcaatcaggtttgcgatagaaatgcataggacaggcattgacccagacaatgttacattcttggagattctacatatgatctcactgattccatcactgaattaggggatggaagtacatcctcacattgtttccagaatgaacaggcgattgctaattcacttatttacatgtatggtcgatgtgggagtctcagtctttcagttggtgcctttattattgggattatggataaggatgcaatatcttggacttctatgatgcaggtatatgcatggagtggacttgcaaccgaagttgttaagctttttgagatgatgaagaaaacaaaagtacaacccaagcactacactttaattg

SEQ ID NO: 1832 - DNA, 490 bp, Zea mays
gatgaatgatgagggcggcggaggttgccgcagatgagaacatgtccactatgcatttaatcaatcatcggtggggattttttttgtgatcaatttcttctgtggaagaagtttttttggaaacggcccaatcatcagtggggattgtattgtgatcaatttcttcaccttggtaagtaattaagtaatgtctttattcatgtactgattggaacttctctgacattttgttcaattattttcttcaaaatatcataatgattggaagcaagcattatgatcaacctaaggtaaggagtcggactactcgtttcattgggcagcttgtattgctctgcttggtttgtgatagtaagatttatttttgcctatgttgaacaatgttttttcagttgggtgcgagaagttcagaagcagcaactaggtggatcatctgcgtaatggagtttgcattaaaggccaaagttttgcttattttattgctccactt

SEQ ID NO: 1833 - DNA, 1469 bp, Zea mays
  misc_feature (60)..(64): n is a, c, g, or t
  misc_feature (1374)..(1374): n is a, c, g, or t
  misc_feature (1414)..(1418): n is a, c, g, or t
tcttccgcctttttggtctgctagaatttcttctctgttctcctaatctgtggttggttnnnnnccgcctctacgcttgtcgtcgccgtgtcctcctgcttgggcctcgtatctatgtctctcgtggctgctctgtggctactgcccctccccctcctcgtgcagagttggtactgaatctatgtctgaatctgcagacaataataataatttgaacaacaaccaactagtacaattcacacgggacaatctgtaggtttttttgtatcgttaaacaacgtaaagaagtaaatactgcaaatcaaggcatctgaaaggtacaggaagtggagctaagtttgattagagtttttcagtttcgtcagtcttagtctctattcagtttggtcagagtttcttcagtgtaatatagttagcagactagctttggattctttttttgcaaatcatatatatacttcatcatccactactcaatttgcatattttgtttacatttcatggacgcacttatcagtgatcctagtcgtgaggacaaagaaatgtataataatattctcggtaacttttatgcatttaagtgcatggcatactgtcagaatgattcatatgtatgtatagtctcattttgaatttccatatgtgtattcctagataatctgttagaggtttctaaatgttcttactaaatactaattaaggcatgcatcgtttattcgttttatatgagttctgcagttgctaaatatatctataaattacatgtttccttcttaatcctattgtttttgtttgcactctataaatgaattatatgtttctttgctgggaagaccacaagtctgaactagtagtcgaatcccctgggactgaatggtctcttgattatgattataactgtagctggaaggacactatatttttgttccaatttgattccttaatttgcattaattttgtatgttatatgataggtagcacaactatacaagtgcctaattaaattttatgtttctagataatgggttcttgggaggagcatgttaggcggttttttgttggaggaggaagaagacgatgatgaactgttctttgttattctccctgctataatctcatacctctcagaagagaaaaggcccattcacacatcctctctcagaagaaatttttgttctttgttataaccacaatgttcgaagaatgtggctaaagcgcaaaatcaggtatgtccatagttaagcatgtagcaaaacatagcttccaagaacatgttagcatcatacttctgcaagtttcttcgcttttgtcatttcgctagttgtaaaatgttggtacatgatgtaaactaaaccgtatgtcaattggtgctangtggtatttgcagagtgctaagtgtaagcaacacttgaannnnncatggagaaggaaaatggaacaacaatccacatgaagctgtaaaaaaggag

SEQ ID NO: 1834 - DNA, 311 bp, Zea mays
ccttgtaacccattacacaaagcatactcaccaggacgtagggtgttacgcatctctaagcggcccgaacctgtaaacactgtccattgtccctcgtgcatctggcacgaaccattttgctacagtcggcgacaccctcctggtacggtttaatctggaagcctccgccgcgatggacgaggcggacgatgacgcccgcaccttcaaggtcggattcaccgccgccggagagaagcagttccgggagctcgtgagggagaagctgcgcgggttcatgaggggcctggacgacaccctcctggtacggttta

SEQ ID NO: 1835 - DNA, 1066 bp, Zea mays
acatgttatgtcgatatatatgctttttaatggaagttgctttcatttttttgaggacttgttagtttttgggaaggtcttgtaaggaattgctattttccaaaatattgaggacttttggtttgtcccaagtcaaactatacaagtctataaaaaaacagtaatatttatgatatcaattcagcattactagatccattaaccattatgttatatatttcacagcttactttgatcttgtagatgttaatactcttctctataagctcggtcgaacttaagatagtttgattgattacaaataaaaaaaatccttatgttttgggatgaagtatagttttgttacaaatctagaggattctgaggcttaattcatgagcttcagcttatagtcaggcgggaacgacgtggaaaaagagtgccgtagttttgttgactaggattggaatcctgttctccattttatgtttactttggaaaagtagccttttgtcagcagtccattcactgtaatccctgttactacttgttaattacaaagatgtatttattccatttgcttggcgttagatgttaatataacggccactgggtattttatgaaaggaagtttctcagactctcttgcttggcgagtaaaaattgtggatactcaaatctacctttcacactgcaggtcatggtggatggagacctagataacctttttcggtatcgaagcggtaggccgtttgttacattggcagtgttttttttgttgaggtttattacaaaggtgttgtctttttctgtttcatctgaccaccccgtttgtttcaggtgctctgatgctttccttggtctgtgggggcttaacctgtgggagagtctgtctggtgtctctgcttcaggttgaaggcacccacggaggtggagcactccaggaaagtgggagctggtacctgcctccttgtacagatgtatctcatggattctacggcggtcgggctgcctgaactgctgtttgtaccctagtaggggtttagactgcgcgaccacacgcagagctgagttgtaggggtgtagg

SEQ ID NO: 1836 - DNA, 555 bp, Zea mays
  misc_feature (531)..(535): n is a, c, g, or t
attccgtatacaagtaagtggttcttttgatttgaactttcgaaatgtcttcaaagtttcatctctgaaccatataatgtggtatcctgcatctagatataagtagtgtcttcaatggatacaatacaagtatagttttgatagaacctttcttcgatgtttgcttttccccccatatgtatacaatcattgttattgaggtatcttattattacatactcttcaatgtatgcctgaaaactatatcttatttcctcagatttctctatggtgatcaagctcgattttttgatgatgagatccgaccagagttgaggcattctaaaactggaactgttgctatggccagtgctggtgaaaactgcaatgcctcgcaggtgcaaagctgccccggtgtcttaattgataatattggatgctccatttttcaccatttttcagtacttcgttgcttgttttggccttcaatttatgtgcttttaatgtttttagttctacattacctttgcgggataaaaaaccacattatannnnncagagatgaaactttgaaga

SEQ ID NO: 1837 - DNA, 585 bp, Zea mays
ggtgcaaacttattccgtaagatggcaaaggatgttttgtttgccaaggtgagcatatatctgcccaggttcccattctggcaaatcatgcctttcgcaggggaaaatctaaaaattagccccacttgttgttccgctaggatatatcactcgtcaagaagttctatatgctctatagcttcttctttgtgaggagagttgtagcgccgacggctgcctgtattctctacaatgtcatcatccccatctcagtcacaatcccggagctttacctaccagtgtggggtgttgcctatattcccatggtgcttaccgtggtcacagctataagacatccaaagtaagtctctttgtgactgtgccatgagctctagaaaacaacattgctcatctgtccttcaccagaactaaagctaatgaacaattcgacttgtctttgcagaaatctacacatactgccattttggattttgtttgagagtgtgatgacattgcatcggatgagggctgcgctgactggactgctggagttagaagggttcaaccagtggattgtgacaaagaaggtggggaatgatctcgagg

SEQ ID NO: 1838 - DNA, 454 bp, Zea mays
gcacgaacaggaacagtagattgcgtgggatgcgtggctcatgttatcttccgtttgctgtcctgtgaacctgtgtgtgtgtgtggaactgtcaatgtgcggccctactgcattctgacgtagttcgttcgctgtctgcagaaattcttctttggtgggaggctcatattcggacctgacgccaagtcactgatcctgtctgtttcgctcattgtggccccggtattggtcttctgcggattcgttgctcggcatcttcgccaccacttcccggcttacaatgctggatatgcgattcctgcggtagctgtagtgtttatgatttatgtgagttctgtgtgctgattcctgctggtagtggtatcgatcagttagcattcgcgatatgctcttggctgagcacggatcattgttttccttctgtgtaggtgctagtcctgctcttgattacatc

SEQ ID NO: 1839 - DNA, 466 bp, Zea mays
  misc_feature (453)..(456): n is a, c, g, or t
caagaaaggtgttccgcttcttgggaagtcgaatgctcgcggagaccagctcgtgcgtgtccaggttgagatcccgaaacggctgagcagcgacgagaagaagctagttgaggagcttgcaaacctgaacaaggctcagacagccaatagcaggagatgatttattgagcaaatctttttaggacaccatgcttgtggtcacaggcaattttgatgcaaattgcagtgatgaaaagagttggtagtggttcaacacttctacgaactaaagaggtacactggagcgaagcgtgtcatgctcatgccatatctgtggcctcgtttctaagctattggaaaccaagtcggtgaccactggacgtcttgcaatagcttaacatatacgactttattagccattttttgttacacggctttttgtattcttgagagccttaggcaaaatctctggtnnnngaatcaggct

SEQ ID NO: 1840 - DNA, 390 bp, Zea mays
atagcaatggaaagataggtaggagaaggccaaagtttatatgggaggagacagtaaaatgagacttgaaaaaatgaaatataccaaagatttaaccttgaataggagtgcatggaaaacggctatctatgtatctaaaccttgacttgtggtttatgttgaatttcaactctagcctaccacaacttgcttaggactaaaatactttgttgttgttgttaaattgaacaccatccagactcaactggagcacaaaacttcagcatgccttgatccgaaactagcttggtgccttagtttcatgcccgacagcccgagtatggctcagtcaatttcaatgtgctccaggaagttactcagatattgcaaagggtgactatgcttgcatat

SEQ ID NO: 1841 - DNA, 480 bp, Zea mays
cagtagccacccacagtttctggtgctctcagcagacgagcgcacaatctcaggtcaagaaggggactacgaacaagcatctgctgtagcttctggccgccctttacgtacacttgttgaacaagaacgcactcgagggttagcggatgcttccagtccatctctccgttgttctactcctgctgatagtactggtagatcaaacaataggtatttccgacatatcgtatgtatgatgctatccttgtgcacttctcttcactatcatcgaatgcccgtgcttagcgtctactatggcctgtcaggatttctgggatcgaatctacacctgtggatcaagacggaactggaccatccgctttacaatcaatggcagtaactctcgacaaacagaactcctgacaaatggagcacagacacgcgtcttacctgtgggcattcttgacaatggcaggtacagggatttcataatcaaagtgc

SEQ ID NO: 1842 - DNA, 301 bp, Zea mays
  misc_feature (295)..(297): n is a, c, g, or t
gagatccaggccaccgccccttccgtccgaaacaccaaagctcccaagccccttccgtccactactacgccacctcttcgtctccgatcttccagtgtgcaaggtgaagttgcattcctctctccctctaatctgtagtcgatcgaggcgaggacacaagtgtttttctttcggctctagctcctgcagtgtctattggtttcttgatttgaaaatcatttttaagaaaatccttgcacatgagtatagtagctgtgaaaatccaaagctcacacgtctagcccagcagcatcannntaga

SEQ ID NO: 1843 - DNA, 382 bp, Zea mays
cacatcttcaacaccaggtggaggttgctgcctctgcggttcggaaggcagaggaggagcgctccatcctcgctcgtcaaatggaggaaaccaggaagacagtgtcgcgtctttgcttggagtggatggccaaggagatggaaggtatgggatcgaaaactgagagggagaaccgtgagcgtaggattgttgaggaagagaatcgaaggcgagaggaagaggatcagaggcagggggagttccgtgagcagcgagggaggaacaaggagattcgtgagggggagttccgtgaacaacaagggggaaattgagagtatagagcagcggatttgccaaaaatgtcattcccaaaatttcagggaactaaagcagggatatggat

SEQ ID NO: 1844 - DNA, 542 bp, Zea mays
  misc_feature (299)..(299): n is a, c, g, or t
  misc_feature (307)..(308): n is a, c, g, or t
  misc_feature (318)..(318): n is a, c, g, or t
  misc_feature (329)..(337): n is a, c, g, or t
  misc_feature (339)..(339): n is a, c, g, or t
  misc_feature (341)..(341): n is a, c, g, or t
  misc_feature (344)..(346): n is a, c, g, or t
  misc_feature (368)..(370): n is a, c, g, or t
  misc_feature (385)..(392): n is a, c, g, or t
  misc_feature (403)..(405): n is a, c, g, or t
  misc_feature (470)..(473): n is a, c, g, or t
  misc_feature (476)..(476): n is a, c, g, or t
  misc_feature (478)..(479): n is a, c, g, or t
  misc_feature (524)..(526): n is a, c, g, or t
gcgagggccacgcgggacgccgcagagacggccaaggagaaggtgaagggaatagatgacgctgagctctgactcttgagaccatgcatgcatattgactcttgagctagctctatgtctatctggatttccagtccgcttagcttgctggtcaagacgcactcacgcacagcaggttgtgcttgtatatgtttggtcacttggtactatatatcttcacttcacctcttgagatagatgtcaaacctgacggagatggatagatcaaagcaaaaagatgcgaaacatggcacaaacgngttctttnnttccctgtcntgatatcacannnnnnnnnangnctnnngcatgaggatttctcggcattnnntcctgacacctttgnnnnnnnncacatcatctnnnatgtcagcgtcgtctccattcaactcgtgtattgggaacttcttggatatcatgcacctgagtannnngantnntactcttattcatgataattatcttctgccacattcatttttctnnntttacacttgactgca

SEQ ID NO: 1845 - DNA, 363 bp, Zea mays
gggtcggggccacgctgctcatgtccacggcgctctacctcttcccgcgacggtggcccgcgacgacgcgtaaggagagtacggccgccgtcgacccgctggacggctggagcgcgacgccggagaagaggaaggtggttatggagcggtgtgacgcggtccctggcctggagtggaaccgcaacaagtgaagccatgatcccgccgtttcgtttttgccccctgctatttttttttaggaatcagtgatccttttttgtttagatggaaaggattagtttttgcagtactcggcagttttgttttgtccaagggttttttgcaattgtattcaatgcccaatgtgaccaaacttattatacg

SEQ ID NO: 1846 - DNA, 384 bp, Zea mays
gcacgcggggcctcatagcggccggcggcgggcgggtgctggacaaacgcgacctgcgccttctgccgaagaaggatccggatcctgacggccgccgctctccgtctccggtgaacccgaggccctacttcgtgtacgacgtcgaagcgcccggaggtggtcggttcagcgcgaggctgctgcggcgggagatcgacgaggcgagggagcaggcggcggccggggcgcaggtgatcggccacctcagcgtgttcgacgccgtcgcggcctatgacgcggggatcctgctcgtgtgagcgatgcgggcattgggccggggatgtgtctggagcttggacttgcatgggccgattgttgggccgccagcacgttgggcctcgacgt

SEQ ID NO: 1847 - DNA, 231 bp, Zea mays
  misc_feature (165)..(169): n is a, c, g, or t
gctgttcttttgcttctttcttttcttcagccgatggaacttgtgtatgttgtttttcttttgtttttttttgttcggctgaatcatacgtacggcttttggttttctacactgaggagctttctgctaactcgttccccggacgtaacggtttttttttctctnnnnntagaatcaggcgctggttccctttaccagagatggtcggccgattatggggcgccgtcataa

SEQ ID NO: 1848 - DNA, 260 bp, Zea mays
cagtgcaggtgtaatgttgttggcccaggaggaggagaacgagttaatatcccaggctgcagatgtggtggaagcagcatactacaagagaaaggccgaggagggaaatgcaggacaatcaagcaagtggaacaatattgtgattgaggattgtgcgacggatgacacagacgacgagttgcttactgattatgtttcggactgacttcgctacccatgtgtttggtagtaccttgtattctgcatgggttgtttcattg

SEQ ID NO: 1849 - DNA, 390 bp, Zea mays
ggaggtccagatggaggggatgccgatgatgtcacagttcacactggattcggatgaggagaaggaagaggaagtgatcacctctacagcagctccagtggcaaatggcggggagtcccatgacgagatcccactgcacgaaccaggttccaagtgacggagatgaaatctgggctgttcttctgtcgattagccaagtggaggagggtgtcgacagagctggcacactggggcttcatgtttgtgtgttttggtacatcattttaatatgggtttcactttctgtttctgatatttggttaatatgtggaaagaaatcttgcttagtttgatctgcatagagtttatatctgtgaaatattgtaatttgttgggttcagaacttcagat

SEQ ID NO: 1850 - DNA, 390 bp, Zea mays
  misc_feature (157)..(157): n is a, c, g, or t
  misc_feature (162)..(162): n is a, c, g, or t
  misc_feature (369)..(369): n is a, c, g, or t
ggaggtccagatggaggggatgccgatgatgtcacagttcacactggattcggatgaggagaaggaagaggaagtgatcacctctacagcagctccagtggcaaatggcggggagtcccatgacgagatcccactgcacgaaccaggttccaagtgncgganatgaaatctgggctgttcttctgtcgattagccaagtggaggagggtgtcgacagagctggcacactggggcttcatgtttgtgtgttttggtacatcattttaatatgggtttcactttctgtttctgatatttggttaatatgtggaaagaaatcttgcttagtttgatctgcatagagtttatatctgtgaaatattgtaattngttgggttcagaacttcagat

SEQ ID NO: 1851 - DNA, 418 bp, Zea mays
ttatattatatagaagggtttgtttgaatattacagcacctcaatcatgcttgtctatttgtccgtggccgtttgatggactgcggactgctagccaaagcttgtcccgtatgggattatggatccttgtgttaacttgctataaatgcttaatgtggttttgtaataaagtcgactgagtaaaactacaaatttctgatgaccgatatgtgaatgtgaccatgtttctttccatttgtctggcttaatactactttcactacattagctgtgtgcttaaatagtgtaaactttctctttagcccttttccgttttggataattgattcctttgacagcaaatagtcacttattcttacacatactgactctgaaaattcacaggagcatgagacatacgcttgcttctgcaattcta

SEQ ID NO: 1852 - DNA, 423 bp, Zea mays
  misc_feature (374)..(376): n is a, c, g, or t
  misc_feature (397)..(398): n is a, c, g, or t
  misc_feature (402)..(402): n is a, c, g, or t
  misc_feature (407)..(415): n is a, c, g, or t
gactcggcggcaatggaggcaccacctgacccggccgtcccatcccgctcgacgagatcgtcggcgacatccacggggcagttctagattttcctttgttgattgtcagggctgtcaatgcagctcggcgagctagccccactgccagcttagctattgtgacagccattggggctgctaacgccgttagtggggtgaaggcgacagctgacgagatgttggccgaagcggagaaggcaaatgtcctagctgcaaaaaaaattgatcgcctgcttcgtcgttgacctcccatgatgtaaggttgaatcagttagtgttcatgtctaaaatttgatttttgtttccaactgttttgttgtgatgaattaaattgnnnttgtttcatgtataagtatanntgantgtannnnnnnnnagcatatg

SEQ ID NO: 1853 - DNA, 368 bp, Zea mays
agtttgaggacttgggggtagaagaggtgggtgggggcttagtttgggatctcgtccggagaagagagacgattgggtggatagtttcggtcagctgatttcgtttcgtgaggcaaatagttttgcgagcagtttgaccaaacaccccgggaccgttttgctcctgtaatgcaattatgcaaatcctgcctgccccgtggtctttttgctagtcttccccgtatgatcctttgtagtagtccactgtactaggctaccagcacatttgttgacctttttaggctctggcaggtccgcagtgaggagaaaaagaaaagaaaataagcttttgtgcatttgtttgtttgtttgtctgccagttctttgcc

SEQ ID NO: 1854 - DNA, 687 bp, Zea mays
  misc_feature (607)..(610): n is a, c, g, or t
  misc_feature (633)..(636): n is a, c, g, or t
  misc_feature (645)..(652): n is a, c, g, or t
  misc_feature (656)..(664): n is a, c, g, or t
ttcaagtattacgcataatggcaagatggtagcggctgtggagtacggtactgaaatgcaagagaagtcaatgtgtgaagagcctcagaggaaggccaaagtaatagcaattgctgaagtactgaagcttgggtttagtggaattgaagtggtaaccaccgcaagcattttcgctaaggaaccaaaccaaatggacatgtttctagcactgccagaaatctataagaaggattacatacttcagatgctcagtggtaggccatgtgatcctctgaccctttatacaatgcatctcacttcgtttaaggctgtaaaggtcatttataatatttgctttttagttctagcattggcatttgcagcaggtttcaagtttctgatgtatacgtatatatgattgttaaactgcttacactagtttctgttggttttaattttagtttatgcatgttagtcttcaggttgcatctcctaggagtgcaacctgtgcatactgtaagatctgagaccattcatggattgtcctttctgcatatgtcgtctttagttgactgtgtactaaaaaaaacatgattgcgctgtcacatttagcttgctctatttattnnnntgttgctgcttgcttctgccatnnnnatcaagttnnnnnnnnatgnnnnnnnnntatataactatctacttgttgct

SEQ ID NO: 1855 - DNA, 749 bp, Zea mays
catcagaagatttagcgtaagttcagacaacagttatttgttttattttgcacatgaaatgttcactaagctgtatgttttcacattatatgtccattgatgttacttggaggtttgcaacttactagtttactcgtggataatggtatccacaaattgttgtgtccacatgtgttactagaatacgtgttatggtcgataccatatcaaccttagttcaggataggccgactatgctagctattcgttcatgtcatgtttctgatactccaacccacccatactctttgaaaatactggattcatatcacctcgatctgttgatctttatccacatggtaaagcctgctgttgctgtccacatagccttatgaaaattcagcagatcttattttcttaactatacatcacttgttctgcaacatgtactttccacatatccttccttgccggttcatctgaatgaccaatttcttctgatgtttcaggagactatacggggaagaggactactataattttgttgttgcaaataggaaatgaatacaatttgatgttgtgagctctcatgtgtaccaggtatctatttccgaatacattgggtctagagctagtgaaaaaggaaataatattatgtgaaactgatgaagttgatagtttcatgtagtctacatgcggtactttttccttgcaaataacaattacttgcaaaataagcatgtttgttgacatgggtttcaaaactaaaa

SEQ ID NO: 1856 - DNA, 508 bp, Zea mays
  misc_feature (78)..(78): n is a, c, g, or t
  misc_feature (88)..(89): n is a, c, g, or t
accaatccaccagaaacatcgccgccgacgagagaccgtacggcaccctctcgatcgtctcgctcgctaaggtgtgtnctatagagannacctgggatgcatgtcaggtcgtctttctataggacacaccttagcgagcgagacgatcgagagggtgccgtacgtgctggtctctctcgtcggcggcgatgtttctggtggattggttctacgatttgtttgtctccgccctgcggcggcgtgcaggaggccaagatcctcttcgtcggtctcgacaacgccggcaagaccacgctgctccacatgctcaaggacgagcattctggcgcctttctttctttgctcttgccgccacaggcaattgatgatttcttctcgtgccggccgggagagtgaacaacggtcgccgtgctgtgtcgttgtgttatgcagaggctgagtcagcacgcgccgacgcagctccagacgtcggaggagctgagcatcgggcggatattagcgatattta

SEQ ID NO: 1857 - DNA, 392 bp, Zea mays
tacataaagaggtttgatcaaattcagatttgtgtgcgtgcctggctccctgtatgccacacatgtagcgcccaacccagatgctaaggttgcctgctgtgggtggcgtgcaaggggccaagcatgcatccatgcatgcatgcacttttgttcgattcattcttcatgtcactttttgatggctagtaccatgtgtgtgtttccatatgttcatgtttcgatatgttcatgtttcgatatgatgtaatttcatgtttggtatatatgcatgcatatatatacatctcctccattctttttgcacagggagccggcccaagggaggaagctatagccaaactggtgtgtggattacaattttgtgtgcttctcctcaccggccagttgccaga

SEQ ID NO: 1858 - DNA, 452 bp, Zea mays
  misc_feature (443)..(445): n is a, c, g, or t
gtcgtcttaccagactacgacggcgccaccctccacggggcaacctatgaagccgacgaagcccgaagacaagcttttcggtgacctcctgagcattgccaagaccaagaaagcttcatgagacgagctcgagcaggagcggccttctgatatatcgtctcccctatttttcgtggtttttcgtgctgtttgatcttacacttgtaacattatctgaatgtgtaaacttttttggggtccttttcttttattcccacgtcgtgtgtgatcctattgatcccattggattcgttataccgtgtgcgtgtactgatcacgagcgatgggaaactttggccgtaaatgatgattcaataaagggtgtgcagtacacgcacacggtataacgaatccaatgggatcaataggatcacacacgacgtgggaataaaagaaaaggaccnnnaaaaagt

SEQ ID NO: 1859 - DNA, 279 bp, Zea mays
cactgattggttggacttgggggcggttcaggaggggtggaggtgggtgctcaaggcggccatcaagaagttcaaggcgcggcagcggcggtcccggcaggctcccctgctccagatggtcctccccatgctgtgatgatcgatcgatcgatctcgcgcgctcacacgaattgtgcttgccttttgttttcacttgttccatcacagttctattcattgcatccggacgctggtccatgccttgcctgtattatagttgagttcggatttgcttcaagt

SEQ ID NO: 1860 - DNA, 969 bp, Zea mays
gatctccactgcgaagcactgcccccactgcggcgagaaaatcgacagcaaaccggtatgtagtattaagtatgtgtcaactgtcaagttggcaatttcgttttgcctttgtatatatcttgtgcacacagttatgcacctcctcagccggctgagaactggtggtggtgcaacttgttttgatgggattaattgctgtaactgcaagaaggattgggtggggctgccggcaggcgtcaagttcgatccaactgaccaggagctgatcgagcacctcgaggcgaaagtgaaggatgaaggctcgagatctcaccctctcatcgacgagttcatacccacaatagatggggaggacggcatatgttacacccaccccgagaaacttccaggtgagcgatgagggagctctactatctaataagataggcttgagcagaaacatttctgaaccatatatatacttatatagacatattccttgcttttcgagctttgcttttcatggagtgatgtattgtatgtcgggattgtttcgccatatgaattactcctatgtgcttgtgtggtttggatttgggatatggcacatattcccttgttctcgatgtgtgctcttccctctattcctagtgttctctacatgtgctcttgggtaggagtatatgcaaagagaattattgtttatggaaagttgtgcctatcctgatctacctctctctcatctgtgtcatgatggtaagatgcttctgaagtttccaaataggtttctttcctttctttctcctatcttttttccccagaggtttgttgcatctttcaagaaacattggccacccacccagctaccaggttctaacacagttcttgcgtctatatgccttgcatgtgctaatgaagggacgatatgataatgatcaggtgtgacgagggatggcctaagcaagcacttcttccaccggccgtccaagg

SEQ ID NO: 1861 - DNA, 346 bp, Zea mays
tcggaccaaacagtatggtggcgtaccgaaccgttccggtgtacaagcatataaaaaactacagctttttccaatgtctagaattgagtgggggctctatataaacccccttagccaaccatttgaaggtatggtagcccaagaaacatactaaggaaggttatacacatctccatgtgctcaaacacccaagtgcttaatagaatcattcgtttattagcgtagatgctttgcaaagtgtttaggttagttagaccgcttacgcgcttgctctaggttgttcttagttagttgagtgagtttagaaaaacccacaaaacccatcgactcttacacggagctgttg

SEQ ID NO: 1862 - DNA, 341 bp, Zea mays
  misc_feature (331)..(335): n is a, c, g, or t
cgcgcctcgcggacgcagaactcggccggcaggtgcacgcccaagtggagatcgccgggtgcgcacgcgacacagtcgtcgccactgcgctcgttgacatgtacggcaagtccggcggtgtcgaggacgcgcgcgcggtgttcgacgccatggctgcgccagcgaggaacgccgtgtcgtggggcgctatgctggccgtgtacgcgcagaacgctctcgggaacgaggcggtcgagctcttcgcggagctcaggacgtgtggcggtggcatggcgcccaaccacttcatgctggcgagcgtggtgagcgcgtgcgcaggcatggcgcgtcnnnnnatcggt

SEQ ID NO: 1863 - DNA, 219 bp, Zea mays
gatctgctggtgatgagatgcacaccgaagaaaggattcttcttcggatgtgtgacgacttgcaacttttttttaaggtgtacatacagtgctagcaggggtagagaagatatttaggaactataagaatagtggagactggagaccctgcttgtttgtttgggcttcccttttgttcctaacttatgcaccaacaacggctgaacatcgtgtatctcc

SEQ ID NO: 1864 - DNA, 324 bp, Zea mays
tcctcgacgacgacgacgacgacaacacctgcctcggcatcgcctcccctgcctcgtgcaagcggtccctcggatcctccggaacctcttcccgcgatttcctcgacgcgttctcgccgtccccgcccctgcgaaagcggcctcccctcgcggcggtggcccccatcaacctcgacgacaccccgtctccgcctaagcggcggcgctcctcggtctccatcaacctcgacgacaccccgtcaccgccaaagccgcggctctcctcggtgcccaagcagccggtcggggtggacgacgacgtggcgctctcaccccctggtgatg

SEQ ID NO: 1865 - DNA, 447 bp, Zea mays
agatgaggtccaatccttaacgaaatatcctatgtacctgagtttgtctcttgatcaaagaatccgtccccgccatcgttttctggtttccttgaagaaagctccaaagggcccatttcctctgagctcctttgtgcccacagatgagcgtttttgccagaggtgggctgggactagcttggaggcataccatacattcagacagaggttgctgctaacaagtttcacagagaagtctggaaggaaaacactagtctcaagacggtagatgcctaggtggtgggagtttgtttctcttgagcccacgctcctcctaacagtaagatgatctctttctgattttagagtttgtttggtagcagtctgcatacgcatagtactgattagtgattagttcacagttctcaggaaatgggcttggttgctgacttggtacttgatgttcac

SEQ ID NO: 1866 - DNA, 747 bp, Zea mays
  misc_feature (461)..(463): n is a, c, g, or t
  misc_feature (478)..(664): n is a, c, g, or t
  misc_feature (672)..(741): n is a, c, g, or t
attttgaagcccaagtctttcagcaacagaaggatgaagtctcttttcacctcatagtcctagccaaagtcatcacaattgcaaggtaagacagctcaaactgaaagaagcatggttagaattaaggctcacttttctcagggatatgtagtaatctgctgtgcttgttaatgcaatcaatgcagcttcttggaatggtgcaggagctgaatctgttaattttatgtggatatttctaatagctgaggcgatgcttgctgctgcacaagcccaaccgagtctccaacctaatcagtccagacaggtagtttgtcaagtgtcatctcacaagtcttgctatttctatagctggttgtgtcactacaaactgtgcagcaaattctgagttgtgctcaccagtcacactgtaagtttttgacagtgaggatgtgatgatggtcctctcttgcatccctggaagnnnagccagtgagatatnnnnnnnnnnnnnnnnnnnnnnnnnnnnnnnnnnnnnnnnnnnnnnnnnnnnnnnnnnnnnnnnnnnnnnnnnnnnnnnnnnnnnnnnnnnnnnnnnnnnnnnnnnnnnnnnnnnnnnnnnnnnnnnnnnnnnnnnnnnnnnnnnnnnnnnnnnnnnnnnnnnnnnnnnnnnnnnnnnnnnnnnnnncccccccnnnnnnnnnnnnnnnnnnnnnnnnnnnnnnnnnnnnnnnnnnnnnnnnnnnnnnnnnnnnnnnnnnnnnncccccc

SEQ ID NO: 1867 - DNA, 344 bp, Zea mays
cggcagagggacggcgggcagagcgacgacgggcaggcggtcggggccgagctgtgcccgacggtggcgttcgaggggcgtctcgttgctgcttagggaagaaggttggaaatcgatctcagtgcgtggctccggcgttggagatgtaccagtgtccgctggcgtctcaggcagccgcgtgctcgctcgggctccgaacagccaaatctccggtgagggtggaggcgagccttcacatgcctgcacgatggagatgtgcccgcttgcgtcgaagttggagatgcagcaagccgaagtcaaagttcagactccggggaggagcgcgtggctgagatgaagccaac

SEQ ID NO: 1868 - DNA, 1013 bp, Zea mays
gcgcgctgcggcgcgcggtgatggagttcacatctaagaagacggcttcgcttgccctcctctgcctctagctctcctgcctcctcctccttcttcttcttccccggtcttcctctgctgcgcctctgtccagtaagcacacaccagtcatccgtcgtccttgcgttcttcttcttcgttggctagcctatgtatctgtctgtctatctataccatgctttctctcactagctacctgctgtcctgttgtgtttcgcaggaagcctgtcgctgacgaggaaccgcctgcagcccgcggatgaccctgctccggaggttcccgctcccgcccagcaggtcggtcgcgctcgctcgctcgctcgatctctttctcgtcctgcggcttggtagatttcgtcgcgtatccacaccacaacaactgcgcacaaaaagcttgtgcttgggggcaggggggcactccactcacatgcactgttagctaggtagctgggcatgcagtgcagggctgcactgcaggccggccatagtgcaggtcacatgcatggccactcgcacacacagttgcaaacttgcaattcgcgtgccccaccccactcacgagtcacgacacctttcccgccacaaaggcaaaaataaaggtttgtgcgtgcaacaacacaatcgtgtcaactttacactacttgcacgctagctgtccgtcagttgactgctcgtcgatgtcatcatcaagtctttttgtaaatatctgacgcacacgcacgcactactaccaataacgaacccagctaatctttactaattgtctgtgtacgtcgtcgtctctgtacttaattacttatacagggtgcggatgcgggtgctggtgctggtgcggtgggagctcgagaccccggcggcgaggtggcggcgaggatggacatcgaggtcaacgactaccctgggtccggtgccaacaaccgccatgaaccgaggagccctgggaggccatgaccatgaggttgaagctagcccat

SEQ ID NO: 1869 - DNA, 380 bp, Zea mays
gtgatagtactcatgcatgttagaaggatcttgatatggtcccctatcccactcctccctgcaccatatgatccaacatcacctccctccgtcaccatgactgtcatcgtctccatgatgacctacactagggtcgattgtgctatcatcactgtctttatcctcttcttcttcgatttgatcggtgaatttgactctttttccttttctttctgatggactaagtcttgtcttccgcatgctaaggtgggggtcgccaactgtttcatcggtccatgctttcacttcctctgtgtctccttgttcgtgtacaagtgatgtaaacaatatgctagaaagaggagtgtcactgttaggtgagtcttcgtccaatgttgaag

SEQ ID NO: 1870 - DNA, 361 bp, Zea mays
gctgcacttgtgatggcagaagttgtgacagtttgtttcccctgaaaattgtagatttgcatctgatttcctgtccaacagctaggtccctttcagagaagagagttgcttgttttgattcccacatccggaatctgaagttcagagatgtctccaaacaaccagaagatatggacgtaagcaactaccaaagatcattcttattggagatattcagcgcaaagcccacccaccaaataatcctgatgttcttctttccctagctgttgcagagaggtcggaactgtttggggctttcactagccaattaaaatattaagtagcaagctgagtaccatgtcagtattaaatctgtctctgt

SEQ ID NO: 1871 - DNA, 415 bp, Zea mays
ttttattttttttagcatttaggaaaaatgaacacctaacttgaatagggtaatagctccaaacatatcagaaaggtgctgtatgcagcatatggcatgactgtaaaacttagctgactgtaaatgcagctgaaacatttatgtggtggtatggttaaccttagtatgtgagtcctgcagaatcatgaagttctcttctggcagtggagtgaatcaggtgtacatggaactagcctatttgtttgactttaatctgtactggcttctagtgttattacaatgtttttgtctctatgaattacagctgcaacagtcaaaacagacagttttaatccgaagcgaaaaggtaagtcgagactgataccccatgaagagaaaactagaaaaggtctcacctttaggaaaaataaatgtg

SEQ ID NO: 1872 - DNA, 247 bp, Zea mays
  misc_feature (13)..(13): n is a, c, g, or t
gaaccctctcctngccatcccacctctccccagacgcgcgctgcgggtgctggctcggcgggtgcggcgacatctgctcctgcgccgagggtgttcgacggaatgacgcataatgagagaggtagccagcggttcttctctgactgtacttttttccccattatcgaaattgatgatttgatgtgctatagtagtgtcagtgctacgtagggctggactggactgaaaatatgccctgctgctgcat

SEQ ID NO: 1873 - DNA, 388 bp, Zea mays
tctatattgacaggcctgcgtacgtacataaaggtggtctgatcgtaaatttggtggggctttctcttccttccaccgtctcgagccgtttcttgagaacaggtacctcgtcgacactcgcattcctacagcttcgtgcctccagttcattgtgtcactgcctgtcgtaatcccttcttgttagcagcagcactagtagctatggcctacggagtactactgctgctgttctccacgatgatctttatgaaaaaggagatacaactgtttcagcgtgtgtgtgtttcaagatgaagatggttgtgtttcaccggtgcaaaacatttcggttgcacagtcgctctctcatataagtgaaactgttaaagaagtccaagtaccaagtctc

SEQ ID NO: 1874 - DNA, 358 bp, Zea mays
acatttctaggttgtaagaaaaatggatattggcccatttgactaaatgattttggtgttttatgatcgacataatctgtggactaatgtatttgctagtgtttatgtttgtagttcacaggatgtgaagaggattcaactgaggctctgaggatgtaacacctcaaaagaagacctaaaagatgcgtagaagtctaagactcaagaccaaaagatgcccaagaaaatagtgaagaaatacatgaagtgggtaatcggctagcgctctggtggcgcatcagacatattcggtgtgtaccgaatagtctgtgcagagaggtccacaaactggactctcggttgttgtagcactagattg

SEQ ID NO: 1875 - DNA, 249 bp, Zea mays
aggtggaggaggccaaggccttggtcaggccgctgctggacgaggtgatggtcctggacttcgtcgtcggagatgctccaacgcccgcgagcctctgattacaggctgcagggtctcagtttcgggattctgagtgtgttgttgatgtcggaataatggatagatggactccctggtcctggtcctgcagcttttcaacttgtgatttgtgaaattgggaatgacagtgcaatgaataagaattgcttc

SEQ ID NO: 1876 - DNA, 365 bp, Zea mays
gagtgggtgatgacggagctagtccggcatccacgcatcctgaagaaggcgcaggacgaggtgcggcgtgtggtcggtggcaagggccgcgtggaggagtcggacgtcggcgagctccactacatgcgcgccatcatcaaggagaccttccggctgcacccggccgtgccgctgctggtgccgcgggagtccgtggcggcctgcacgctcggcggctaccacatcccggccaagacccgcgtgttcatcaacaccttcgccatgggccgggacccggagatctgggacaacccgctggagtaccggccggagcggttcgagaacggcggcggcggcgagatcgacctcaaggacccggactacaa

SEQ ID NO: 1877 - DNA, 509 bp, Zea mays
gatacgcacctcctccagagtaagaattttctctgcttcccggttaggaagaaacaacattctgatttaatctgtattttttccaaacaaattgacatatctaggagcatttgttgcagcttttgagctctaattatttaaagttcaaacaactcaatctatttgattttaattgtaattacaacgcagtagtattgttctattgtcttattgtgagtggttcatggttcaaacttttttgacgccttaaaaaatttatatctccaactttttctttggtgcaaaatttggcccagtacagacaaaagcttttatgacatggtttagtagccatctgtttggtaaatatttgttatttccatgtatggtaaccgatttctccaaagggatacatttgtagaactaatcatttactcttgatggtttgtaggcatttcgtttgttactcatccatcggacatgcatttggtcccaaaaaaagggtcaagctcctatcactgttcatcatt

SEQ ID NO: 1878 - DNA, 347 bp, Zea mays
agtgggcggcagccggcattgaagatgatttcctgccactggaggacagaaccatgcagcatggggagcagcagcagacaacgaaaaattaagcaaatctccaataaaaatgagagaggatcttgaaagaagaagaaagggagagaaggcggctgcatgaactagtcctcagactagaagagggttaccctagggcatcctaatgtgggtagcatgcagggatgggcaagcatacgccaacccatttttttcctttacttcttattttgttgcctttattacttcgtattgatcttctataactagcttgttcatcgacctcgattaactagggtcacatgttccaa

SEQ ID NO: 1879 - DNA, 266 bp, Zea mays
atgataatagagaaaaagcaagcaggagggatgggcgagtgagatgcttcgttcacgtttcagtgatggttgaagctggtgccattggggatgcccagacgcgcttcgttcacgttccagcgatggttgaagctggtgccattggtgatgcccagacacgagcgtgtgcagcctggttgacgtcagacgagccaggcacgctggacgggcctaaggcgttcgacgaaatacctccccaagagtgcgacgtgtgccagaccgacata

SEQ ID NO: 1880 - DNA, 1064 bp, Zea mays
  misc_feature (999)..(1001): n is a, c, g, or t
gtcgcgctccggtctccagctgacgaagcaggtaacgaccattcttccccgcctccgccgccactcgtgttaggttgctcacgtgatctcgctgttgggagttagagctgtctcttcttgcttgagtctcctctcatctgcggggacctcggagccttccctcgcccgcccaccttcgtgattcttcgcacccgaaccttggctttgctcttgctcctctggttgctggggtttctggggaccggcttgcttctagagctgaatcacactcacctcgagtataaaaccagccgccttcggatcttctcccccttcttctcgcggggggttcttcgccatttcggagttgcaaattgcaatcccacctgggatttctgtcggctgcttaggtttctccgcgtcgcgagctttgatgagaggttattcccgcatttagtggagctggttctcatctgctcctcgcctccctcattactgtctctactgaatcctatttcagggtctcgtttgctttttttttttgtctcgcaaccttttagggactatttgttgctggtatactctgttcagcatcattacttgaaccagatttgcaattagcgctgcattggcaactacgctgccgagcatgttacttcttttatcagcagctgacgcagtgacgcctgactggctgtaaaatctgtatctggtttaccaggatgcactgtgacgcgctggcccatggtgagcttctgatgccaattaggactaaacatgcttcctcgctgcgctcaagtgggagaacaagaaatcagcctagacactagtcatctgctgcaagcagaaaatggtatagcacagtgctcctggactacatttcacctgtgcccaatacttgctggtagcagcaattcctgatcattagaaatcgtgtttgcgcctgcagcacccttattcacttaagagttccaagggagcaccaattctgccacggccagtcttcgttttcttcatcgnnncatttggtttctatgtatgctatctctccttcaatcagataacgctagagaacaacagagagg

SEQ ID NO: 1881 - DNA, 369 bp, Zea mays
atgttgcttgctaccctgtggtcatgctttccgattttctagtggcaggagctttgccttgcattcaagtagggggaaacataatgcttgattagaattgatatatccgggctgcaaaacgagctattgctggcttgccacaaaacatgaagcagttatctggacatggtgtgtttgatgtcgtgtgcgttacgtgcattagctaactggacaggcctgcaatgtaagacaaggtaccatttcatcagaatcaaacactccacataatttgacatgatcaaggcattagtaattagatgcccatatctttatggcttgcattattgtctcatagagggacgtttctctattattgtttgtaatttggta

SEQ ID NO: 1882 - DNA, 148 bp, Zea mays
catccccacgaaaagccgagggttggactcactccaccggaagcgtgtgtacgcacggacccctcggccctcgcccccgcacggccatggcagccgccgtctccccctcatcctcgcccctgtccacaaaccctatgtagcacaggag

SEQ ID NO: 1883 - DNA, 523 bp, Zea mays
ttgcctggagagatcgttcttgcttcgcttgacggatttggtacgttgctgttactaacacttgtatcataaggccaagtgcccgtgtggcattactcgtttgtcatttcaccctagcacatgctctgtggataggtggctgaatgctttgcattctgcttgccaccgtggttttggtttatgcacccaactttcgctgacattgtcttccttcgttgtcgccgacgccataaacagggaagatctgcgacgccgtggaggtggccggaaagaacgttttgtccacgtcgtcaactgtgacgaccggtctagtatctcacaggtacggagacaaagccgccgccgcaacgaacgaagggctggacgccgccgggcacgccatcgggacggcatgggccgtgttcaagatccggcaggccttgaaccccaagagcgtcctcaaacccacggcgctggccacgtccaccatcagggccaacgtcgccgagcttcgcgcgatgcacggcagcagcaagtagctcgc

SEQ ID NO: 1884 - DNA, 320 bp, Zea mays
cagacgtcgcagcggtggctccggcttcctgctgatgcgtgaatgcgacgacgaggcaaggaaacggatgcgacgatgatggtgagcttttgcagtgctcccagcatgagctcgcgggcgcttgctggttgttgccggcgacttggggaagtcttcccgtgcgacggaggcacctaggcgcgcgacagagatctgcgcgatgtggtaaatgacggcgggacgcaaggcagtgcggcgcggatggctgtcgagtagcgaaaagttagagggctgcgaggcgtggggagcggggcacagatttgaaggacgacggttgcaaa

SEQ ID NO: 1885 - DNA, 403 bp, Zea mays
atgatgatgatgtgcatgcagtcaccctgcccgagccagtgaagctgcggcggacggcggcggcggagcatgccccgctgtccgagttccaggaggagctggtgcagctcgccgcggtgctcaacggcgaccacaccaaggagtcgtacccgcaagggctcgtcgagggcatgacggtggcggaggcggccaggtactgcgtcgacgccttcaaggccttcttggacgagtgcgagaaatgcaaggaccgcggcggcgaggacggctcccacatccccacggtgaagccgacgacgacggggaaggagaaggacaagagcaagagcagcttcgcttccaagtcgctgtcctgccttccctgctgtgtccgtccctcttcctcgtgacctccctctccttctac

SEQ ID NO: 1886 - DNA, 471 bp, Zea mays
caggtcctgcgcgacgtccaccgcctcggctccgggcgggacctcatcgcggcgaggaaggcgtcggccgtcgtcgacttcgccggagaccaggtggtgggttcatccggtgcgcgtgtgtgcgcgccgccgtggaacgatccgatccgatccgatccacccaccgatcgccaaccgccgattactattgtctgtctcgctttttttttctctgatggaaaatctggaaacgttggtgcaggtcgtcgcttacttcttgatatcgggcatgtccgcggcggcgccggtgacggactacatgcgccaggcggcggacaacctgttcacggactcggcggcggcggcgatcagcatggccttcttcgcgttcgtggccattggcctctctgctctcgtctccgggtacaacctctccatggaggctcttgtatagcctgtgaatcacaactctaccatctcatgtgtgatgtg

SEQ ID NO: 1887 - DNA, 484 bp, Zea mays
  misc_feature (382)..(389): n is a, c, g, or t
  misc_feature (394)..(408): n is a, c, g, or t
  misc_feature (414)..(420): n is a, c, g, or t
  misc_feature (439)..(439): n is a, c, g, or t
  misc_feature (441)..(441): n is a, c, g, or t
  misc_feature (448)..(458): n is a, c, g, or t
  misc_feature (475)..(477): n is a, c, g, or t
acatccctcacgaaacacctcctgtcaatctgcacattcttctcggcaacacacaacgacaccgccccgaccacaacacaagtcacaaatacagctccacccagaacgctgttcagcccaacatcaccagcaccgctccccataaacgccgcaatgctagcaaacacgtcaggggctccattaccaaaggggagcagcgtcacgccagccaaggtcggcgggagccgcaacagtgccgacatcttctcaaggctgcagcagaagtagtcggcagcagtattgcccagcatatagaacagcgcggccaggcataccccgagcaccgcgtagcccagcaccctgaacctctcgcatctgcagtagaagaagcctaggtagtcgnnnnnnnnaatcnnnnnnnnnnnnnnncctaannnnnnngcagagaaaattcttactntngaggagnnnnnnnnnnnttctgcacctctgagcnnncgcttct

SEQ ID NO: 1888 - DNA, 478 bp, Zea mays
  misc_feature (470)..(473): n is a, c, g, or t
gctctccatgatgctcagatggaccacttgaaaatgctaaagcttcctgtctcagtcccacatgcatcagactactctgccgtcaacatcttcgtccttgtcgatccatcgctgcacgtcttcctccatgcctcagtagtgtccagacatgggcgcggtgctcctctgtacgtctggctccagggttagtacattcctcctctaatacttgctttccccttctccacacctcctattcatatcagggatccctagatctgaaatttctccaactctatcttcctcgttgctaaaaatctttgcttctgcctaccaccagccaccatggtcatgacagtgtttggtgtggtactgttgctgggtgtgccctagacctcgtcagtggtggatttggaccctgggcctgagttatgccccgatgcatggtgcctttagagagggggagagggtctagatatctaccgttcgtnnnncatat

SEQ ID NO: 1889 - DNA, 429 bp, Zea mays
  misc_feature (73)..(74): n is a, c, g, or t
ctacagcctcgccgacatctcctaccacgtcgtcaagctggtagctagctagctagctttgccgacaccaccnncgcgcgcgcgcgcgcgcgttacatgaatgtttaatttgctgccatgcatgcataatgcagggcatccggccggacatcccgaggtgctgcccgcgggcgctggtggagatcatgacgcggtgttgggacggcaacccggacaaccggccggagatgtcggaggtggtggcgctgctggagaagatcgacaccagcagcggcaagggcggcatgacgcccgtcgacgacgtcgcgcaggggtgctcctgcttcggcttcaaccaccgcagcgtcgcctaggctagctcccgtcagctgacaccgcagttattaagttattattaataataattaagctacatacacacgtactacc

SEQ ID NO: 1890 - DNA, 207 bp, Zea mays
gcgccgatgaacgcaagcagcggtgccctggacagagcaaacgagggatagaagcggtgtgcatctaatgggaaggagaacgtatgatttatagcagggttaattttggctatggagatagggcttatccgtcgtggtgacaggaacaaatatatgcgcttcgcctgtgatgcaagaaggtgatttataacgggattagttctgcca

SEQ ID NO: 1891 - DNA, 461 bp, Zea mays
tcaacggtctggctgaagtgagtttttttttaatctgttgtccttccatcctaattaatgaatcttgcattgaggtgaggtggtgatgatcgtcgtcctcttctgttttgcaggattcctacctttggcagtggcgacaccgcagcctgccggacacatgtatacgaaaaggagtgcgacggtgtcgttccaaggcttgtttccgaaagggtcgatccatcggaactggcctcgatgcttcaagggaacaaggtggtggatgcgttcgtctcggtggaaacattcgaccactaccaaagcgctggcattcggttggttgccaataggctggatgtgcacttcaaaaggcaacagcaggcctagctagttccttatggtgctctccggtcaggccgaggctggattgaaggggattgacccatccaattctcctgtgattctcttgttaccgaatcgatcca

SEQ ID NO: 1892 - DNA, 402 bp, Zea mays
gtttgtaccataaatcttccgatccttgagagattttccatatccatttaaccaacaagcattcattcatcactcgagtatcaataatacctagacccccttggtcctttggcctggtcaacatctcccacctcaccatgtggtatttcttcttatcctctgcaccttgccagaagaaattcgccctaatagcatccattttctgatgaatattcttgggcaaaaggtggaaccccgtcatatacaatggcaggctacttaggcaagagttagttaaaataagccttcagcagagagatacttacccttccatggatctaatctttttttccatttttttccaaaataggaagaaactccgatgaattaagatgtccatccgaaataggaatccctaggtac

SEQ ID NO: 1893 - DNA, 285 bp, Zea mays
ggaggagcggtggatgaagctgtgaaggggaaggaaggcaaggcaggggagattgcggtttgaaattgaattgggtagagttttgagctgcggagtgcggatggggattttggggagggcgagcgactgctgtctgtctctgtgtccgtgcttgattttttttatgtgtgatgaggagagttattaataaatggtttggcatatatacttacgtaaatgctactgacacagcggtagtgtacacagcctgtgcgagttttctagtatgaaagtcgtttagggctt

SEQ ID NO: 1894 - DNA, 673 bp, Zea mays
tgatttgtatttgcttcctgtgagtaccacacaagattcggtgttgtagtctctgccagtgctttaattcacgccacttagctgtctatgttttatctcatgctttattgtgccttttttgtgtgttttatgcctttgttccttaaacagctgtcttactgagggtaattaccagttgtggttcagaaggtacagggaagggaaaaataaagcgctcggtaagaaagtacctgtttgagtagtaattctggttattctcaaaatgtggctttcacaggagttgcactattatttgcaatttgtatgctgcgattgtatgtttcagtgtagttggattttgctgtgaaggcctgaacaatgttcttgttgttgaacttttgaaatgtaaatggtggcaggttatagagcttgcggagaaggaacatattgagtggcgcgaagagaactctggaactgtagcccttcgacttggtgggccaagagagtatcggttccttgagcatgaaagcgattctgaccaagtggggaactttaacatagattaacttttgatctaatctatgtattctcgtattgatgtgttatagttatggatgctgcctaggttgcggtgtaggctgtagttctgacacagaagctcggtattgtagttgggtaaattatggtgtgatgt

SEQ ID NO: 1895 - DNA, 650 bp, Zea mays
gctgacggaaacagggccaaaaagatccccatccaggagctcccctgcatcggcacacctcctattgtctgctggtaattccacttcgtcctatttccttctattcatatagtttgagtctttgacaatatatgtcaggaccttgattgggaaatcataaagtacttctgaacactattgccactccctgcataaatgcaactacacatgcgaggctagaaaaaagtaaaatacgtgtggagcatccgagcatgtaactttatacatgtatatggtaacgatggtaccacttgtactgataaatgagtcaaacttttctaatctacagaataattatgaggaatatttgaagttggatacaagagttgagttcctgcatacaactcagatgtgtaattttagtagaatgtattcgttaattgtgcttactattattgattgcagatcagagctacggcctccctcgacctccctgaatttctctgtgatgaactatggttgcaagcattaaatttgtagatgtatgatcgaccgaatagatgtattctctattatatgccttgtgatgttgatctagatgaatggcaacttgtgtattcatttgtaggtgtatgatggacgaaagttgtctcggccttgtgatgttgtag

SEQ ID NO: 1896 - DNA, 924 bp, Zea mays
ttgctcggcgtcgcactagaacacgcaggagacagcatattttgaaacgtgagtaaactttggtccctgtgtttcccttcaatggtagtcatttgccataatccagagctgtggaaatgattaaaacttcgaaagggtatgggttcaaaattttcattgttttttatataaacttgagtacttgctgggcctgtttggtaggctgcacgagtgctgggcctggctgacgggcttcagcttctcgtgtttggtaggttcgagagcctcgaggtctaggctgagactgcttaaagcagtcaaaagcctgcaccgaggaaacggaaatgaagttcgttttatgaacttgttaaaaactgatgcgacctttgttttatgaacttgttaaacactgatgcgagaatgatcaacaattctgtattgatgcatgcattgtgctgtacctaatttgttcgaagcgaaccaaactcaccaacgaaattgtgctttctacaggttagctgaacagtagtaatatacaaagacgatagatcggtgctcatttgcaaacattaaagcttccggagatggtggagaatcagagatgggatgaaggagcctgcacgtcatcctctttaaatcacgaggtccatctgctgttctgaactttgtagggtaggaaaattaagtatgtactccctctagtcgcagaaacttgtcatttaggacagatatggtcaaacctttaaaagtgcaagtatttacattatttactttggaaccatgtaggtctaatgtcgatctgcattcgagattcatgcaaaatctcttatatcggaagggttttaagaatatattctagaatagtggtaaaaacatgcactgaagatcgtgcaaaatcaaatgtgtcaagttgtgaccagatggagtgtacatgtttaacataaa

SEQ ID NO: 1897 - DNA, 439 bp, Zea mays
catgactttttttagtatgaaaacaaagagttccggcttttgcatcaaatgcgcacaaccattacacgtcaattattaactcaatgaacaggtgcttgaataatgaagctaacttgatggaactaaatatcgtgactatggataacactagccacactcaagtcttgcatttgatcaccatccatgattcacaaagacttccatcgccaccacttcaaaggcttgacacacatcgagaatttgttgatgtgtttctttcttctataggagtctccagaacctgaaccaatgagtacctctgaaaatgacctgcacaattgatggtattggtttgtgattaaaagccacctcatttcaattaagccaaatagaccaaaataaagctgatgttccagtaagaagtaattttttgtatcccagatcacaattacttgccaag

SEQ ID NO: 1898 - DNA, 809 bp, Zea mays
  misc_feature (730)..(743): n is a, c, g, or t
  misc_feature (761)..(787): n is a, c, g, or t
gcagaagttacagaacaatgtcccaggggtcgagaaagtaagagcataggctcaacaattacagatgttactactcatgacacacatagttgttgtctgaatactatgaatgaattggcccttgttaggaagcaacttcaagagatggagaggaagcaagaaattttttttgatttgttgcaggtaactgtcatgctttgagttgtgaagatatcgtcaatttgatttgtgtctatatttacctaattatgagtcgtatatatatcgatcaatgtggtaatagtgtaagttataatgcaaggctaataactccagctatatggatgcataataccatttcaaattagttgcagttcttcattgtgcactttatgttcttatgctagcatacaatattgttaagcttcttggttatttacatggttcttaagacggtaaggcgccggaccaccgcctagacgcctaggcgacgcctaaggcgagcaaggcgacgccttatcaacctgagaatcagcaaaacaacccatggaggaggaagaaaaagaaaaaaagaaaaagaaaaaaggagaaggaaggggtaggaggcccagcccaccagccagcccatataatccttcctctggcaaccctaggttgcctctctcccccacgattcagctaccgctgcccctgattgagccgccgccgccgatttggacgctgccgccaacgattcagccttcgccgcccnnnnnnnnnnnnnngccgctcccgattcgacnnnnnnnnnnnnnnnnnnnnnnnnnnntttcccttcccctctgccctat

SEQ ID NO: 1899 - DNA, 350 bp, Zea mays
tctctggagcagctcagcgtgctgtcggaggagtccgtctccattgacgagacgctcagctcgaacgcatccggtgtgtatgctggatactatcttcaaatcctccacttcattatttcatttatacttgctaggtaatgagcacgggtgtgactagggtatggcatcacattagtctttagggggttatatcatgtgtgttgattgggggtcgagcacaatgaggttatgtcatatattcacgatatactttagatttctatgaattttcagaatccttctgagtctctggttggattgtggaaaacgtgcacaatcttagcttgctggaactggaattgcttcttgac

SEQ ID NO: 1900 - DNA, 618 bp, Zea mays
ctaccggggaggtacgtaaaacgcgcgcccgcgcgcatcgcaaaccaaaccgtgttttcttggttcttccgggcgcacccaaaacctgacgttttcgcccgcggcacagcggctgcattgcgacggctcgagacagcggagcccatggacaccgcgcagggcttgcgggagaaggcggacgtgaacaaggtaaaaatacaaagacgcccgccgccgtgctgcggtgcgggctagggtcaaggaaaggcggctcttttttctgatggtctctttcctggcccggggtttttcgattctccggctcgatcttccggcgtgcagggcgcggaggaggacctgagcacgacagggttcggcgccgagtcggagagggaggtgccgacgggaccggaccccatccaccaccacgcccgggggccaaggcggcagtcgccttgatcgtcatgcgcgcgcgacacggcggcggaggatcctcgcttcctggaagtttgtggtcttgatcaggcgggcgtgaaccggattccacgatgatcctgctctttctttgttcttaattgtatctgccatgcacctttggttctaattccattgttgtagtagggaagcagcatccaccta

SEQ ID NO: 1901 - DNA, 399 bp, Zea mays
  misc_feature (251)..(355): n is a, c, g, or t
  misc_feature (363)..(394): n is a, c, g, or t
agtgctactccagtattctgcaaagccagggcaagctatccaacctttcttttgtgggaaggtttttacagaacggaattgggtcaaagagactgtattaggctttgtagttttgataaccctggtattgaccacatccatcttagctgacaaattggtagggtctgaggtaagttttccatcgagcatattgattcctctcatgctgcgcattaaggttgctctactacactacaatagctttttttttnnnnnnnnnnnnnnnnnnnnnnnnnnnnnnnnnnnnnnnnnnnnnnnnnnnnnnnnnnnnnnnnnnnnnnnnnnnnnnnnnnnnnnnnnnnnnnnnnnnnnnnnngggggttnnnnnnnnnnnnnnnnnnnnnnnnnnnnnnnnaaaaa

SEQ ID NO: 1902 - DNA, 417 bp, Zea mays
  misc_feature (409)..(411): n is a, c, g, or t
tgatggacccggacgagatcatggtgcctctggacgacgggcggacggcgccgccgacgtcgacgattttctcgaccacgaccacgacgtcctactctgcagcctccgactccgtgtcgtcgtccttgagccgcgacgaggacccgctgttcccgctcatggacttggagttccccgacatcgcgttccagatggggctactagacgacatggtcgcgtcgtgggacgactccttggcgcagcagccgctgtcgccatcccctgtctacgacgacgactatgcaaaccagctgcagatcaggagcggcgttgcgtttgaccaggagccagggaacaagattgtgctcttctctagctattaggcagttaacccctttaataaatgagatatgcacctccttacaccttnnnggtcac

SEQ ID NO: 1903 - DNA, 429 bp, Zea mays
ttcaaaacgttgttttcatatgctcataaagttacacgaaattatctgccataccattattcctttcctattaagccgatgtagctccctccccgttcaaggcatccacgccgactgcaatatcgtggccacacgttttcatcttcgttgcacgcgtggcaagtccggcatcctaccttcctagggaaaaaaaagctgaaaaatccaactccgcagtactgtcttacttatcttcgctacactacatctggatgctgcttcttatcttcgctacacaagcatgtctccaactccgcagtgctgtcttggaaaaaaggggtctgtaccttctctcaccccgacggcgcttcctacttcctagggcgaccgcggcggcgccacatgcttcgccagcgtcggtcttcccgtcgtcatttctacttcttctgc

SEQ ID NO: 1904 - DNA, 429 bp, Zea mays
agcagatccagacggggccgactgcgcaacctgttcgaccggtcctgcaccgcctctcgatcgccgagcttggctctcgatcccgccgctggggcacggttgggggcttgactcacatttggtgctaaaaatttactattctagagcattttgcctcctcattcattaactcagattgttgagatggcaaaagatgatgtttattccgcctgaaatcttatttgcacaatacataggcatttttatggcatttctagcagctgaaacaataaatactgtttgtcggttcactgaagcatatatcgtttctaatttggtaattgagcctcacttagatgatggcatcaaatgtttgaccttgatgttctgctaggtaacattagttggttacttttatctggatcatgttcatcacggtagcatcatatg

SEQ ID NO: 1905 - DNA, 212 bp, Zea mays
gaccgtcgctcctgcgacctacctttctgctgcttccacatacacgctatctcctgctcgtcatggttgacacagatgctgctcgcctcgccagggagctacgagaaaaagcagcagctgacgcagaggccgaacgtgcacggcaagctgaaatcatattccatctttaaccaaatcattctattctaacagtttggttgagttctggtctc

SEQ ID NO: 1906 - DNA, 901 bp, Zea mays
  misc_feature (633)..(633): n is a, c, g, or t
cagttttctccacatcttatcttcagctcctctatcggtagctgttgcagagtgaagtacatgtgatgagttagcttggttagggtgagcaactctgagctgaaactttggcagttgaattcgagaatcggatggaaccaaatctgattgcaaaagcaagccaagacttggttttctccaatatctcatgttcagttggtcagatgatgtgtatgtgtactggtgcactgcagcttggacatgacttgtctgaagaatttgaagctgaaggtgagtgttggagggaaccaaatctccagctgcatgcacagcacaaggtttggttacctccaatgtctcatcttcaactgtctcaaatcaatgcaactttgcaggcattttcaggatcattatccttatccttcacagagtgaccaaatacagtattttcagttaaccaaatagtgagctacaattgattggaagctaatggtatctgagttgatgagttgctccatatcttgttatacaattgattggaagctacaagcaagataggtgatatcactatctggaatatgtaaatggtgtggacaaataaaatatgagaactatgattgaaaacataatattattaattatccactatatgcnccacatcaattttgtaaacatatttatacaccgattagaatgttttgatttttttttgtatttttggacacttttttttgtttatttccactgttgctcgccctctctaattgtcttctgttttagtgtttaccaacactggtcggctcgagaaaaaaatctgggagaagaaaagaaaagggagagggcaatagtgtggactctggaggacggtgtggtgcttcagctttcatcatgctagatgctggtgttgccaatctaagcctca

SEQ ID NO: 1907 - DNA, 376 bp, Zea mays
gacatgtgtattcatgttttcgagtgatttggcactatgaatgcgctagatggttggttgctttttttttgttaattgctcaggtgatatatgctgtatttctagtcactagtgttgtattgtttgtgcttgtgctaagatgatctcttttgcacttgtaacaggggctcattcaagtactctactgatcgaaaatggatggcgtctgtgatggttcattcttttgcacgtcttctacacgggtacattgacggttgatggagatggatggtggtgtagctgttttgtttagcaattagcactctaggtgttggaccactgttttgttaatggatgctatgtaacagtagtatataactaatgtgaacttgtttag

SEQ ID NO: 1908 - DNA, 638 bp, Zea mays
tttttttcccgatgcgacaccactcaacctgatttatgatcccataaaacatttgcaaatccgcagctcgaattgctatcgaatgcggtgtcgccggcattatcgtgtccaaccacgggggccgccagctagactatcttcctgcaaccatcagctgcctggaagaggtatgcaaatcaatcacagcacagctgcctaggacacctctggtccatggcctgatgctaacttaccttggaaaggggaaacttcaggttgtgagagaagcgaagggccgccgtgtgcctgtgttcctcgacggcggcatccgccgtggcactgacgtgttcaaggccttggcgctgggagcctcaggagtgtttgtaagtctgcaggagcatttgtttgttgtacatgtactgcgtcatgcatattcatgcttgtcctctgtcagattggaaggcccgtactgttcgccctcgccgtggacggcagggcaggggtgaggaatgcgctgcggatgctgagggatgagctcgagatcaccatggcgctgagcggctgcgcgtcgctgaaagatatcacccgcgatcgcgttatcaccgagagcgacatgatccgtcgctctcggatgtaggcttcgattcgtttgctgttgt

SEQ ID NO: 1909 - DNA, 1469 bp, Zea mays
  misc_feature (398)..(399): n is a, c, g, or t
  misc_feature (454)..(454): n is a, c, g, or t
  misc_feature (461)..(461): n is a, c, g, or t
  misc_feature (471)..(471): n is a, c, g, or t
  misc_feature (473)..(473): n is a, c, g, or t
  misc_feature (477)..(484): n is a, c, g, or t
  misc_feature (489)..(492): n is a, c, g, or t
  misc_feature (495)..(499): n is a, c, g, or t
  misc_feature (502)..(507): n is a, c, g, or t
  misc_feature (510)..(511): n is a, c, g, or t
  misc_feature (517)..(535): n is a, c, g, or t
  misc_feature (541)..(545): n is a, c, g, or t
  misc_feature (548)..(564): n is a, c, g, or t
  misc_feature (568)..(572): n is a, c, g, or t
  misc_feature (574)..(580): n is a, c, g, or t
  misc_feature (582)..(590): n is a, c, g, or t
  misc_feature (592)..(594): n is a, c, g, or t
  misc_feature (597)..(597): n is a, c, g, or t
  misc_feature (599)..(599): n is a, c, g, or t
  misc_feature (602)..(602): n is a, c, g, or t
  misc_feature (605)..(622): n is a, c, g, or t
  misc_feature (629)..(642): n is a, c, g, or t
  misc_feature (649)..(657): n is a, c, g, or t
  misc_feature (663)..(668): n is a, c, g, or t
  misc_feature (670)..(670): n is a, c, g, or t
  misc_feature (672)..(678): n is a, c, g, or t
  misc_feature (680)..(685): n is a, c, g, or t
  misc_feature (688)..(700): n is a, c, g, or t
  misc_feature (702)..(706): n is a, c, g, or t
  misc_feature (709)..(709): n is a, c, g, or t
  misc_feature (713)..(726): n is a, c, g, or t
  misc_feature (728)..(734): n is a, c, g, or t
  misc_feature (744)..(744): n is a, c, g, or t
  misc_feature (750)..(756): n is a, c, g, or t
  misc_feature (758)..(760): n is a, c, g, or t
  misc_feature (764)..(770): n is a, c, g, or t
  misc_feature (774)..(776): n is a, c, g, or t
  misc_feature (779)..(780): n is a, c, g, or t
  misc_feature (791)..(794): n is a, c, g, or t
  misc_feature (805)..(805): n is a, c, g, or t
  misc_feature (807)..(814): n is a, c, g, or t
  misc_feature (818)..(819): n is a, c, g, or t
  misc_feature (827)..(828): n is a, c, g, or t
  misc_feature (830)..(846): n is a, c, g, or t
  misc_feature (848)..(856): n is a, c, g, or t
  misc_feature (862)..(864): n is a, c, g, or t
  misc_feature (877)..(879): n is a, c, g, or t
  misc_feature (881)..(893): n is a, c, g, or t
  misc_feature (899)..(901): n is a, c, g, or t
  misc_feature (909)..(916): n is a, c, g, or t
  misc_feature (919)..(924): n is a, c, g, or t
  misc_feature (927)..(927): n is a, c, g, or t
  misc_feature (929)..(933): n is a, c, g, or t
  misc_feature (935)..(937): n is a, c, g, or t
  misc_feature (939)..(943): n is a, c, g, or t
  misc_feature (945)..(945): n is a, c, g, or t
  misc_feature (949)..(960): n is a, c, g, or t
  misc_feature (963)..(968): n is a, c, g, or t
  misc_feature (970)..(972): n is a, c, g, or t
  misc_feature (974)..(985): n is a, c, g, or t
  misc_feature (988)..(1006): n is a, c, g, or t
  misc_feature (1010)..(1013): n is a, c, g, or t
  misc_feature (1015)..(1017): n is a, c, g, or t
  misc_feature (1019)..(1019): n is a, c, g, or t
  misc_feature (1021)..(1026): n is a, c, g, or t
  misc_feature (1030)..(1049): n is a, c, g, or t
  misc_feature (1052)..(1057): n is a, c, g, or t
  misc_feature (1059)..(1068): n is a, c, g, or t
  misc_feature (1070)..(1073): n is a, c, g, or t
  misc_feature (1075)..(1082): n is a, c, g, or t
  misc_feature (1088)..(1096): n is a, c, g, or t
  misc_feature (1098)..(1106): n is a, c, g, or t
  misc_feature (1108)..(1112): n is a, c, g, or t
  misc_feature (1115)..(1121): n is a, c, g, or t
  misc_feature (1123)..(1130): n is a, c, g, or t
  misc_feature (1132)..(1135): n is a, c, g, or t
  misc_feature (1139)..(1156): n is a, c, g, or t
  misc_feature (1158)..(1160): n is a, c, g, or t
  misc_feature (1163)..(1174): n is a, c, g, or t
  misc_feature (1176)..(1187): n is a, c, g, or t
  misc_feature (1191)..(1193): n is a, c, g, or t
  misc_feature (1195)..(1198): n is a, c, g, or t
  misc_feature (1203)..(1210): n is a, c, g, or t
  misc_feature (1217)..(1218): n is a, c, g, or t
  misc_feature (1220)..(1220): n is a, c, g, or t
  misc_feature (1223)..(1225): n is a, c, g, or t
  misc_feature (1228)..(1228): n is a, c, g, or t
  misc_feature (1230)..(1230): n is a, c, g, or t
  misc_feature (1236)..(1238): n is a, c, g, or t
  misc_feature (1248)..(1250): n is a, c, g, or t
  misc_feature (1254)..(1258): n is a, c, g, or t
  misc_feature (1260)..(1263): n is a, c, g, or t
  misc_feature (1265)..(1268): n is a, c, g, or t
  misc_feature (1274)..(1274): n is a, c, g, or t
  misc_feature (1276)..(1276): n is a, c, g, or t
  misc_feature (1278)..(1283): n is a, c, g, or t
  misc_feature (1285)..(1285): n is a, c, g, or t
  misc_feature (1289)..(1297): n is a, c, g, or t
  misc_feature (1300)..(1300): n is a, c, g, or t
  misc_feature (1302)..(1313): n is a, c, g, or t
  misc_feature (1317)..(1323): n is a, c, g, or t
  misc_feature (1326)..(1334): n is a, c, g, or t
  misc_feature (1337)..(1352): n is a, c, g, or t
  misc_feature (1358)..(1368): n is a, c, g, or t
  misc_feature (1371)..(1381): n is a, c, g, or t
  misc_feature (1384)..(1390): n is a, c, g, or t
  misc_feature (1393)..(1403): n is a, c, g, or t
  misc_feature (1405)..(1419): n is a, c, g, or t
  misc_feature (1424)..(1426): n is a, c, g, or t
  misc_feature (1429)..(1436): n is a, c, g, or t
  misc_feature (1438)..(1441): n is a, c, g, or t
  misc_feature (1448)..(1448): n is a, c, g, or t
  misc_feature (1450)..(1453): n is a, c, g, or t
  misc_feature (1459)..(1462): n is a, c, g, or t
tcttccctcccggaacctgagggcaagggcgttgccgcccagccgtgccacccacgatcgggtgcgtagccatggccgtcgaagcgcatcgcctcctcttggcaggaggacacaggcagcagcaacagcagcagcagctcgccagcgcggggtggccttgggccggcgccgacgaagataggtgcgcgacgacggcgagaccgagccaacatcatcaccatcaacaacaacagcagcaacagcaggagttgaggctccacaacgcctcgtgcgtgggcgtcctggctccacgggtctcgacgatcgctgccggcggacagatgttcctgggcgacgcggcggagagcgacgtcacgttcggaggaggaggagctgtgctacagatgctggagtacttnnttgatatgatccaaatttgaggctttcattgtgatcatcacctgaggatgctacngatggtntcctgaccgnanggannnnnnnngatannnngtnnnnntgnnnnnnttnnactttnnnnnnnnnnnnnnnnnnncccccnnnnncannnnnnnnnnnnnnnnnctcnnnnnannnnnnncnnnnnnnnncnnnccntntancannnnnnnnnnnnnnnnnntcttacnnnnnnnnnnnnnnacgaccnnnnnnnnntacttnnnnnncngnnnnnnntnnnnnnctnnnnnnnnnnnnncnnnnnctnaccnnnnnnnnnnnnnngnnnnnnnctccccttcnctcctnnnnnnncnnntttnnnnnnntccnnnccnnccctttcccannnntcctccctccntnnnnnnnnctcnncctctacnncnnnnnnnnnnnnnnnnntnnnnnnnnnatcagnnncaatcttacccannnannnnnnnnnnnnnctcccnnnatgaaaannnnnnnncannnnnntanannnnncnnncnnnnntncaannnnnnnnnnnnacnnnnnnannncnnnnnnnnnnnnacnnnnnnnnnnnnnnnnnnntacnnnncnnncntnnnnnnaccnnnnnnnnnnnnnnnnnnnnttnnnnnntnnnnnnnnnncnnnntnnnnnnnnccctcnnnnnnnnntnnnnnnnnntnnnnntcnnnnnnncnnnnnnnncnnnnttcnnnnnnnnnnnnnnnnnntnnntcnnnnnnnnnnnngnnnnnnnnnnnncctnnntnnnncttannnnnnnntcccctnntntannnccncntcttcnnnttctacattnnncccnnnnncnnnnannnnctcctncncnnnnnntnttgnnnnnnnnnttncnnnnnnnnnnnntacnnnnnnnatnnnnnnnnntannnnnnnnnnnnnnnncttgannnnnnnnnnntannnnnnnnnnnaannnnnnnatnnnnnnnnnnntnnnnnnnnnnnnnnntcctnnntannnnnnnntnnnntcttcantnnnntccctnnnnccacata

SEQ ID NO: 1910 - DNA, 392 bp, Zea mays
gtgcggggccgtccaagcgcgcgaccacgtaggtcgactccgccagaccgccactccggcagtccggcctctgtgtcaccggaaacttgtcccgataagtataccccctccatgtcttgtgatctgaactgctgtttgcctgtttctcccttacgataagttacatccgtccacagcatttcatgaattgaatggtgtaagtggtaatctatggtgtctccatcggtggaggcgtgggagatccgagatccgactgaaggctgcaaacacgaataccattgctctcatcaattataaatcacaaatcgctatatattccatttctgcaaactgcaacgctaacagtttttgttccattcgattcttcattttctgctgagtcttgtcttatt

SEQ ID NO: 1911 - DNA, 373 bp, Zea mays
agtactatgtcaaactttttgtcggatatgttccgaggacagtgactaaagaagacgtgagcattacttccatgctactatcttgtcttcttgcgtagtgatttttatttttttctagcatcttttatttgaactttattctggatacgatttcatttgtacttatggtgtgttatcattgtttatcaccgtgcacaaaacaaactagaagcttctaactaagaccctgtttggatcctgtacggtccaaagttggctaaagttaaggactaagtgctcatgttcatattctagaatggcaagcaaatggtgcacggagagcattgacagctctagcgtcagtagcagattcatcacaggcgttgttcactta

SEQ ID NO: 1912 - DNA, 224 bp, Zea mays
tttcacagaaaccaatatcttgggtgttttttactggacaatcatagttagttgtgctcatcgtcgtgtacatgaaacaccgagtagtaagtcagctatgtttcacaaaacagatatcaaatcggaaccagtggtgagcgggtgtgtttcacaaagttaggtttgaatacaaggaccatgtttgttttacatttaaatcatattttacgactgcactaccatga

SEQ ID NO: 1913 - DNA, 249 bp, Zea mays
  misc_feature (7)..(7): n is a, c, g, or t
  misc_feature (21)..(21): n is a, c, g, or t
atgactngtgttccaaaaatnactgcattatcatatggaatggttcctgtcactgcataacttatctttcctgtggtctctttccgttgtttattctttgttgatgcatgggtttgagggtgttgtcttttcttttggaccttattgatctccacatccttcttaggacaaccattaacaagatggccggtatcaccacagccaaagcaagcacgacttgataagttacatggtggagttgtctttacg

SEQ ID NO: 1914 - DNA, 455 bp, Zea mays
cgccgtcatccctcgcgtcctcccacctctccccaatcgcggcggtgtccactcccgccgtcccacatcagcttcgcatcggctgctcccgccgccgcgccgggcgcatcgttgccatggctggatccggcaaggtgcgccgccgccgccgttctttaaccagccgtctttaatctgcccctgtgatttctgcgctcatgctcccgcttgactctcctttgcagttcttcgtcggaggcaactggaagtgcgtaagtgcttgttctgcctctccagctttacgcgccttggggtctagaactgatgatcctggagatgctatgtaactgtatgatcttttggctgctgccgcattgggcatttcaacgggaacgggacgagattttgtcgtcatccatatatacatcgtggtttactctgtccatggccacttctacaaatagaatcgcttgtct

SEQ ID NO: 1915 - DNA, 693 bp, Zea mays
gcgaggtcgtggcgtggactccaaatccttcctcttcaggactcaacagcggagttcgctccgaccacgggccctgctgccatggcggcggcggcagatcttggtgagtccgggccaccgcggtgggcatagccgataggctcgttgctcgttcttccttcgcatgcgttggtttctatgcttatgcacttgtaggctcacctggatttctcgttttggcattattgtactgcaatgcatctacaaaagtcttatagatatgcattcatagtcaaagcaatctatctaaaaaaaatcttacaatttgagtatttgccagttaatgtgcggtgtccgtggtagcggggagcctccttaaatctggtgcatccataatgatttcttttccttgtctggatcagagcctcagttggggatatcgccggcgacacccgacattgtccgcaagctagctcgaccgtccgggacaaccaccgcagttggctattgctgcactgctctgtacaccagcacggctgctggccccggaaaggtggacggcgatggccttgcctcggtgccgttgcatgcccatgaacattctcagtccgccgcactggataatttggtccaagtggactgtgatcccgtgggcactcaggagtccagcaccttgcctgcactggtgggcgagtcctctggcaaggttgcaca

SEQ ID NO: 1916 - DNA, 693 bp, Zea mays
  misc_feature (687)..(688): n is a, c, g, or t
gcgaggtcgtggcgtggactccaaatccttcctcttcaggactcaacagcggagttcgctccgaccacgggccctgctgccatggcggcggcggcagatcttggtgagtccgggccaccgcggtgggcatagccgataggctcgttgctcgttcttccttcgcatgcgttggtttctatgcttatgcacttgtaggctcacctggatttctcgttttggcattattgtactgcaatgcatctacaaaagtcttatagatatgcattcatagtcaaagcaatctatctaaaaaaaatcttacaatttgagtatttgccagttaatgtgcggtgtccgtggtagcggggagcctccttaaatctggtgcatccataatgatttcttttccttgtctggatcagagcctcagttggggatatcgccggcgacacccgacattgtccgcaagctagctcgaccgtccgggacaaccaccgcagttggctattgctgcactgctctgtacaccagcacggctgctggccccggaaaggtggacggcgatggccttgcctcggtgccgttgcatgcccatgaacattctcagtccgccgcactggataatttggtccaagtggactgtgatcccgtgggcactcaggagtccagcaccttgcctgcactggtgggcgagtcctctggcaaggnngcaca

SEQ ID NO: 1917 - DNA, 463 bp, Zea mays
  misc_feature (454)..(456): n is a, c, g, or t
catggtagcatcgatccatgaaagcggtgaaagctagcttcgcccctgcggcagcgtcttcgtgaaacgaatcgaaatgaactgggggtgtctgtctgtctgtctgtctggctggctctccttttcggcatgcgagcgtcgaaattgttttgctttattagtattaattaattttttttgtttcggtttcggggcgggcgggtggattccgaggacggagatgcatgcagtgcagatgcggtgcctcccgatcgcggatttcaaaactgcttccgaattggagaatgtcggcgggaagaatgaggaatggatttgtggacttccaggcaggttggcacttggcacagcgcagcgcagcagtctcggccaaacaaaaaacaaaattggtagtttttttttcctttttgctgcattttttatttggtctaggttttgtggtactcagcatttctgnnnacacctt

SEQ ID NO: 1918 - DNA, 463 bp, Zea mays
  misc_feature (8)..(8): n is a, c, g, or t
  misc_feature (86)..(86): n is a, c, g, or t
  misc_feature (99)..(99): n is a, c, g, or t
  misc_feature (103)..(110): n is a, c, g, or t
  misc_feature (158)..(162): n is a, c, g, or t
  misc_feature (170)..(173): n is a, c, g, or t
  misc_feature (391)..(399): n is a, c, g, or t
  misc_feature (424)..(424): n is a, c, g, or t
  misc_feature (428)..(428): n is a, c, g, or t
  misc_feature (438)..(438): n is a, c, g, or t
  misc_feature (443)..(443): n is a, c, g, or t
  misc_feature (454)..(456): n is a, c, g, or t
catggtancatcgatccatgaaagcggtgaaagctagcttcgcccctgcggcagcgtcttcgtgaaacgaatcgaaatgaactggnggtgtctgtctgnctgnnnnnnnngctggctctccttttcggcatgcgagcgtcgaaattgttttgctttannnnnattaattnnnnttttttgtttcggtttcggggcgggcgggtggattccgaggacggagatgcatgcagtgcagatgcggtgcctcccgatcgcggatttcaaaactgcttccgaattggagaatgtcggcgggaagaatgaggaatggatttgtggacttccaggcaggttggcacttggcacagcgcagcgcagcagtctcggccaaacaaaaaacaaaattggtagnnnnnnnnncctttttgctgcattttttatttgntctnggttttgtgntactnagcatttctgnnnacacctt

SEQ ID NO: 1919 - DNA, 368 bp, Zea mays
atttttaccaggttctaagattaatgagagctcccctcaagaagcagtagcaggccacagcaggtgagtgaagccagaggtgaagcttgcattttcaggacatttgatattcagtttgggtcaaacttgatttttttggcattgttacaagatatgagcaagggtttcagcataatggttggcctatctttgaactgcaggcacctccatgttcaaagatgattattgctttattatgatgttacatgactggcttgaatgtcatcattttggagtgtctgacctatatgcttctcttgctttgtgcagcccgaatagtagcattgatattctggcatcagtccggcttaaatgaacagtatgtatgt

SEQ ID NO: 1920 - DNA, 757 bp, Zea mays
  misc_feature (701)..(703): n is a, c, g, or t
  misc_feature (706)..(706): n is a, c, g, or t
  misc_feature (708)..(721): n is a, c, g, or t
  misc_feature (727)..(730): n is a, c, g, or t
  misc_feature (732)..(734): n is a, c, g, or t
  misc_feature (736)..(737): n is a, c, g, or t
  misc_feature (747)..(749): n is a, c, g, or t
  misc_feature (751)..(751): n is a, c, g, or t
cacttatgttgtaagctctctatgtacttagtgcataagttgtgttctatctgaaggagtgctctgccttctaggatcacaatgcttcatttgtaggtcggttctgccactcggaagcaagtatgactagttctgctgcctatcgtgcactaaagtatggctgtctttgctgcctatcgtgcactaaagtatggctggctctgctacttatcatgcactaagtaaactagagactaaatgtgaactattgtaatatattgatgtatgttattttgattgttgtatatctacatgtgtcgtcccataagtagaaccaattctagaagagaacccggaggagccagaagacaaagaacgtgacaccacggacgtgcaactaaatgaaggtaagtctcaccgacctcttactttgatcatgtttgttcctaagtgaaaaatatataaaacttgctagacataggagttgcatgagataacacacctaatattgagtgaatgagagaaactatgaattgatgacgtgatgcatgttgattgcatgaatattgataccttgacacttgatgaaactagatgggaatgaaaccagagcagcatggtaagtgctggtgcatgcgctaccgtggtggtagacttgcaatcgagttgtcgtggtgatgtatcgggtttgctagttttggttggtggctgctctagtgaannntangnnnnnnnnnnnnnnctaatnnnntnnntnnataagtcatnnnantgccta

SEQ ID NO: 1921 - DNA, 311 bp, Zea mays
gaatatcttgtgcaaccaatcgctcagcctcaagccatggctattggaagtgaattagatggagttgaccctgatgatgctgacgaggacaaggaagaagtcgacaacgatgatgatggggccacagatcagccttcatcctcgcatggagccaagcggaagagagatgatgatgatctgtcaggcagtggtgatgacagtgaggatgacggtgttgaggacttgaggcccttcaagcacaagtgatggagcagccaatgtacattgatccctccctcccccttcttcagctagaagtaagcagcaagatc

SEQ ID NO: 1922 - DNA, 355 bp, Zea mays
agctggaatcctgcaaggccccacatgctggcttctgctagcgacgaccgcacggttcgaatatgggtagggcgcaaaaatgcaacaaagtaaacgctgttgaagtgtgaagttttgtatgtctgtgtaaatagttgtacatctggactgcatccacaaacctgtttgggacaatgctctgttcttcacccctgatgaatatgtcgtcgtagctatttgttcagaaataaacctgcaacagccataggtagccggtgctgctgtgtccagatgtgtgcctggctaaccggtgagttttgacatgtgtacaggacaaagatgcatcagaactttgtacatcttgttagtatatgcc

SEQ ID NO: 1923 - DNA, 294 bp, Zea mays
tctgcgtattgcaggatagcaaggggagcctgtaacaatagggtgatggatgatcccgttcgatttgatcagagcttggagcatatcagctactaggaggaacaggtaaggagatagaggctcactctgtctaaggcccttcttacatgagaatggggattacaagaaaaagaaatcggaacttcagaatattatttgctctttagatgctgaagccgaagttagggatctgaatgtggatgaactagaatgtttggcccagtctagagatcacctgatcaagctattgagaga

SEQ ID NO: 1924 - DNA, 410 bp, Zea mays
atattcgctaatctttagtctgattataagaaccggtactaaaacttaatctttagtactagttattggcatgcaccggtaataaaaggtttctctttagtactcgttctagctaagaacctttaccaaagagtaactttatcaattcgggctcttggcttgtcataatcgttgaaattgtataatcattgaaatttcgttcgagatcgtggcttgttataaatacatgctctgtcaatcactcttgagtagatttaggacctaattctttttcatagatgtagggcgtgatttctgcatactaacgtgcaattcatgtatgattcatttgagttaatgttttgcctctagcatgggtgaggatcgtcgatggatgtatgaaggctgaaagaagacatagactgcatcga

SEQ ID NO: 1925 - DNA, 410 bp, Zea mays
  misc_feature (78)..(79): n is a, c, g, or t
  misc_feature (88)..(88): n is a, c, g, or t
  misc_feature (127)..(130): n is a, c, g, or t
  misc_feature (145)..(145): n is a, c, g, or t
  misc_feature (150)..(150): n is a, c, g, or t
  misc_feature (287)..(287): n is a, c, g, or t
  misc_feature (295)..(295): n is a, c, g, or t
  misc_feature (308)..(308): n is a, c, g, or t
  misc_feature (367)..(367): n is a, c, g, or t
atattcgctaatctttagtctgattataagaaccggtactaaaacttaatctttagtactagttattggcatgcaccnntaataaaangtttctctttagtactcgttctagctaagaacctttacnnnngagtaactttatcanttcgngctcttggcttgtcataatcgttgaaattgtataatcattgaaatttcgttcgagatcgtggcttgttataaatacatgctctgtcaatcactcttgagtagatttaggacctaattctttttcatagatgtagggngtgatttntgcatactaacgngcaattcatgtatgattcatttgagttaatgttttgcctctagcatgggtgaggatcgncgatggatgtatgaaggctgaaagaagacatagactgcatcga

SEQ ID NO: 1926 - DNA, 492 bp, Zea mays
gtatctttagcttcaaatcatcttgagcctaaagcaatgttccatttcagataaagttaagcctggtgtatttgcaaagcctgtgatggataacaaaagcaaacgtgaatttacattttcatgcttctaagttcatttcttttttgggtacataaaaggggaggctgcttcgaacccatgatctggtgactcgataaaacagctcccaccactgcaccagacctgcccttcttttttttggtacatacagtccagtaattattaatattaacttaagaacgatgtaagcatatcctaatagagtgcaaaccgttgcaacttacaggtttgataagattcgcaagcgtggtctcatcagtcctcactatagcatccggatcaagtaaaccgttttcagagaggcgttccacagcagctgaaaataattgactccaaaatgcaatcagcaaatttctaaaggacaactatttagtacaaacacatcagcgaatc

SEQ ID NO: 1927 - DNA, 426 bp, Zea mays
tcatgctgcgtcctcgccactctcgcagccacaccacaccctcgttgtcgtgtcatcgccgcaccgccgcacttatgtgctgcgcacctgcagcccttccgcaccccgcgctccaatcatcgtgcttgcaggtagagtcgccttgcgacgtcgtcatcacgactccccgcaagtcgcacgtagccgacactgtgcttgtgcgagtgcgtgattggagaacctcgtcggagaagaaaataagtgcaaggtgatggaactttctttatgttctatgccccagttaagtgttaattaagtaatgcgtaagtgttcggcgaaactgctcttttgcactcagtggcgtgaacgcgcaggtagatcgaagaaacaaatgtgtcatgcttgtttgatgtgataagtaagttggaaatacaagatatgcgaggg

SEQ ID NO: 1928 - DNA, 225 bp, Zea mays
tcagcagtcccggatgatgagcagtcgactgcggagacggtgtgccagatctcggacgcggaaaggtctgcggagagctgcgtgacctatgttggcgtggagctgaggcagaggagtgtctccgagggcgggagggtggtggaagcgtccgcggatgatgggaccagcagctgcggagacggtgtgcctctctccatggacgccgcagctgtgctcgacgccttc

SEQ ID NO: 1929 - DNA, 981 bp, Zea mays
  misc_feature (63)..(71): n is a, c, g, or t
  misc_feature (106)..(112): n is a, c, g, or t
  misc_feature (115)..(115): n is a, c, g, or t
  misc_feature (119)..(119): n is a, c, g, or t
  misc_feature (874)..(878): n is a, c, g, or t
  misc_feature (913)..(923): n is a, c, g, or t
tcatgatctcgtatctgatgattttagggtgtgtattttactgccttgtgccttttttgttgnnnnnnnnnccctttatcaactgttcgactaatctgacacaatnnnnnnnctntggnttgtgtttagagggaaagtttaagctattttcttacaataaaagactcctggaaagaattagatgaccaagcaaacaagatggtcttctgaaactaagtaaaacgttccacctttgccagtgagttatctccataaactattcattctttgccttttacactgagctcttcttaatagtagtttgcattttttgacaggaccctgaaaacaagtggagacctttcagattggttgagctcagcgtacaattatctggccatggtggattacccacttccgtcaaaatttctcaggcctttgccagccaatcctattaaaaagttagtccttaaacatcaatttccatacatcgtactacacatttctgtgtatgcttctgctcaaagaaaaaagatggacccagtgctggtagctcccacatcactggggtatggggaaagaagaaccgattaagcgaggcaagtcttatccctgcatttttgcagagaggatgcattgaacacaaaacctttggcttagtgaaaaggtttctcaccactgtgtcagacctgtccttcatgtttctgctgaaaataataataaataagtaactttcagtaacattcctgaatatgttactattccattgcattgttcacaacatcctgtcccaataggtcaataatcgtgacatgtcaacattgcaatcatgagaaccgtgttcttgtgagctaccttttacattctgtaggcatcatgtgttttattaatactnnnnngcattgcttactatattgtcctttctctgtttcannnnnnnnnnnatatcgacagtcaacctaagggtactggtactctgtaacgtatatatgcaggagtaaa

SEQ ID NO: 1930 - DNA, 346 bp, Zea mays
  misc_feature (336)..(340): n is a, c, g, or t
tactacattaaaaccagaaacttcaaagtttggcttgagttccttctctatgagcccccctgtactgctgcaaatggagtttccattgtagctgataaagtgcaggcaaggcacatgctaatgtgcataggtggcattgaaattgggctcacagtcactgaaccagtttgatattttgtagtcatatacagctgggagcaacagaagttaggtgtcgatcatcattatcccatttggttcctgttacaagggatcacattggaaggtcatcacatgattgacattgtctgtaagttggtacaatccgtttgcatgtaaaactcagctgtggagtgnnnnnttctct

SEQ ID NO: 1931 - DNA, 368 bp, Zea mays
atcaccattagtgatccaatctcagctacgttcggtgaaccatttgagaaagccaacccaagccattcctccacagcaatcgtttgtcgagctggttcaggaattgatatggttgttggccttgtttcttctagtctaggtgctgttgctagtggccaaggcaatttcaaagtcttagtttgggatcctggtggttatgcatatcacagcttggggacaagctgtatttcaagcggtggggaatgtcagcatctcagacaggagcaatgagcagacaacgagaacaagccacggcacgtgagagtccatcgtccaaacgccaaggttactgagccaatatgggccaagtagtgggtcagctatctatg

SEQ ID NO: 1932 - DNA, 963 bp, Zea mays
  misc_feature (897)..(898): n is a, c, g, or t
cgattcacgcacaggctcatcggcggcttcggccgcaactacgggggatggggatcaggcggcgcccagctgcccagatggctgttctacctcagcaaggcggcgcaccgccgtggtgtcaggctctgctttctccccaggggcatggccaggagagagcagaaccggtcgcaactcgcaacacaattacaggtgctttgccttgttgatttaatttttacttgccatcggtgtgaactggagatgttcagcaggcttgctctgcagttgttgaatgacatggcatgcagttcctttctcattattatttggaaggatcttgtttcagttcaagtatttggtgcctctaacagtgttatgagaaaagatgagatggaactttgatgataagcccatagagctgtctagttaccattcagcttaatatgcactagttaggtgataacgataatggctcattgtctgtatctagtgcaaacttatattgatatattccacccttctcagggcctgtttggatccattatccgctaatagttatctagctaatagatcacaactaacattagctgcaattagctagtttggtccaactagagaaatagttgttagttgtgtactcagctaacaattaactagacctgtttggatcaaggagataatttttaacggctaactattatctgcattggatgcaaacaagacctcggtcattttttcctacaacaaaaatatatctcagcgagccatgccacttgcatcaccttttcttgctttgctagattatgccatacgaaagctgctctaatctgaatctctatgtgcaggaaggattgcatattctggacacttgagtggaaattcaattcaactgatgttgtcctaactgatcatggnnaagtttatgatagtccagtttctctatggaaaaacatcttattcctggccctggaaggatcagct

SEQ ID NO: 1933 - DNA, 744 bp, Zea mays
ttgcttgctgtacgagtactagcatgattccccccaccgccccacctttaatcatagcacatctctgaagcctgaagcagaactccggctcgcacgaatcatcagacggggactggtcgatcgacgatcagcgcagagctagctagctgcattgacataattgtcttgtgtgctgccttgttttctgcaggtccttagtgctccatacttgaagaacaacggccatcaagtgccctacctgaaggtaggtgccgtgccgtgccagtagtcagtaccagtcactgtgcatgcatgctctccttttcattttgatggatcatggtagtcgttcgtactacctgctgctgaactgaatgaactgttcaaagctgatgccggctttatatgcgtgcgtttcgtttcagagatcaagtcctgacaggtccgaggacgacaacagccatgccggcgagagatcactcaagggccgggggctgtgcctggtcccgatatcgagcacgttcgcggtagccagcgaggtgcccgtcgatttcgggtggagtactgcatttgctgccagctttaggtagaagagaaggctgggaacgaagagcgcgccaaagctctgatcagaggcgtcgaacgagtatataactagctagctagccagctaccacagatcgatcgacctgccctgctgacgatattatatgcatatgtcgatgcgtttctgatctagtgagtctagcagtgtatggttatgcg

SEQ ID NO: 1934 - DNA, 520 bp, Zea mays
cacaggatgcaatcgtaagagttgtccgttagatcggttaactgggatccttttggtcaccgccgctactcagatttggcgatgccggcggccaaggaacccgcccaggaccgctctcttccgcctcggcgcctcttctccgccattgcctcctcgggccgtcattgtcgccggcgtgaccttccaccacgtcccaggtgaaccctccccccctcacccgaatccttcagtgcagcgcaagcccccgccgcatcgctgttgtcatctgactgaacacaacttctgctctactatattcatattcatttctccgtttcttttatgctgggtgaaagtgatacacatctgcgaaaagatgaggttgctgcacatctgcgaaaagatgaggttgctgcacatctgcgaaaagattagtgtgccactaggtgatgctttactgcctgatgctgcatctcacatctttgatgggtctggcctgattcataatccagcaccccagcacctagccgtatatactgtc

SEQ ID NO: 1935 - DNA, 461 bp, Zea mays
  misc_feature (384)..(443): n is a, c, g, or t
cgaagccccgaaactttccggatctttcttccgccgcttcatcttctttgcgcaaaactagttttgtttctcgttcttctcttcgatttcggccgaataaagatggcgtcggctgcgcgcctcctcgcgccgttctccaggcgcggcgtcgtctctgtggctctggcgggggtggagaggcggcggccggaggcggcgtcgctcctgggggcgcctgtgctggctacggtggaagcctgcgcttcgatcaaggtggtgttacagtccctgtgcgtggctcgtgagcagcggcagcgcatcgtgcttgtagattttttcttggatggtgctgcatgtatagagttgttaaggagcagtgcgtcttgaggattatttctgagtatnnnnnnnnnnnnnnnnnnnnnnnnnnnnnnnnnnnnnnnnnnnnnnnnnnnnnnnnnnnnttctaaaggacaactatt

SEQ ID NO: 1936 - DNA, 546 bp, Zea mays
gtcgatccgttccttcaaaattgattccaatcggattgctccctcaaagttgctcttcaaattctagggaataaatgctatagttggcgcacgcgcagtcgatatgggaattttgaccacccctcaactgcattggatggtccggagcaaaaacaaaggtgtcatggcttccgagtcagattattttaggcagcttattggatcgttcaggttattttctagtcattgtcctgctgcttttagtctcccacgaactactatagtgtctttgatgatgagtttctagcatcaaatttcaccaggcgtatgttggaattagtgccaaaaggtaaaggtggggatgaggttgccaagaaacttattgtcgatggagcaaatggcattggtggggtgaagctcgaacaaataaaggtggagctttcaggcatagatattagtgtgaggaattcgggcaaggaaggagaagggatactaaatcacatgtgtggcgcagactttgttcaaaaggagcgagttactccacatggatttaaccctgaagatgtt

SEQ ID NO: 1937 - DNA, 457 bp, Zea mays
agccgcctcgccagcgtcacctcgaatccaaacctgcctccgccgcctcgcggttgccccccctcgcttcgtaccatgtcgttgcgctccgatccgaaaacgtcgcgatggttttgcgtttttgttgttctttgttggtgatctaatgatgggggcagcgccgcagcggtgtcttcgccattccagacaaggaagatcgtgaagaagcgcgtcaaacagttcagcatcgacgtgctgcagtggacttcaagcggatatccgtcacatcggttctgatgtacgcgatgcgcgctctacacaagatcagaaggtcaaaggtactctgaccatcctttcagtttgtaggctcgaatcgaatcctgctcagagcttagctgcactccgttcaaccctaatccctcccaacctaggccttgtttgaatgcaatctacttgtttgagtggattaggttgggag

SEQ ID NO: 1938 - DNA, 406 bp, Zea mays
atggcatccaacaagaagcccattgctgccaccgcgctcctgttcctagcggtggcactcacgttggcggcttctgtccgggctcaggcactactggctccgacgcctgcgcctgcgccatcccaaaatccctgccccgccggtttcaacaacttacttgcgtttgggatagccaagaaggaatttcttcttaataacggtactatgctgctattgttcccgtctcggggcacccaaagcaccacatcaatggcgccgtctgcggctaagggagtgcgaagtgtagtctgcatctgctttctctctacaaaccgtatattaattggcggccccctcacatgccagcagctggtgtagtctggccttcttcgctgaaccccatgctcaacatgtgtccggctcgcac

SEQ ID NO: 1939 - DNA, 267 bp, Zea mays
atctcatgtatatctgcaaggagaatctgcacccacgaaaggcattgagtgcaatagaggtgaaggaactgcgcgaagccctttaagttatttaagttattgctgaaggtttggacctagattcactcttgtgctagagtttggtgtagtcctcgattataaactgtgtacaatgttaatgtagtgacatagtttgtatgatgcagttcatagtgatgtttgaaggtatttgtatgaactgtgtcctggacatagtttgtatgatgc

SEQ ID NO: 1940 - DNA, 352 bp, Zea mays
ttaccctccccctctagcaccctctctactcccttttcccctctataaaagcaagcgccgagccccatggatccgtccctcggttaccaagcttgcttcccgcgcccttagctcgctgtctcacaaaaaccaccgccggagctctctgaccgccgtcagagcagcacgccgtcggagcaggccgccgccagagggccgccagaagtcgacgtcgcgcctccatcaaattcctctgcccgaagccgttccgtgcctccctccgtttgtcgacgtgctgctgccagagaacacagagaggttgaggaagacacaaattttgtgttctacccctgaggctatgattaattctgta

SEQ ID NO: 1941 - DNA, 714 bp, Zea mays
gtcaatggataagtttggcatgggagaaaagaaatcatgctgctcaccttctaagatcaatgatagttcaggtggagctgtgcttcgttatgctttgcacctgcgatttctgtgcccctccaagaaaaaatcctcgaaatcaatgcttcgttgcaaatctgatctatcaacggcaccatatagcagcaatacgctacctgaggaagaacggaggttctatctctacaatgatcttagagttgtatttcctcaaaggcactcagatgcagatgaaggcgaggtacacaaaatttaatcttggcactggcagcactaccttttcatttctttcttccatcatcagtcagaattcgggtcagtttacattagtttttttggacaaaatacacatgcttaatacgatattctgtttttttggacaaaaatgcacctgcttaatatgatattctgttatttactgttgtttacgctagaccatctttttgatcttccttatgatttcgaaataattatttaagcttgctctaatagcctatacgtgtctatcagactgttccttgactgtttcttgttctgttataaatccgtagaatttaatgtgataggtttcatctttgttgcagctgcgagtggagcatgatttccccgccgatcccaagtactttgacataagcaactgatggttgcgctgctgcaccggacaataataatctg

SEQ ID NO: 1942 - DNA, 392 bp, Zea mays
cccctgccatcgtcgaccgccccggccccggccagcaccaccctcggccgcgccaacccaaccccaagaagagtgcgtccgcatccaaggtgagcagggcattgctggcatggccccaagaggagacatcggccattactatcgcatggggtctgcttggatatcccaaccgctctgaccttatcccttcactttccactctctctctctcacgttcctctcccttctatcgagaacccatgaatttagatggagaatacaacgaggtgattgtgtaggtcgctaatcttgatcttatttgtcatctcccatgtcgcatgacttgtaaaaaactgatttgtggtccgtcgcagcttaggtaagcaaaatccctttgtacgctttgtattcta

SEQ ID NO: 1943 - DNA, 431 bp, Zea mays
gaagcaaatcctatagttgatctgcgcacaagctgtgagcagggtgttacgactccagaaatatatgaatcgccaaggcgaagttcttgtcaggctcagaagaacgctgctgcaccaattcaactcttggacatcaacttcccacccagggttccaaagactatatttctaccattgcctctgaagcaaatgctttctgatgagaacaatgttgaaacgtcgaagccaaaatatcggtcaaaagacaatggcttcccatcagggctgatatggcaccgcaatattgaggctgagtgtagggaccctccggtagctcttcagcatatggattgcagcagcgagggacagtcgagctcatcacctgctgagataccggagtatggatgccaagaccagtacgatagcgaggaggaaacaatgtactcagctga

SEQ ID NO: 1944 - DNA, 612 bp, Zea mays
  misc_feature (557)..(557): n is a, c, g, or t
  misc_feature (559)..(559): n is a, c, g, or t
  misc_feature (603)..(607): n is a, c, g, or t
actaaacctgtaagtaaatctacattcatttcatttacttagtcattgaactgtagctttattggttgcttattgatattggcttctctgctttatgttgattgccgagataatattttttccccatgaatccagtgaattcccagttagactagaaaatccgcatgtcatttcttcagaccaagtctgggttggagttgtgcctgtcggcccttcgggacatgctcttaattcttcttatcgtacgcgtaatactatacaatataaacaagagttgggcactgcaataggtaggccaatactaacaatatatgccgctgcttttgttctggtacagttttgctgacatatgtgctcattttatagtaaatttcgcacgcattgtgccagacggactccttgttttcttcccttcatattctatgatggacatgtgtgttgacttctggaaaaatagggtattcattggttctggaaaagtagttcttatcatttgaggtgtttacaaaattagaaattttataacttaaatctcttacagaaccattcaaattcancntctgagaacacaatttggcagcggatctgtaagcacaagcagcnnnnnataga

SEQ ID NO: 1945 - DNA, 211 bp, Zea mays
cttagaaagacgatttgattgtgttcttcttacaaggaagggaattgaggtcgctaaccattttcttgttcttttcttgttgtaatttcctcaagaaattaggtgcacgaatttcattttcagtgtctttttactttaagcgtttcatgttagtttatatgaggagggcattttttctattatttaacaagcacagatcggagcaaaggca

SEQ ID NO: 1946 - DNA, 372 bp, Zea mays
tcacaacaacacttgattttaatgaaatgagtgtgagatgaggaggtggtagagaaaattgaagtgcgggttgtgtgaatgagctcagactcctttatttataaaccatgttctattttttagttttttttaaaaaaatagagcgaaccaatgagaatgcgtcaagtggcaagaggcaaccgttaccaggtcacagaaagcaacaaatgggtcagtaccatccctggtggccggtcgatagccttgacgaccacgtgcgtgagccaaccagcgatggcaccgtggcaggcaatatcgaccgaccggttgtgccaagtgggcaggcgatagcgcccagcgctggcactagcctaagggaggtggaagggtaag

SEQ ID NO: 1947 - DNA, 435 bp, Zea mays
ttcgtcagagaaaaggattccccagagagagcatatcccctctgtggctgccggcagttcggatctgcgccataggctactgaagcaaagaaagtccaataataattcaaggtcggctgaagccctgggcaggcatgatacacatcttgaggatgagcgcaatgaccaacatcgtccgcgaggtgaacagcaggatggcctctcacggtctcgactgcatgatagaataagactacctggggagacagcgtttgacagtcttgggtcacggtcagaggagtgggatagagggtctagagccagattgtcgccaccaaaatcctcagatcttcgagggaggcttcatgaaaggctaaagggtagattgggtgaggagataccgggtagcagtgcaaaaggtttggcagtgaaggcaagtagcagtgaggatactga

SEQ ID NO: 1948 - DNA, 480 bp, Zea mays
ccaaggtacctgcgccagcttcatctttccttcgcgctgtgtccggcggcacggctcctaatttgcgctcaactttcaaactaacactgctgcttgtgtgtccgactcctccgtccgcagcaaaagatcgtgatcaaggtgccgatggcgagcgacaagtcccggtccaaggcaatggcgctggtggcggccgcgggcggggtcaactccgtggccatcgccggcgacggcaaggaccaggtggtcgtcgttggcgagggcgtcgactccatcaagctcaccaccatcctgcgcaagaagatgggcgacgcgcagctcgtcgaggtcgccgaggacaagaagaaggaggagaagaagcccgaccccgtcgccgaagctgcggcggcgtactacaaccagtactactaccactacccaccgccgcccgcggtcgtctacgacccctacccacggtcgggcaacacctgctccataatgtag

SEQ ID NO: 1949 - DNA, 609 bp, Zea mays
tatggatacaggcgctgaaactcacatgacatccaactccggtaatctttgcacctcgcagcttccttctttttctactccgtccaatattgtcgttggaaatggttctcttttacctgtcactcacaccggctctgccacccttcctgccatatgtggtcctcttcatttaaataatgttcttgtttctcctcacctcattaaaaatctcatttccgttcgacagtttactattgacaataaatgctctgttgaatttgatccctctggcttttctgtgaaggacctcaaaacccggaacgtgatcgtcaggtgcaatagttccggtccgctatacccgcttctatcatcggtttttcagcccttagcactcactgccggcgtctcttcatccactctttggcatcggcgtcttggacatctcggtcatgaggccttgtctagtctcgtgtcatcatgtgctatttcttgcaataagagtgattccgaacacttgtgtcatgcttgtcaattaggtcgtcatgtacgtctcccctttcccacctccagttcgcgagcaatcaataattttgatttaatccattgtgatctttggacatcccctgttcc

SEQ ID NO: 1950 - DNA, 405 bp, Zea mays
  misc_feature (396)..(399): n is a, c, g, or t
caaatttactagcaaatggttgatgttttctttttcctgatcacatagtagacagcgagctggatgaggcaagtttcttttggctaaacggtcagccgtccagcatctgcaactagccaaacaaaaaagacacacttaggtcaacctgctgaacctgacagtcagacaacaagggagcctgtccgaagtcctggaagattttcaaatacagctaagctcgcccttcttcatgaatatcgtaatcctgttaaactagacaattaggacgactatgaatgatttagttttcaaagcaatgcaaccaaacttgcagacaagtcgaagtgccctccaaaaagagcttggcgagctctcctttagagctaaacagagatcgagccacttttttgagtcatnnnnccaaag

SEQ ID NO: 1951 - DNA, 414 bp, Zea mays
agctatctaccgcaccagcggcctctagtgtctcctctatcccttccctcgcaaagcaatcacacacgcgctttctctgtgccgccaccaccaccagcagcaccccgtctcgctccccgcccccgacgcccggcgggacatgaagaaagacgaggaggacgccaatgccaccgtccccggcgacgacgacgcacgacgttccgcgctccccgtccgcctgctgccgctccggtgacggtgacccctacttagctctctccttcgtcctcgccttctgagtcgtcgtccttcttgcctctatggagcgagctcgccgtcgccgtcgccgtcgccgtcgtcgtggtgcagaccagcggctcagcggattgaggagagccctggcggcggagaaggcgtcgtacgtgttctggtgat

SEQ ID NO: 1952 - DNA, 370 bp, Zea mays
  misc_feature (359)..(366): n is a, c, g, or t
aactgaccatcccctgtgaaaactgccattcaaatacctcaggagttttcatctgtaccataggggaacacaattcttaccatctgtatcatattggtgcatcattctttcctatactgtagctgcgcaaaaaggggctctgggtctgggctgatccttggtcgcagaataacatcagaaggctagaagattgaatgcttggttgatcaagacgaagaaaggaggcggatattatgaggtggcaagtttatatgctttacatccatccatttaattatttttacactctagcattgaaattttgttctggtagttttgtgattgcttcggtaggttcgagatgattgtagtagagatgnnnnnnnnttct

SEQ ID NO: 1953 - DNA, 904 bp, Zea mays
cactgtttgcatttttgtttgttcttacttaaggatcttccaatatttttctgtagataatgatgtatctgtggagtcaattaatgaagaagaatgccaaccatctacctctgaaaaagaagacgacaataatacacattctgcgtctgcattttcagctaaaaaatgccaagcaattgaagaaaaaagaatatcaaagaaattgcctggagttcaggtcagctgttcttttctcctcggtggataccatcaaactgattttttgttggttattctcaagctgttggtgaatgaagatcttattttccttttgttgctgtttgcttgtttccgtgcaacaaagcagcaccaactttctaatattcaagttggaaggtggcataacatccccaaaattagtgctgggcattgccttttgtatcagaaatgatcaaatcgagggcttttatttctgagtcagctgtagtttctttcttccattatgttgcctatcatgattacagtcttgtacttgctttttattcagtgaaattagcaatctattgtgccattttgccatgtactcaacttgttcacttcttttattttctcatttcttttgtgttggtagtacaagattttcaaactaatttttagtttccatgtcattaactcgcccaaggtgtttcattaccatagggaacttcctcgatattgaagtttctttcacggggccaatctaccttacatgagaaaagaaaatctgatggactaatttgcagtcagcaaggtttggtggactgcaagatgcaatgatgcagacattgatttaaccactgccacgtttttttcgtttgctgaatatattcatgatgacattaggtcccgggagttcttcggaagcatacaaagctggagcacacaa

SEQ ID NO: 1954 - DNA, 1243 bp, Zea mays
  misc_feature (683)..(685): n is a, c, g, or t
  misc_feature (719)..(725): n is a, c, g, or t
  misc_feature (730)..(734): n is a, c, g, or t
  misc_feature (751)..(751): n is a, c, g, or t
  misc_feature (771)..(791): n is a, c, g, or t
  misc_feature (794)..(801): n is a, c, g, or t
  misc_feature (804)..(806): n is a, c, g, or t
  misc_feature (810)..(1240): n is a, c, g, or t
tgaccaataaaactccacctgcgtccgttagtctctcagcctcgctcctagcctataaatcgaacaccgcggatctacgtgcttgttactagcctctcttttcttctctcacgctgtcctatgtgctgctcacggagccgagccaccgccgtcatcatccttcgccgccgtgccgtttcagagcctatccgccgccggtgaagacttcctcgtgaccttggacgcccgctcttccactttcctgtgctcggcaacgccccggttcgcctcgacgccgccagccgtggtcccatccacctctgcgcaagtaacagcaaggtgaacgagattgaatctagcccctaatactgtgtaaaaattatttagacaaatttttccagctcaaaaggaagtgaaaataagcccctgtgattttatgtgctatcacgatccaatttctatatcgttacgtaattttagttgtatattttcttttagtgtaaaaatcaagtgtataccgaacgattaatttcatatgtatgtgatggtttattttaattagtgtatgctgtctttcacctttgtgtattttaatttaattatgattgttgacattaatttaaatatagtttgttagagtaaaagattaagggataggtaaaccatatatttataacaataatactagatgaataattctacgnnngtctttgctcaggatgaattatagattttagtcnnnnnnnatgtnnnnntatgtgcgattatatgnaaattgctagtcatgctagnnnnnnnnnnnnnnnnnnnnnatnnnnnnnntgnnnactnnnnnnnnnnnnnnnnnnnnnnnnnnnnnnnnnnnnnnnnnnnnnnnnnnnnnnnnnnnnnnnnnnnnnnnnnnnnnnnnnnnnnnnnnnnnnnnnnnnnnnnnnnnnnnnnnnnnnnnnnnnnnnnnnnnnnnnnnnnnnnnnnnnnnnnnnnnnnnnnnnnnnnnnnnnnnnnnnnnnnnnnnnnnnnnnnnnnnnnnnnnnnnnnnnnnnnnnnnnnnnnnnnnnnnnnnnnnnnnnnnnnnnnnnnnnnnnnnnnnnnnnnnnnnnnnnnnnnnnnnnnnnnnnnnnnnnnnnnnnnnnnnnnnnnnnnnnnnnnnnnnnnnnnnnnnnnnnnnnnnnnnnnnnnnnnnnnnnnnnnnnnnnnnnnnnnnnnnnnnnnnnnnnnnnnnnnnnnnnnnnnnnnnnnnnnnnnnnnnnnnnnnnnnnnnttt

SEQ ID NO: 1955 - DNA, 385 bp, Zea mays
agctggcgtctgtaagggaagtacttaaaaagtcagaaggagaactcgagatcacctcgaagcagttagttttggtttcagaagcacatagtgaccttaataaagaattgctggatgcatataagcagttagagtccacgcaaagtgagctagtgaaagagcgtaaaatcaatgctactcttaacatggagcttgaggctttggtgaaacaatcagtgatagagtccgaagcaagaaaaactcttcaagtcgacttggatgaggccactagatcactaaatgaggtgaataagagtacactctgtctgtctaagcagctggaaacaactaattccaagatttctgctattaaagaggagaaagatatgctgtcaatgttccttga

SEQ ID NO: 1956 - DNA, 648 bp, Zea mays
cgaggatgctgtcattgcgctgccacgccgccgcgccggcgacccgcggcgtcgcatgtgaacacggggcgcgttcatcgtgttgtcttctttctttgccccccgtctctctgtctctctctctctctgtttgtttctttctgttcttggcctcagattggatctctcatctacccggcctttcttaccatagttttataatccctgcaggtttccacctaggcagagataaataagatctgcggaatcaagaagctctgtccaaggaggaagccagcggcacggcagtgccctcggcggtgatgaagtacgtctccgggccgtacttcgaaccggacttcgacccgctactcgaccgcttcggcaccccagggtacgcatcatcctccgctatcttgctccgcgacccccctttctcttctgacgagcttcgcgtggttgtagggtcgtcgtcgacaatgagacacgcgaggactgcacgctcgtcaaggtaaacagagcatagcatggcatgcacagcacaggaccaggacgtcctcgttctgatttcgtgggcctccccgttcccaggttgacagcgtgaaccgggacggcgtgctgctggagatggtgcagctgctcaccgatctcgacctcgtcatctccaag

SEQ ID NO: 1957 - DNA, 368 bp, Zea mays
cacactacagatttggacaaagtgatatttatgtgtgggagctgagccaacgaggtgtagtgcttgtatgccacgtttttgaacctttggtgtgctggcactctaggaatcctccttcatcaagcgtggatgagctccactgcacctgcccctatattcagtaccttgggctgccgtattgagtgaagatttcttccttgccctcaaattctagccaaagttcactgcttgagtgtgcagtccttatgtactgctggtataaccccctccctagcccaggtttgcccccttctccccatggactggatgcgctcagtgacccctccccctgcctatttattcagtgtgttccacgagtgagttcaaaa

SEQ ID NO: 1958 - DNA, 380 bp, Zea mays
tttttctattacagttcagttcccaacagagatcataggacccgacagttagttttatgcttttagcatactgagtgtaacaacaatttccttttttatggttctcgtagctgcacttgagttagttgtatatgtaagtttgcacctctagctgatgtgggtgttttgcatttgcaccaatccacaactgggtttgatatgctatgctgaacatcagtgagcaccacaaattttcagtgtcctcgttttgccagaagttcaggatttgctcaagttgttcaactggattgattacatgtgcggatgatgtgcctcataactatttagcgaagcagcaaggtcttgctttaaggaaattcttgtcaagaacaaagtgtcaa

SEQ ID NO: 1959 - DNA, 515 bp, Zea mays
tactgtacccagaagttgccttcacaggagatacaaagtctgattttattcttgacccaagaaatgcagatgccttgagagcaaaggttctcataactgaggtattgtgtctttacacatccagtatttgttcttacatactgtaaatgaagaaataattgcactagcctgttcatcagatgtacttcaaatatgaaacatgaagaacaatttgaagttcttcgcgtttttttattattggtaccaacatagttttgcactcttcaggcaacgttcctagatgaccatgttgatgttgagcatgctagggaacatggccacatgcatctttctgaggtgacaatttatgtgccattactccctcaacctgccgatgaggcttttggaactcctgatgaatataagaaattattactgttttagttgctaactgacacccactatgtcgtgtatagataatggagcatttccagtggttcaggaacgaaacaatcgtactcactcatttctcaaat

SEQ ID NO: 1960 - DNA, 400 bp, Zea mays
ctgttcgcggacagcttcaggggagacctcgttggtgtcttcatatgccttgtgatcggatgctacctgctccaagagcacatcaaggcgtcaggtggattcaggaacgccttcaggaagggcaatggtgtgtcgaactccatcggcatcctcctgctcttcatctaccctgtctgggccggtgtgctgcaagtcctgtaggcacccaccattgcctcagtgtttcccctgtgcggtccaggcgtccagctccgttcccgttcgtgcccgtgcaaatgctccctctatggtgatccgtgatcctgtgtcacgagtaggtgatgtttttatgtgtgcttgagttgatcggttgggcatgttgccatgttggtggacagttttgtttatctcatttgttgta

SEQ ID NO: 1961 - DNA, 399 bp, Zea mays
cagtctgaagctcctgctaagagctttattttggtttagaacaggtacacagaagaaatctttcaatgaggtactcagaatggctagtattgctgaatcttgcaaaacattgtgatggggggaaaattaccggcagcactgtgtatatattcttttcactaaggtttgtgccggagctgcgcctgcaaagtccaagcatgttgacttgactagttattgtcgatagcaaaagtcttcctcctggcaatacagaatgcaacaactgaactactgaaggcacttggaactagagagttttgactagttcggtaccccttctatatttgcacatatactgataattttcacaatttgatattttgaaaataacatgattcgtgtaagacagtagaaactgaa

SEQ ID NO: 1962 - DNA, 367 bp, Zea mays
  misc_feature (361)..(361): n is a, c, g, or t
agatattagaggaaaacaaacaaccagcaaaatgtataggaactagccaccatcaccacttttctagatttggtttcaggttatctatgatgttcttgctccaatttggtgtccgcaagagtcatcccttccttgcttcaaacaagtgcaaatgtttagcagatttacaattttttatttgcttctataaccatagggaatctgctctcataataagtgatccagaaattcaataattattacgagagtcgtcgtgttagcatgggattattaaggggctctgcaaaaaatgaggctgagcttctggatctcgagaaaaatataaaggtctatcaatatatgtatagtatgtatgcttgtnaccatt

SEQ ID NO: 1963 - DNA, 520 bp, Zea mays
ttggaattgagaaggcggaaataatgaggcacctttgctaccgtgatgctgctggtgctgtcaggcatactggtgaagagccgttcaagtgagtgttttccttaatgccatcagcttttatttacctggtatataatcagtgtcaactatatactagtgcatttaaactatgttgtgtgtgtgtgtgtgtgtgtgtgtgacagtgacttcatgaaagtagcacggaggctcaccattatagagggcacggaggggagactgcagaaacctctcgtggaatacatggtcgagcgggcttgattgcatggtggttcggacaaggcaatctgaaacttgtgcaagactgagcttagagcgaagtaactgctgtgtgttttcatttgtgtttgtctgccgccgaagcagaatcgcgatgcttgtctggtcgtgtggaaaaccttggtgtacgcttcgtgacttggtcgttagaactctgtcgtggtcagttgtgttttgcttggtcgaagttgatgaataacct

SEQ ID NO: 1964 - DNA, 570 bp, Zea mays
ctccgacaaaaaaaacacttaaatttcctttactatgtaactctctaactctttattggacaatgatgtagggtgttaaatctgttacattctcggatgtagacaacactatgtaagtatatttacattaccatttcattggtctcactattatgtgctggtactagacactcctatttaatatcatacattttcatgtttcaaaaccataaaccaatagaagaaagaactgaaaagcagacgttgaatctggctctttaccagcttaatacaacaaatttacatcccaccatacttaactgttcaatcaaacttcattgtagggcaaagattttttaccatccaatactcctgaaagttcctccaacacattagaaaaccctgcaaaaaggttcttacaacacctttttccttttgaactgaaagcatttcctttacaatgccacatattcccacttaacacatgcctcataaaaaacatcaccacaggctcaaacagacctctgcaaaagttggcaaactgagttagcagatcgactcataagttcaatattagagacgaccttcttg

SEQ ID NO: 1965 - DNA, 778 bp, Zea mays
acttgcacatccgccatgtaacaacattcttgatgtcaatcggcttcttgattcagtatgtacttatatcctggttcttctacattgttcaaaatccgctggaaaaaaaaggatatctccgtgcagttcattttttttctcgaaaaacgcaggagtgtttgacacttgttagagcataatttcattactctcatacggtggtaacacgaaaaacctttttaatataagttgataagtcctgagaagagttataatttgtgtataggttttggaaacatctcagcatgttggaaggtcgtcagtgtcaacaaaccaggatctgcctttcaaggacgtagccaaccaatgtgaagcacttctgattgggaagcagcaaaagctatctgagtgcatgagtgtctgtgaaaaagaggttagagatccttagcaccttgaactgtccacagttaaacagctgccaataagtagaacagtattcattggcggttggacgttatgtgaactgagtacatttttgtcacttatttttattttgcatttcctttaaaaagttgctgtttcaatattttatctgataggtgaatttaaaatgagatattgagattcaacccaggtggaactaaatgtgcatgtgctcacaaggttcttaactttcaggatggtgaatcttccgtcgagcagtcatctcggcaggatcctcaagcagatacgtttctctgcacagctgatgaacaatggcaccccaattcctgtaagctgccagcgctgtgtccctacg

SEQ ID NO: 1966 - DNA, 365 bp, Zea mays
tcgtggagccagctcagcaggcagctcggtgaggttagcggagtacagttttgaggcgccaagaactagtttagaggtagaggtctattgtgtggcagtgaattcgtcaccgggattgaacacatgggactgggaggtggcttgccgtttggtacagcttagtatgctgacattttcaatattttgtactcggaatttcgtaacagtttatccttctcaatgtatattactattaatgcctgtttggatcacattaattgaaacaaatatctagaaattgtttctcattttattattaggttacttttcaactcctgagaaccaatcagggcattaatgtaatgaatgatgatgctacaggatcc

SEQ ID NO: 1967 - DNA, 514 bp, Zea mays
cgatgtcgtcgatcccatcgttcttctaacacaaccacggtacggcgtagcgtccgacttgcaaaatctcgcccaatgcctgtaatccagcgtgctcagcgcaacctctgcaaaaaagctcgggcttctaaacgatgaatccagtaactttgagaccgccttacaaaaattcttatccatgttccaggggaccctaccacaagaggttcttgcagccctgacgtctgccttcaacctcgatgggtcggcgaaggagaacttcgaggatgctttgcttgcgatggtagaggaaggaattgtggatctacaagatggccttggtagcctgcgcattgatgaactgcatgcgactgcgtgatccagcgacctgcgactaagggccttttcctctaattcatgttttcatcagacctcgatcctttgcctcatttgtgtgtcgaggtttcagtttgttgcatgtgctcgatgtatgttttggacatcttaagtgtggctcttttgtctgtctcgcgcc

SEQ ID NO: 1968 - DNA, 1062 bp, Zea mays
tgcaagcttcttgaccctagtaacatatattttccttcaaaagtgatttcaaactcagattgcactcagcgacatcagaaaggtcttgatgtgattcttggagctgaaagtgttgcagtgattcttgatgacactgagtatgtaagtgttattgttaaataactattttcagaagtatgtgtggtttctattcagtagagcaggctgattcggagcaattttattgtatgcaaccaaaagtcacattatttgacatgaattcagtggccaaactaggtcttaatgtctcattatagaatactccggtcatttgtaagtgtttctggtcagtaactgctatttgtttcctgtttgcttccaacatatagatttaaaagtagaaacatctatccacaattatcaaagcataatgattatcctcaatgtgtagaagctggtaggaccctgttattcgtgcttagagtgatcaagatttctctttttattgtcatttgtcatttatggctggccgccctgaaaatggaactttgtttcaggtatggcagaagcataaagagaacctgattctgatggagagatatcatttctttgcttcaagctgccgccaatttggttttggtgttaggtctttgtcagaatcgttgcaagatgaaagggagagtgatggtgctttggctaccgttttagatgtcttgaagcgcatacacgctactttctttgacatggttggtttcttcagttcaacgtttcatcacattttattgtctattcctcacagtagattggactcttgtaagaacagaagtttttcatttctaaccatctgtccttgtacctctcttatgtaggctgctgaaactgatctttcttcacgggatataagacaggtaggctttgtatataaccttcacgctgccttttatgctttaagaatcatttatgtttttcttaagagtagatgagttgcgtttaccagctttaaaataactgaactatagcttgcttaatacatcttttatgtggtgtggcttacagatttcatttgcaattgcctgtttcttg

SEQ ID NO: 1969 - DNA, 307 bp, Zea mays
tgcatccttgatcgcggaagctgctcggcagcgtgagcagcaatggcggcccgccccgttgtttgagtcacggcaacaacggccgcctccgtcgcgaaaaccgcagcaacagagccgcctctaactctctggctcaaccgccgccgccgcctaggccggcacaacgcgactagcgtcatctcaacgctcttgagtggcaaccgaaggcttgactcctacaaatgttcacggtaggccaaaaaaaactttttttttgtttggcggcgtggttgtcgacgaaaggtggccatcggcttgctgaggacaa

SEQ ID NO: 1970 - DNA, 1375 bp, Zea mays
  misc_feature (1361)..(1363): n is a, c, g, or t
ggggccgcctccttctactactacttgctgtcatcttcatacttgcttccgggagcgaatcacacgtcgagtccattattcttatttcatcatgctttcattaggaaatagtaattgcatatatagcatatatacaagcctgaagagtagttgacaccgtccggacacactatggtttatggctttatgcaccacagtaacactgcacacgcatgggcggacccacatagggttctaggtgggccatgtcacaccctaagtcacagcccaccaagaccccgtctcgtcctggtatctcctgcttcccagttcccttttgtccttcgcgactccagcgccaggccaccgccgccgcgtcctggatggcaggatgtcgccgccgctaccagctgccacacgcctggtatccacgctccactcctccacgcaccacgcgcaggcacgtagcccgtctcgtgtccagcgtccagcaccccgtgtccacagccgcacgtccaatcgtcccaggtttttaatttttcactacagttgcgttttttgtattttttaccggtgaagagatgttttcggccgatttttcaatttctgatcttttcatttatgtcgttctctgtcatgtcgtgaatcgtatatatacacacacgcatccgtgtctaaagttttattgtgctggattagtagtatatatacagattataatagaaatttagtcttaattgtgattacttaaaggagcaacattgatttgtctttaatagagcagggttgattatatagaattgtatattaaaaatttactacaccattgacacaccctatataaaaatctaggtccgccggcttacaatccaatgcacattatttttaatgattttgtatattgatatgctatggcagtgacttaaggaaaccttgattttaattttttaaacacctagcattaatgccacgtaacagatcctacttttctttttgcagagcttggttaatccagatcctcctcctccggtatatcgctggcctccatgaaatttgatatgcttatgctacacactacattaatgccacgtaacagatcctacttttctgtttgcagagcttcgttaatccacatcgtcctcctctggtatatcgcgggcctccatgaaatttgatatgcttatgctacacactactggagaaagtgcaatatgtactagttagcaatgcaactggctgcagtaccagattctcaacgatgctggatatctataactaaaaacccaaatctttagtccgggttgtatagatcatatactaaatagtgaactttagtacttgtttttggcttgaatatgtactaaaggatccgtttttagtannnagttctatagaa

SEQ ID NO: 1971 - DNA, 1175 bp, Zea mays
  misc_feature (405)..(406): n is a, c, g, or t
  misc_feature (456)..(457): n is a, c, g, or t
  misc_feature (459)..(465): n is a, c, g, or t
  misc_feature (468)..(468): n is a, c, g, or t
  misc_feature (470)..(473): n is a, c, g, or t
  misc_feature (476)..(477): n is a, c, g, or t
  misc_feature (479)..(479): n is a, c, g, or t
  misc_feature (481)..(481): n is a, c, g, or t
  misc_feature (483)..(486): n is a, c, g, or t
  misc_feature (495)..(497): n is a, c, g, or t
  misc_feature (520)..(532): n is a, c, g, or t
  misc_feature (536)..(543): n is a, c, g, or t
  misc_feature (550)..(556): n is a, c, g, or t
  misc_feature (558)..(576): n is a, c, g, or t
  misc_feature (585)..(601): n is a, c, g, or t
  misc_feature (605)..(612): n is a, c, g, or t
  misc_feature (618)..(619): n is a, c, g, or t
  misc_feature (621)..(627): n is a, c, g, or t
  misc_feature (629)..(630): n is a, c, g, or t
  misc_feature (632)..(640): n is a, c, g, or t
  misc_feature (643)..(662): n is a, c, g, or t
  misc_feature (665)..(665): n is a, c, g, or t
  misc_feature (667)..(670): n is a, c, g, or t
  misc_feature (675)..(681): n is a, c, g, or t
  misc_feature (684)..(698): n is a, c, g, or t
  misc_feature (702)..(703): n is a, c, g, or t
  misc_feature (712)..(719): n is a, c, g, or t
  misc_feature (721)..(731): n is a, c, g, or t
  misc_feature (734)..(781): n is a, c, g, or t
  misc_feature (785)..(785): n is a, c, g, or t
  misc_feature (787)..(829): n is a, c, g, or t
  misc_feature (832)..(842): n is a, c, g, or t
  misc_feature (844)..(859): n is a, c, g, or t
  misc_feature (861)..(864): n is a, c, g, or t
  misc_feature (873)..(887): n is a, c, g, or t
  misc_feature (889)..(901): n is a, c, g, or t
  misc_feature (906)..(911): n is a, c, g, or t
  misc_feature (913)..(932): n is a, c, g, or t
  misc_feature (936)..(957): n is a, c, g, or t
  misc_feature (959)..(982): n is a, c, g, or t
  misc_feature (984)..(998): n is a, c, g, or t
  misc_feature (1001)..(1001): n is a, c, g, or t
  misc_feature (1004)..(1004): n is a, c, g, or t
  misc_feature (1007)..(1022): n is a, c, g, or t
  misc_feature (1024)..(1025): n is a, c, g, or t
  misc_feature (1027)..(1039): n is a, c, g, or t
  misc_feature (1044)..(1052): n is a, c, g, or t
  misc_feature (1058)..(1058): n is a, c, g, or t
  misc_feature (1063)..(1065): n is a, c, g, or t
  misc_feature (1069)..(1075): n is a, c, g, or t
  misc_feature (1077)..(1078): n is a, c, g, or t
  misc_feature (1080)..(1084): n is a, c, g, or t
  misc_feature (1086)..(1095): n is a, c, g, or t
  misc_feature (1097)..(1100): n is a, c, g, or t
  misc_feature (1104)..(1106): n is a, c, g, or t
  misc_feature (1109)..(1116): n is a, c, g, or t
  misc_feature (1118)..(1120): n is a, c, g, or t
  misc_feature (1123)..(1133): n is a, c, g, or t
  misc_feature (1136)..(1141): n is a, c, g, or t
  misc_feature (1146)..(1155): n is a, c, g, or t
  misc_feature (1157)..(1160): n is a, c, g, or t
  misc_feature (1162)..(1164): n is a, c, g, or t
  misc_feature (1168)..(1169): n is a, c, g, or t
tcagcgaagagcacctcaagtcaacggtcggggtggacgcagtagtcaaaccagcggtggccgcggacaggggagaggccgagtgcaggaccggaaccgcacacccatttctgcttcagaccttgacgccgaactcgacaagtaccatgcagcggcagcgaaggaggaatgaggctctggcgttctcttctactaatctatttacacaggtggaaaggcgttctcttctgggggcgttcagaagcatgaagtttactatcttagccctagtgttctacgctagaattcttttcgaccaggattctgttttgtgtgtaggatgaacttgtggttctactttgcaggatcttatttgctgctttgtgggcacgaatattgagaacaactggaaaccgactttgtaannttagattagtagaagagaacgccagagcctcattcctccttcgctgccgnntnnnnnnnatngnnnnaannancnannnntaccaaggnnnaaaaaaaatgggggggcaggctnnnnnnnnnnnnnagcnnnnnnnntgggccnnnnnnncnnnnnnnnnnnnnnnnnnngcccccccnnnnnnnnnnnnnnnnngggnnnnnnnnacaaanntnnnnnnngnngnnnnnnnnnacnnnnnnnnnnnnnnnnnnnnaangnnnncgccnnnnnnngcnnnnnnnnnnnnnnngganntatcagcannnnnnnnannnnnnnnnnnagnnnnnnnnnnnnnnnnnnnnnnnnnnnnnnnnnnnnnnnnnnnnnnnnccgntnnnnnnnnnnnnnnnnnnnnnnnnnnnnnnnnnnnnnnnnnnngcnnnnnnnnnnncnnnnnnnnnnnnnnnntnnnncagaattannnnnnnnnnnnnnnannnnnnnnnnnnnccgcnnnnnntnnnnnnnnnnnnnnnnnnnngcgnnnnnnnnnnnnnnnnnnnnnnannnnnnnnnnnnnnnnnnnnnnnncnnnnnnnnnnnnnnnganccngtnnnnnnnnnnnnnnnnannannnnnnnnnnnnnccttnnnnnnnnntaattnatatnnnctgnnnnnnnanntnnnnnannnnnnnnnnannnncaannnctnnnnnnnncnnntcnnnnnnnnnnntcnnnnnnccccnnnnnnnnnncnnnncnnntccnnctcccg

SEQ ID NO: 1972 - DNA, 379 bp, Zea mays
tgcggctgatttggcgattagacccgcccgggttggatctgagataggctagctgcctgctactggttattcagtggtggaaaaatggttatggtgtagttttagtttaatctggttagttgagctgcaattcagccaggtgggactgaaatttaggagtgaaattaggtggcgtttggttcacagatgaaattttcaggagtatgaatgtatgatgggagaaatgtcgatttcttttatttattttggtagtgatatagtgaattagatactcatttgcaatatttggcgtgatggcaatgtactgtgtaatggcatagcagcgcgatgcacaaatcaaaacaagagctgaaggataatcttctccgcataagagatt

SEQ ID NO: 1973 - DNA, 392 bp, Zea mays
atttccccgcatgctctccgcccgctgcttgcttcgggcccgggtgttgcggttccgaggactccaggggcctgctagcgctcggatccgtggggttcgggctccgtctctgcgaattccgttgcggttcttcctcaccgagcggtcggagctgggggcgtcgagttctagggtttcgggctcgattgattcatgtcgttcgcgggggcgtttcttgttttgcttagtcttaaggtcatgcgaacacagctataggttaggagcttgatttgagctcactgttcgagtttgtgattggcttgcaacatccgagtcccaacccgtgtgcgggtgcgagtgcgagtctagtagactggagttttgtagctctccctattgcagcatctgattct

SEQ ID NO: 1974 - DNA, 378 bp, Zea mays
catttatttagattcacaagtcatgttggaacaaaaagtgctgtcggaacttgaattacctcctggcatccgatatgtgtatgctgtgcttttctaagatggttttttgttcgtatttctgctctgtggtcatgtggcagctgtaaacctctctgcctggactgtctggaattgctacatacaaaccaactatgttcgagtttctgaaccagcccctcttttcttttctgcagggtttctgtggaagcatggaggaacctacacattctgtatctgtacatcgtccaaccattggcgctgtcgctacgtgtgaagtacacaccgtgtacttgtgcagaccttgtaatttttacttgcctggtagtgggaaataaatcg

SEQ ID NO: 1975 - DNA, 249 bp, Zea mays
gctagcgcgagctaccccggttggtggtggtggtgaatccttcacttgcctgtggccttcacgcttcacggatccgacgcagcgaaccgcagtctgcacggatctgcatcatgccgtcgtccaccctcgccgactcgttgagcgcggacggctccacttcaacacctccacagcggcgccacagtgactccagtgctccatcgcccctacacggctgcacgtgatcagtcgaccacgtgtctggcacct

SEQ ID NO: 1976 - DNA, 309 bp, Zea mays
aaaagtcaacaaccagaacatctaatgtgtccagcaattccttgtcacgccaaagttcctaatagatgactcagaacgatagcaacgtgaggaaattcaacaatgtcgatgtgctttcgttttcagagctgttcatgattcgaagagttgcatatatctattgccttaaccacaaccctaactatgtacaagtacaaaggcgaaaaataccggtttatcctggttcattgtttgcttaaagtgcaaaccggcattggtaaacctcatacctttttttcacacttctgtccagaataaacattcaagagc

SEQ ID NO: 1977 - DNA, 418 bp, Zea mays
atctgctgctgttctcatccatgagcatctttgtcaaagtttcaatcttatgtgacatgctaactttgtgcaccacaagtagctgttttttttggaacacgcatgagagcgagtatcttatattaaagagaaggcagaaatggttcagtaatgacctttacaattaagccactcttacgccaccagtcgatcagaggggttgtaagttgtagcactgaaaaacaaagatttcccaaggattctaggataatgacccgataaagaagtggctgcttggtagttacaaacccacttctcatctcacagtggatcttttctttaagaaaaaaaaacagacttgtgggtcatttgttgcttttcagtctgcagtcacttcacttgtccatgttttttcagtagtcatattaggaactcctaa

SEQ ID NO: 1978 - DNA, 388 bp, Zea mays
gaagagcccatcccagggagcgagctctggacggatgggctcatctgtgcttttgagctggtcaagagtcacaggaagcctgttcagcacaaatcatggctggcaactgagcagatacaggagaagggccccactatgtgcacgaggaagcactcaagaaggaatgggcaccagatcactgagccgaaagtggatgagagcattgtgttggaaaacccccagcagactgatttcagtaacgatccttcagtgctcaaagataggccattgtatgctggggagattttggatcataaatgggtgcctattggatggaataggatcgccgagctggtcctgagggttcagtcagactccagctgggagaatgagttgatggagatgagtg

SEQ ID NO: 1979 - DNA, 386 bp, Zea mays
cctcaacgccggtgaggcccacctcttcctctccacactcccgctccctgtggttcaataccaccacccatgaggtcagtacagcgatgggcgaacgacgcaccgggtcgctgggtcgccggcgaggggcgaacgatgccatgctaagccgtcggcgaggggcggacaacgtggacataggcagatccatggagggcggcactgcaggttataggcaagattgcagggaggtcgtcagatcttggagtggagggagctgtcggtgtttggtaacgacggcacactacaggttgtaccacgcagtacttttgagaggacgacaatgtcgatctcagctcgatggttcgtgttgagcacgacgaaacacagcgaattatataggtttg

SEQ ID NO: 1980 - DNA, 760 bp, Zea mays
  misc_feature (606)..(607): n is a, c, g, or t
  misc_feature (686)..(689): n is a, c, g, or t
  misc_feature (734)..(738): n is a, c, g, or t
atactgctgctcatgttcatatttcaatttctccccaaggtctaccatagtatacacatcatgaggaaaatgcagaaggtgacaggttacatctttggatcgatatggtggggatttggtttaaatctatttgcctatttcattgcttctcatgtgagtattcccttcctcattagtcaattatactgtagaaaatacaggttaaatcttctggacatggaatcccagtgtcgctctcgtagtattgatatggttgctgatggcttagtattgtcactgttgttgatcataatattgctgaacatggaaactgccccccaacaactaaatcataaggattgattaagaaactgggtttctatctaatgtccaccaataaacatgtccagtgagttaaaattgtaaaagaacaaccttcatttttttttgcctaaataagaattcctgtctgcaattttttcggctcatccttcaacctatagaattggtactagacttaagactaatgcagaccgaataatctgggtaattcgatcattcatcaatgctctgccatttccagattgcgggtgggtgctggtatgttcttgcgatccagcgcatcgnntcctgcctccaggaagaatgcaagagaaacaacagttgcgatctaatatcgctagcttgttccaaggagatatgttttnnnnctccgtggtcatcgaatgttaacggattcgcgtgcgatacgaacnnnnnctcctttagccaacaaaatgtg

SEQ ID NO: 1981 - DNA, 385 bp, Zea mays
gggtggataagtctaagaactctaaacaaccgcagcggtatcactatgacccacagttgacacgagatttcggggtaaaggcaagagagaaaaggtaggttccgtctgccaaagttcacagatcaaagcactacatgccgtgaacagcactccccgcgtccggggaacggcaattctcggaggttcagacaggattggaacggagaagggtgaggaggaggccaaaatccagcatccccacccccctcagatcacacctggacgcccaaaccaaatcgaaattcagcaaggagaggatgtacctggcggaatctcgcagcagcccggtgccgatcgagccctagggtggagactagtcgaactcctccaatggactcatctgcta

SEQ ID NO: 1982 - DNA, 614 bp, Zea mays
  misc_feature (412)..(416): n is a, c, g, or t
  misc_feature (424)..(440): n is a, c, g, or t
  misc_feature (442)..(447): n is a, c, g, or t
  misc_feature (465)..(474): n is a, c, g, or t
  misc_feature (481)..(485): n is a, c, g, or t
  misc_feature (492)..(505): n is a, c, g, or t
  misc_feature (518)..(519): n is a, c, g, or t
  misc_feature (530)..(546): n is a, c, g, or t
  misc_feature (549)..(558): n is a, c, g, or t
  misc_feature (564)..(576): n is a, c, g, or t
  misc_feature (587)..(605): n is a, c, g, or t
gtcggagaagttggctgtgttgccaggatgtaatagaaaagggctcagaatgttgctgatccttgttaactggataatatggcggaaaaggaacgcaaggacttttgatcgtaggtttttgaccagtcagcagagcataacttcggttaagtgtgaggcgtcagcctggatggcggccggggctaggcaattggctactctcttaccttcgtcaacttagttgggttactacttgtgggttgttttcttagtgggctagtggcggagggatgcttaataagcccctgacgcacttctcatcataattgtattgactttcttgccttagagcattcctctctttattaatatataagggtttcaaaaaaaatgcatagcagataatttctggacagtatgtaggagatctggnnnnntgatctcnnnnnnnnnnnnnnnnnannnnnngctatgcattttttttgnnnnnnnnnnatattannnnngagaggnnnnnnnnnnnnnnagaaagtcaatannattatgatgannnnnnnnnnnnnnnnntannnnnnnnnnctccgnnnnnnnnnnnnnaagaaaacaannnnnnnnnnnnnnnnnnnctaagttga

SEQ ID NO: 1983 - DNA, 400 bp, Zea mays
atctcgtttcgggccatgccctcgatgtcattatctggcttgaggtttgtcgtggagaagcaaagggatgtttacatgtgctctattctaagtcttagggtctgggattaattgggtacgattcgttctagaggatgatgcgagtaagtgcttaagtgccctgctaattttttcagctacctctttcgaatttgttgtctacctgtttgttaggcaagcatggagtattcgcttggttctactcaagaagggaatcaaggaattcaggactttatgcactgattgtaatagtccaacgaaagagcggatccacatgttaaaaatctcagcaagtgttcctttctgacagagtttcaacttatgtgttactaatgtagaagggatctcaattacttgctga

SEQ ID NO: 1984 - DNA, 257 bp, Zea mays
agtggtgcagttttggtaagggtcctaggttcagaaatgttgcttctggccaagggaacttggggggttttgccgttttggtagctgccgctggtcgcctgtcgaaagtgtggcctcagctgaactgcatcatgaatctttggtgcagcgcatttaataggatgggtttgctatgtcagtgtttgtgtgttaggagtagcttgagtataaagctggttcaaaggcacgggacacctggcgctttgcctgctgctgct

SEQ ID NO: 1985 - DNA, 363 bp, Zea mays
ctcgcctctcgcccaccatggtgctcgtcatgtcgctctgcttcatcggcttcgtcaccgccctccacatcttcggcaagctctaccgctcccgcacggccgcggcctccgcgtgatccgatccggtccggtcccaccgctcttgtggatccacacaacggatcagactaccagatcagacggtgactttttttttgggtgatgaattatgtatggggagaagcccagcttgttgtgttgcctagcttttgcttgatccttactttctcaacttagatctcagctagatctgcagatggaaaccgtacatgtcatcttaatgggggccctttctgttattttcttctcttcccttaccctaaa

SEQ ID NO: 1986 - DNA, 559 bp, Zea mays
attcccttcttctctgtgattttgtttcatatctcgcagattagcatgtctcttgcgttctaaaagactaggagagaaacgtgtgtgaacattactgctgaaatatttttttaccaaacacgagttgaatcatttatgctactcaattttcttatgaaattcctgatgtacatacaaacactcatttgggttttcccattttttcacactcagcggctcttactgcaatacgagatactgtactactgtggatggtcgagaagcgagcagagcttgacggtcgttcgccgttggaacgttcgtgtgggcgacactgatggcatgatgcatctgtcagcaagatctctagttttttcacgctgttgaatcgacaggtatagcagacaaatacagaaaaagggctggcctggttaaaaaacggttcaggttagcaagcagtctggcccggttcacaatcgaaaaagggcccgtatcgagaagttagcttcacgtttgagagaaggtgtatgctctgcttccaatccagttattagctgcagcttctccttgtgtcgtgtgt

SEQ ID NO: 1987 - DNA, 237 bp, Zea mays
  misc_feature (83)..(83): n is a, c, g, or t
atttctaccgtttcttccttccctcattcctcctctccattacgagcagtagcagcagcgccattgatagtctctttgatgangccagtgaccctttcttcttccctccctctctctataaaaggcagcagagcctccccattcctgcctactcgagtttgcctctctctctagcactcctcgctcatagctagtgccattgccgttcgtcgccggagcccgtggagttcgccggag

SEQ ID NO: 1988 - DNA, 587 bp, Zea mays
  misc_feature (380)..(383): n is a, c, g, or t
  misc_feature (392)..(399): n is a, c, g, or t
  misc_feature (409)..(420): n is a, c, g, or t
  misc_feature (424)..(448): n is a, c, g, or t
  misc_feature (483)..(485): n is a, c, g, or t
  misc_feature (499)..(509): n is a, c, g, or t
  misc_feature (511)..(517): n is a, c, g, or t
  misc_feature (533)..(533): n is a, c, g, or t
  misc_feature (537)..(548): n is a, c, g, or t
  misc_feature (556)..(573): n is a, c, g, or t
  misc_feature (582)..(582): n is a, c, g, or t
tctgatctatgtgtaggagacattgtttgatgaatttgttgttgcccatatccttgggtggtttggcaaagctgtgatgatacgaaatcaacttctactttgggtcttgtcgatcggctttgagctactgaaactctgaaaggaagcagtagtagagggaggctacagcaccaggcaccgaccttttttttcctctaaaggatctttccgtgctcgctgaatcctattctgttcttttagcttcattcgtctccatggacagcacgacgacaagtctgctcttcacgcattctgacgaggacgacaatggggtgttgatctggcgatctgccacctactattgatctaatattaagtttataatttttaggggtttcttnnnnccataatgnnnnnnnngatttgatcnnnnnnnnnnnntatnnnnnnnnnnnnnnnnnnnnnnnnncaacccatacaaaattacattcatgccctttacannngataataattctannnnnnnnnnntnnnnnnnaaatagccttttcatntttnnnnnnnnnnnnctttctgnnnnnnnnnnnnnnnnnncctgcttanacctt

SEQ ID NO: 1989 - DNA, 479 bp, Zea mays
  misc_feature (471)..(474): n is a, c, g, or t
cgcccttctccggcggcgtcgcagtgagcccggcatggccatgctactccgccgccgactcccgctgctccgcctcctccggccgctgcatactggatcgatggcttcgatctcttcgtcctccacacctccccctccccctccccctcctcttcagaaacctcacgccgccttcgtggggccaagatcacgccgcctgcggttccccaatgccgcgcccgttgagtcggggcggggggctgggaaatcatctcccgctgccgcctatctcgctatgggcgcggccgccgccctcgcgtcactgccggtggcctacgcagacagcaatgagcaggttttgtcaattggcttttctaccattgctcgattttttttgtttttgtttttgtcattctgggagtgaggtttgcatgggttgagcacttgagcttcgtttgcgtttgcagggagcggtcgacacagtagcgagtnnnngatca

SEQ ID NO: 1990 - DNA, 345 bp, Zea mays
tgaagagcgcaaccaaggtctaaagatgctgtgttcacaacgcaggaggctgtcactgaaatcggagccgcggctgcctagagtagaaaatgcctgtgaaaaggagactaagcgacccaataattttcctctaagcgatgagaaactcaatgaactgccatcatctgaaccaatccccaaaggtgaacccgtggcacccagtgaactcccattttcggcgccagcagtcctcaaaagtcaaaccagggcccttggctctgctggtggacagaaagactccagctcaggcaattcctgtgtcaatgaaaacacgcttgccatcgagaatgctgttgtttcagacag

SEQ ID NO: 1991 - DNA, 476 bp, Zea mays
gattctggcagcgcttgtggtgatgataaatcgtcaagtgccaaagaagacttctgcaagtccggtgtttcagaaaacacccccgcaaagtttgcctccacaccagcgaggctaatggcgcctacgccaggcctcaagacgccaaagagaccaatctctgccacaggttatgataccccgcctctgagaacggcgaagagatcagctcgcgcgaagctgtttaccactccaacaaagaataacagtacgggtggagagagccaaagcgcaagcgtatctggcgctagcgccgacgacgacttgctcagcttccttccacagtccctccttcagtcggtaagcccctgctgatacctagaacggtttctcagttgactgtctggtgtgttatatgaacagagagtaacatgtgtgctactgcttacaggtgaaggagaaggaagacagggctttggtagagaaagaatccggttata

SEQ ID NO: 1992 - DNA, 367 bp, Zea mays
acatcagacttcagagaaagtatttagaaaaagagtatcacactatcccttggcttacatactaacataacatgctttctttcaggaggcgccttgaagggacaagaattaccactcaaaacatgcaagtttgctagacacttctcttgttttgctcttggactatgctctgttgctatctactgcttacttgtgtgatggtactgcagaggcaagacaggatttgactttgcaattcgaacaccttgcacgccatcgagatgggaggagtatgatgaagaaatgactgcagcctgggaggtacagttcaaatttattgtaatgttgcttatgacttttttttccccgagtttggagaaggtttgat

SEQ ID NO: 1993 - DNA, 254 bp, Zea mays
agggtagtatatgtgcattcatcgtttttcattagccttgattaggccaaagtgatagtttatgcttggtcatcgagagtttggtgatcagacgatgaagattgtgagtggcacaacttaagaggtaaacagttgtgtgattcaacatagtagagtgacaaatgatcgactcatagagagccctcgtatgagacgtgagcgacactccttcataggtgttctaataaggattagttagaagtgtcaactcttga

SEQ ID NO: 1994 - DNA, 405 bp, Zea mays
gttcagagcattggatcatggagtggacagaccatcttagatgatgagatcctggatgaagaaaacacaggagtgtctcctggttttgttcccagtctagatgttctgatggacaggaccgctaagttgaaacgatatcttaactccaaggatttccttgatctttggaggagtatagcggaaggctttgactactacatctacagcagcatacgatgggccgaagtaagtttctctgatcctggaatcgcccagctaagagttgatataaaagcccttctccacatctttaggcccttctgttcaagacctgaagcttttctcccttttctaagtgaatccctgaggttgttaaccatgaaaaaatcagatgcacagtgcttgctggaaacactaatggatgac

SEQ ID NO: 1995 - DNA, 1043 bp, Zea mays
  misc_feature (999)..(1035): n is a, c, g, or t
tcttttataatacacagggttaatatctttggactttaaaaaattgaaaccagcaagaaccttgtctctgaatatcaatatctcaatatttatcatctcaatgtccaaatgctgatttcaacatccttcctgcagagctgtttgttttgcagtagtagccatacttgttgcattggtggcatctagtccaacgaaaggctggagtggccgcagtttgagtctacttgacccgtaagttcttctagaataaaaatacattttattttgctgatcatgcatggctgacctgacttgggaactaataaacatgaaataacacttaatgatgacttggctgttattaggttttagtgtatctgacgaaatgatcttgacatttgatgcttaggatcttagacaaatataagtgtacatcaccaaattcaccattgcaacgtcttatttacctttctggtgttgctttgcatgtggcgtcctgtttcagcgtgtttgttctgcttttctcatattaatcgctgcaacttcaatcttgttttctgacagaacttatgcaagcaagtacatccccatcattgctagtgtcagtgaacaccaacctcctacctggccctcgtattttatggacattaatgtgttggccttcctgattcctgctgggattattgtaagaattatactttgttaattcaaactgtaccggcaatactcttagttctgattaatcgatttttacatgattcacagtcatgcttcttgcctctttctgatgcaagctccttcatggtcttgtacttagtcactgcagtgtatttttctggagtaatggtaagaatccttgcggtaggaagaatctcttgcacttttttttattatttacttgttataactttctgtggcatccatgctttgctaggtacggcttatgcttgtccttgctcctgctgcgtgtattttatctgggattgctctatctgaagttttcagtgtgctcacacgatnnnnnnnnnnnnnnnnnnnnnnnnnnnnnnnnnnnnnaaaaaaaa

SEQ ID NO: 1996 - DNA, 702 bp, Zea mays
  misc_feature (690)..(690): n is a, c, g, or t
atgcttcacctagtattcatagcctctccccttctgctttccatttttttttgtaactgaccacttgtcaatcggcagccacttttgaggatctttgagccaattctgaagaatgccagcaaagagttgcttcatggaagccacaccagatctgtttcaatctcaactccttccaatagcgggataatgaaatttgcaaagaaacaattaacttgccttgggtgcaaagctgttatcaggtgacacatgcactacattgcacagatgcaataactatgcaaccagtgcctataaactcttaaccgtttgcgctgcattttcaccctgcagtggtgccagtcagacactttgctcacattgcaagggaagagaagcagagttgtactgcaaaacagtagcaaatggtacgtgctgtacactctgaaatgcatctacattctgcctttggaagcactatgcccctgagctcaccactgacagatcaaaattttgatttccgcagtttctgacctggagatgctctttgggaggctatggacacaatgccaggagtgccaaggatctctgcaccaggacgtcctctgcacaaggttttctgttttcccctcaatccaacacctgctcattacttggttccagtcacaagcttaaaactcctcgtatgcaatcgaaccactgcagtcgggattnccccattttcta

SEQ ID NO: 1997 - DNA, 523 bp, Zea mays
ccctcttcttcgtctccaaagagacaaaacccaagagaggatcgtacgtcgtagggatcttgttcaatggcggacgcggacctgacaccaaaccactcgctcctcctcaagatgcctgcggcttcggcccacgcccactccccaagcctctcgagcctcctgttatacggccaggagagccatggcgaagcagcgcctgcaaacgcaaatgcaaatgcggcagcagcaacggtggaggacgccgcctcacttgagacctcttctgcagtggttgacagtgcatctccaatggagaggaagaggaaggctacagcagaagacagtgctgcaatcagctctcctcaaccaaaggtacgtagcaactagcaacttgcatacgcagcagccacgccattgccatttcttctgcaacattaaataaaaaaatgcattttggcttataggactgcaagcaggagagcaagagcaggagggggaagaggccccgaaaggagaccgaggagaagagcagcactgatgaaga

SEQ ID NO: 1998 - DNA, 372 bp, Zea mays
agatctcgccacgaacctataatgcaggcgaatcgaataagacagatggaaggggattgggtggcacgcctcacctccgtctctgggagcgggcggcactccatgagctgttcgatctgcgcatcaagaccaccgcatcccccgccgccacgcgaactcgcgaggtcctccatcccttccacggctgccggcgcagcacctgatctacctagctctggcggaaacttgtcgccggcgtgagcgcgaggggtagggagctcgcggaggggcgcgggaggagaaaagtggggcggcacggaggaaagggtgtaatgaagaggaagagggcgggagaatgtggggcctgcaagtcagtggctcacggtatcaacg

SEQ ID NO: 1999 - DNA, 350 bp, Zea mays
cgggggcccgggctggctgtttgctgtgaagaactttgctcttcttgtgctcactttgccgaatcacatactcttcaaccgcttcatgtgggattatgtcagacagacagatgccaagctactgctgacgctacctctcaacttgccttcgattataatgacagacatacttactattcgggtgttaggattgctaggagctatgtactctcttgcccagtacatgatatcaaggcgcataagaattgctgggatgagatacatttgaaataggtcatgtaactttctgaggtaaatctggttacaccttaccaagtcgctgcctgtagagtatgatttcctgaagccat

SEQ ID NO: 2000 - DNA, 220 bp, Zea mays
acggttctcgggtgccctgttggttggcagagttagagtgtgctcctctgctcctgcttcctggcgtggcgtgcatgtgtatggcgtggctagacagctagacccagaccaagaccatgcagtgggattgtgggaaactgggtctgggagtgcacaagcggccgtacgtgtctcgcgggccgagcatgcacgcatcttggtcagcagctaatctgatgta

SEQ ID NO: 2001 - DNA, 310 bp, Zea mays
gggcggtgacgaagagcgcgacaacgtagaacgcagatcgaagcgttctcgccccgaggaaggccgcgaccgcgatagagagcggcacaggtaccgcgacggcgaccggcaccgcagcagtcgggagcggcgggaccgtgaccgtgacgtcaaggagaaagagcagggcagggagaacgacaaggacaggaggagccgcgaccgcgaacgggagaaggaggagagggagaaggataggcagcggaggagtcggagccggtccgagcggcgccgtgatgacgaagagcgtgatcgctaccgtgaacgcgat

SEQ ID NO: 2002 - DNA, 779 bp, Zea mays
tctgtggtacttccggcatcgcgaactgaagtttaccaccgatccgttggctccttggcattccttttcctccagcagcggcaaagcctccatctttttgccaaccgacttgaggaatggggtgcatgaagctgcttggagtagacgcaagctttatggaaggtcagattcttgtttttcattaatccattcatgtatggagctggtcggctgttgaatcggtccctgtttctgtttctttttccttcataaatttttaaaaaatacttcatctggttattagatgcgtatcgtttctatttatatagcttccaattggttacatgcatgcagtttgatttgaatccatcggttctcgatacgcatccttgtttctgtttcttgttcttagtttcgttcacagtttttttttagaaaaaacccgggccttttcgttttactttatttgattagatgcgtattgcttttttcatgtgggtatatgtatgtttttttatttgaatgaatcgatttcgattgacatggatctcaatagacctcgtagttcatcctctcttcttttctctcgaaggataagttacatacacaatccagtctccattacgatatttggtccttaactacccagatttctgagcatactcgtggttctgcttctgcagaattctagtacttcattcccaacaagcaatcagataaaaacgaaaggagcaacttcaacagaacctgcggctccagtgattggaccgaccgatatttgcaaactgctgaaattgaat

SEQ ID NO: 2003 - DNA, 696 bp, Zea mays
taattcccttgatcccaaacacgccctagaagaaaatccttcatcttgtgttctgatgtgccaaatcacaagtttcacaccagaaatactagaagaaagtccttcaccttgtgttcagatgtgccaaatcacatgtttcacatccctctctccaaagggcttgcacttaacgtggtgggttttttggcagtacatcacgtacaagcatattaaggacagattcggtgaccgcctatggcttgatgttatttccaaatgcgatcttttgggaaagaaagagcccataagttttcacgatgctgatgaagatgtagcacggtacagaagattggggccagaaggcgccctccaagtatctgtgcagaccgaaatcggcgtctaggaagtggcagtgctgctgcaggtgcttctggagggagtaaatcatcggggggtggctcagattttggatatggttcagcgagcaaggagttatagaggatgatgaccactcaccaccgtaagatcgatatgatccgtcccaaggaatttattcctgccctttttgttatcgcgtgttgttttattaccacgcaccagtcaatagtgtggaggcaatatacattgattccccttgactggacaatacaaagataaccttatgtatttcattttttgcttacttaacattgccatgtaaaccagaatagctgagga

SEQ ID NO: 2004 - DNA, 271 bp, Zea mays
  misc_feature (261)..(261): n is a, c, g, or t
tctcttgatttgagaaatgatactcaagctcgatctaggtgatcgcttgagagagggaaatggttgaaagagacctgtcctaagtggactcctcaatggagacataggtttcctttaggaaccaacctctgataaataaactacctgtttctcttgtgttgtgatttacttgcgatttacttctcccttccctcttctaagttctcttgcttgtgtttgattcaaattcatgtattgctcccgaagcaattccgcaatcanaaagagcaag

SEQ ID NO: 2005 - DNA, 361 bp, Zea mays
atctagccaaccttaccgtctgatgcgcgcgaggtgcgctgcgggaatctgggatcgaggctgcggcatcaggccacacagctgccatggcggtttatggtggttctccggtttgagcgatgctgacgcggtggttcttcaatttgggtgatgagatgctaactgatgcctctgcggatgtttggatgtgcccgtgtaggtatcttgcgtgactcgatgcataagctctggccacccgtggaaagcagaagacttggaggaagaagcgaaagtaatgattgtttctcttccatatgtttttgtcatttggattcatttagctttgcttttgttctatagtttatggtgcttcttgattaga

SEQ ID NO: 2006 - DNA, 235 bp, Zea mays
tattgagagaaagttcttgcaccaagacgtgtggcatcaaatgataatgatcaaagcaatattgctggatcaaggattgtcttaccaatagtcagtctacaatcagaatacctcaaagctgatcctgagaagagtgaggcaagcaaaaatgtacctattattaataggtcaaaaaaggtatcaaaggtaatatcttgatatcaaatgttgtgaaaatatatataatatattttgt

SEQ ID NO: 2007 - DNA, 244 bp, Zea mays
tgtttaggcaccttataactataaatattcttagcgtttgattcattttttccttttggggctgacctaacaacaaatgttagatgatgacactatctgctgcctatctgagtgttgtttgggttcctgactgagcattaccattgtaacgagaaagcgatgtaaaagcccttgctgctgtgctgacgaaagaggattcctttccaatgttacacgatgagtccggttgatttgtgtaacatgt

SEQ ID NO: 2008 - DNA, 367 bp, Zea mays
cgagagaaggtgccaaatgacgccaaaaggggtaacaagatctacaagaaagagcttgctctttctctgctcctgctcaccgctgcgactcggagcctcttgtctgctcaggggattcatttctacttccttctgttccaggggatgtcattccttgccgttggcctcgatctaattggtgaacagataagttgattccttgcatgctattgttcttgttcagacagcatgggaatcacacatatgttcatacatacagtgatatcaaaattctaaatttcccattcatggtttagcgttttgcttcagaattgcaaccctgctcaacgacaaaggggagcgcaactgcctccagaaagcccaacag

SEQ ID NO: 2009 - DNA, 371 bp, Zea mays
cgtcgtccacacccggcctccaccattgctgggcctcgtgggtcgccgtattcttctcctcctcgccgtcgcgcggctgggaagctcatgtccgtcctgcctgcccacgcggccatacgcacggcagccagaaacaaaagcccaagtcctgtacctccaaacgtgcgatttgccacattttcaaccaatattgtcatgaccttctgacagttaagcatgcagaaagcacattttcaataatctggaggcagactctattggcatttctttcttcaagacaaccaactgataaataaatttcatctcccgattttcaatatctgggggaacaaatgggaggacaaattcttgcacttcgttacagaccagtg

SEQ ID NO: 2010 - DNA, 807 bp, Zea mays
  misc_feature (756)..(757): n is a, c, g, or t
cctcctttccttcaatcaagtccatttccactccctgtctaccctctccctcgtctctggtgggcggtggcctcgcctccctttccccgtcgccctgatggctccctctgcagctctcgctccggtggccttccgctccgccttctcgactccgctcgcgtcgaaccctacccgtaagtcccgaagctccagcttttacgccccattttggtcggttcttcctcgagttacgatttggaggcgggagtaagtgagaaatctggaatcggttcctccccaacggctggacagcgcattatccatgtgctgagtgtctgatttggggtagagttccattggaggtagggcgtcgaccggggtcccgtgcgggagcatcaggcgcggtttggtttcgttgggacttgtgagcagctatcactgatggtagccggctgcctggcttggagccgttgagctcgagtcagaactgtttatcttggaacgattactcagctggacctgctgatgaacaattacgagcatgagaaaattactctaggtttttagattgactatggactcttgttgctttgttgaacacttgaaccaaacttctataaaatggactcttgcgcacttattctagactgacattcttttgtaccgagtcaccagtgcatacatacttgctgataatttgatgttggattgggtaacatctgaacatcttgtgcccactcttgactgttgttcaggtaatagaataaacatagaagnnactttctgtttgccgtgttccgcaaggaagagagctagttatagatcttt

SEQ ID NO: 2011 - DNA, 369 bp, Zea mays
tttggctagccaaaataatggaaaagggaaatataatgtgacaggtgcctattttgggtaaaatgttagtctatacatgctaaacaggcctttgccagtgatatcgtcatcgctactatgtgccctcactctttcacagcccatcatatgttcataaatcaagggcagaccatcaaagattaagagcctctagggtcttgtcctccgttcccaagttcttattccttattttttctctgcaatttctcttttgtaagcctgcaactattctttaaatttgttgctctcttcaaagtttacctttctcttcaaagctttctcctatcggaagcaactgtctagcttgattttaaggtctatgcacccttc

SEQ ID NO: 2012 - DNA, 443 bp, Zea mays
actttcttccctgcgcgcggcggcggcggccaccaatggaagacggcggcatgtgcgagctcgtgatcggcgaccaccgcaacctccggcaccgcctgtcgggagccgaggacctcttcagcatcgtcgggacgtgggaggagcgcacgaacggcgccagtggtggtggtggtggtggaggcggttcttctgcggctgctgcccgagcatatagccagggctgcactgctggcaccgtgggagctaaaacggcggctgggaccaacaacagccggcggcgcacgggcgacgaggagaaaggcggcagcgctcccgcgcagaagaagcacaagggttcgtcggcggtgtcggatgacgagggggcggcgaagatgtcacacatcgcggtggagcgcaaccggaggaaacagatgaacgagcacagggcggggtttttggggggg

SEQ ID NO: 2013 - DNA, 372 bp, Zea mays
  misc_feature (206)..(340): n is a, c, g, or t
  misc_feature (346)..(367): n is a, c, g, or t
cctctatttttgtttcgtgtagttctcctcacaagcttcctgctactgttctccgaattcggctggtgggtgagagaaataatttgccgcatggatttggtttggtctgcgcagatacgggcgcacgaggtggcgatcgcggagctagacaacctgaatccctcccgggtcagcctcttcccctctgtctccctcccttgcttgcnnnnnnnnnnnnnnnnnnnnnnnnnnnnnnnnnnnnnnnnnnnnnnnnnnnnnnnnnnnnnnnnnnnnnnnnnnnnnnnnnnnnnnnnnnnnnnnnnnnnnnnnnnnnnnnnnnnnnnnnnnnnnnnnnnnnnnnttatannnnnnnnnnnnnnnnnnnnnngaact

SEQ ID NO: 2014 - DNA, 344 bp, Zea mays
ctcttggtgcgtgctcatatcatggccaagatttgctcatgcctctttccacttcaagcatgcatatgcgtcgtctctgctggcagcccggccgttctgacgctagctgatcgatctactccatcaccgagctggctcttctatggattattcgtcctcgtccaccgtgggacgccatgatagcaatattaagctagcaggtttggtcgatcgatcggctcgtgtcgtgtgtgcctggctccctgtatgccacacatgtagccaacccgtggcgtgattggatgctgtgggtggcgtgcaaggagccaagcatgcataacaggccatgatcacttcctctctat

SEQ ID NO: 2015 - DNA, 1389 bp, Zea mays
  misc_feature (62)..(64): n is a, c, g, or t
  misc_feature (242)..(242): n is a, c, g, or t
  misc_feature (244)..(251): n is a, c, g, or t
  misc_feature (262)..(262): n is a, c, g, or t
  misc_feature (269)..(269): n is a, c, g, or t
  misc_feature (302)..(305): n is a, c, g, or t
  misc_feature (316)..(320): n is a, c, g, or t
  misc_feature (337)..(338): n is a, c, g, or t
  misc_feature (340)..(341): n is a, c, g, or t
  misc_feature (343)..(345): n is a, c, g, or t
  misc_feature (348)..(353): n is a, c, g, or t
  misc_feature (355)..(356): n is a, c, g, or t
  misc_feature (362)..(365): n is a, c, g, or t
  misc_feature (367)..(367): n is a, c, g, or t
  misc_feature (379)..(380): n is a, c, g, or t
  misc_feature (390)..(392): n is a, c, g, or t
  misc_feature (395)..(395): n is a, c, g, or t
  misc_feature (400)..(401): n is a, c, g, or t
  misc_feature (404)..(404): n is a, c, g, or t
  misc_feature (411)..(419): n is a, c, g, or t
  misc_feature (422)..(435): n is a, c, g, or t
  misc_feature (438)..(439): n is a, c, g, or t
  misc_feature (441)..(450): n is a, c, g, or t
  misc_feature (452)..(457): n is a, c, g, or t
  misc_feature (463)..(480): n is a, c, g, or t
  misc_feature (490)..(498): n is a, c, g, or t
  misc_feature (500)..(500): n is a, c, g, or t
  misc_feature (502)..(504): n is a, c, g, or t
  misc_feature (508)..(513): n is a, c, g, or t
  misc_feature (515)..(519): n is a, c, g, or t
  misc_feature (532)..(541): n is a, c, g, or t
  misc_feature (544)..(549): n is a, c, g, or t
  misc_feature (557)..(559): n is a, c, g, or t
  misc_feature (565)..(566): n is a, c, g, or t
  misc_feature (571)..(574): n is a, c, g, or t
  misc_feature (576)..(576): n is a, c, g, or t
  misc_feature (584)..(587): n is a, c, g, or t
  misc_feature (592)..(594): n is a, c, g, or t
  misc_feature (601)..(603): n is a, c, g, or t
  misc_feature (605)..(607): n is a, c, g, or t
  misc_feature (609)..(611): n is a, c, g, or t
  misc_feature (616)..(622): n is a, c, g, or t
  misc_feature (631)..(648): n is a, c, g, or t
  misc_feature (652)..(653): n is a, c, g, or t
  misc_feature (655)..(656): n is a, c, g, or t
  misc_feature (664)..(671): n is a, c, g, or t
  misc_feature (673)..(674): n is a, c, g, or t
  misc_feature (677)..(678): n is a, c, g, or t
  misc_feature (684)..(685): n is a, c, g, or t
  misc_feature (688)..(688): n is a, c, g, or t
  misc_feature (691)..(697): n is a, c, g, or t
  misc_feature (700)..(701): n is a, c, g, or t
  misc_feature (707)..(711): n is a, c, g, or t
  misc_feature (716)..(717): n is a, c, g, or t
  misc_feature (720)..(720): n is a, c, g, or t
  misc_feature (722)..(722): n is a, c, g, or t
  misc_feature (726)..(731): n is a, c, g, or t
  misc_feature (734)..(735): n is a, c, g, or t
  misc_feature (742)..(742): n is a, c, g, or t
  misc_feature (744)..(746): n is a, c, g, or t
  misc_feature (749)..(750): n is a, c, g, or t
  misc_feature (752)..(757): n is a, c, g, or t
  misc_feature (759)..(759): n is a, c, g, or t
  misc_feature (761)..(762): n is a, c, g, or t
  misc_feature (765)..(768): n is a, c, g, or t
  misc_feature (770)..(774): n is a, c, g, or t
  misc_feature (779)..(779): n is a, c, g, or t
  misc_feature (781)..(789): n is a, c, g, or t
  misc_feature (795)..(810): n is a, c, g, or t
  misc_feature (814)..(816): n is a, c, g, or t
  misc_feature (821)..(825): n is a, c, g, or t
  misc_feature (840)..(840): n is a, c, g, or t
  misc_feature (842)..(848): n is a, c, g, or t
  misc_feature (856)..(857): n is a, c, g, or t
  misc_feature (862)..(862): n is a, c, g, or t
  misc_feature (869)..(872): n is a, c, g, or t
  misc_feature (879)..(886): n is a, c, g, or t
  misc_feature (889)..(900): n is a, c, g, or t
  misc_feature (904)..(917): n is a, c, g, or t
  misc_feature (919)..(924): n is a, c, g, or t
  misc_feature (926)..(931): n is a, c, g, or t
  misc_feature (935)..(940): n is a, c, g, or t
  misc_feature (942)..(944): n is a, c, g, or t
  misc_feature (948)..(960): n is a, c, g, or t
  misc_feature (966)..(969): n is a, c, g, or t
  misc_feature (971)..(974): n is a, c, g, or t
  misc_feature (977)..(980): n is a, c, g, or t
  misc_feature (982)..(988): n is a, c, g, or t
  misc_feature (991)..(993): n is a, c, g, or t
  misc_feature (995)..(996): n is a, c, g, or t
  misc_feature (998)..(998): n is a, c, g, or t
  misc_feature (1002)..(1002): n is a, c, g, or t
  misc_feature (1005)..(1012): n is a, c, g, or t
  misc_feature (1018)..(1024): n is a, c, g, or t
  misc_feature (1026)..(1039): n is a, c, g, or t
  misc_feature (1047)..(1048): n is a, c, g, or t
  misc_feature (1051)..(1064): n is a, c, g, or t
  misc_feature (1066)..(1073): n is a, c, g, or t
  misc_feature (1076)..(1099): n is a, c, g, or t
  misc_feature (1102)..(1103): n is a, c, g, or t
  misc_feature (1109)..(1111): n is a, c, g, or t
  misc_feature (1118)..(1120): n is a, c, g, or t
  misc_feature (1131)..(1137): n is a, c, g, or t
  misc_feature (1141)..(1166): n is a, c, g, or t
  misc_feature (1170)..(1199): n is a, c, g, or t
  misc_feature (1201)..(1211): n is a, c, g, or t
  misc_feature (1217)..(1222): n is a, c, g, or t
  misc_feature (1225)..(1228): n is a, c, g, or t
  misc_feature (1232)..(1232): n is a, c, g, or t
  misc_feature (1234)..(1244): n is a, c, g, or t
  misc_feature (1252)..(1257): n is a, c, g, or t
  misc_feature (1261)..(1274): n is a, c, g, or t
  misc_feature (1276)..(1280): n is a, c, g, or t
  misc_feature (1282)..(1284): n is a, c, g, or t
  misc_feature (1286)..(1289): n is a, c, g, or t
  misc_feature (1291)..(1301): n is a, c, g, or t
  misc_feature (1305)..(1305): n is a, c, g, or t
  misc_feature (1307)..(1314): n is a, c, g, or t
  misc_feature (1316)..(1319): n is a, c, g, or t
  misc_feature (1322)..(1326): n is a, c, g, or t
  misc_feature (1331)..(1332): n is a, c, g, or t
  misc_feature (1335)..(1356): n is a, c, g, or t
  misc_feature (1358)..(1360): n is a, c, g, or t
  misc_feature (1362)..(1364): n is a, c, g, or t
  misc_feature (1366)..(1368): n is a, c, g, or t
  misc_feature (1374)..(1385): n is a, c, g, or t
tgaacgcggtttggaggtggagaggaggcgccttctcatgtccgggctcgtgtcttctttcnnntcgtgctcccgatttcaggtagtgttcacgggcctccgctcctattgattcgttgctatcgcacttcgccagttcagggtcttctgaatggaacatctatcattttttactctctgctaatgtccactaactgaatttgtcaggcatgtcagtagagcacgacgcgagcacacatccnannnnnnnnttttcatgagntcaattntaccaaggataacttcctctgtgaactcaatannnncttgctagatnnnnngtgctttcccgcgcttnncnnannnagnnnnnntnnacatannnncnacaaaggaagannatttcttgannnatntctanncancatatannnnnnnnnacnnnnnnnnnnnnnntgnngnnnnnnnnnnannnnnntacccnnnnnnnnnnnnnnnnnnattgcaattnnnnnnnnnanannnctannnnnncnnnnngaacggagtactnnnnnnnnnnaannnnnntattttannnatatcnnacaannnntnactccggnnnncaccnnntaaagcnnncnnntnnnatgannnnnnncctataaannnnnnnnnnnnnnnnnnctcnnannctttaatnnnnnnnntnntcnncccccnnatnttnnnnnnnctnntttttnnnnnttttnnaancncctnnnnnncgnnacttcantnnntcnntnnnnnnangnnatnnnntnnnnnttcangnnnnnnnnnaactcnnnnnnnnnnnnnnnnttcnnnccccnnnnnaaaatttttcttggncnnnnnnnatattacnncctcnccccacnnnncaaccannnnnnnntannnnnnnnnnnnaaannnnnnnnnnnnnncnnnnnncnnnnnncccnnnnnncnnntccnnnnnnnnnnnnntcctcnnnnannnncannnnannnnnnntcnnntnncncctnacnnnnnnnncctccnnnnnnncnnnnnnnnnnnnnncttagtgnnctnnnnnnnnnnnnnntnnnnnnnnctnnnnnnnnnnnnnnnnnnnnnnnnctnnccttcnnntcccccnnncccctttcatnnnnnnncttnnnnnnnnnnnnnnnnnnnnnnnnnnctcnnnnnnnnnnnnnnnnnnnnnnnnnnnnnngnnnnnnnnnnnccaaannnnnnccnnnnactncnnnnnnnnnnntctccccnnnnnntcannnnnnnnnnnnnntnnnnnannntnnnncnnnnnnnnnnntctnannnnnnnncnnnnctnnnnnttctnncannnnnnnnnnnnnnnnnnnnnncnnncnnntnnntacatnnnnnnnnnnnntgac

SEQ ID NO: 2016 - DNA, 351 bp, Zea mays
gtccagcaccagcaccagcacgtcgtcatctgaataacccagcccagtccttggactgcgagatctctgaacccccagctcatcagctcacaggcacaaaggagaacagtcttaaggtgaaactgctgcaagcaaggctagaggggcagcacgctcggctgagcgcgtcagtgttccccctgatcagcacaagaaggaagtgatgccactcgtgagcttccatgatttcgatccgcaacacagagttgcaattgtaagatagctgaatattgttagctcgaggcaattggactcggtgtgaatcctagatccagccgcgtatgttgtagatttgatctgctaactgccaga

SEQ ID NO: 2017 - DNA, 441 bp, Zea mays
tcttaagaggtcggaacaaagaagaggagaaaatgtattgaatgtggtgaactaggccagatagccaaacattgccatggaggtcctacagctaaagagaagaggagggtctcttcttcaggaaatacaatagccatgagtaacaatgatccaagtgaagcacaaacatcaaagtaatcattgatttctcattttctgaaattaacaatttacttgtcaactaattcatttttgctttgtaatatgttatgctagtgatagtgcaagtgcagctcctgaaggaagaggaagaggaaggggaagagggaggctagcaacattacttgggcttgaatgattatgagacttatatgctaggtgccttatatgttaggtgccttcttttgtatgaacttgaacatgtgatgattatgggacgtctgtaatgattatgaggattct

SEQ ID NO: 2018 - DNA, 660 bp, Zea mays
ccgtcagcatgagcgaccgcaggtacgggtactcgtacccgccgccccagggtaagctatatgcagaagcagaagacaacggattatactactaccgcgttcattcagttacatgcaccgcatgtatgtatggtaattgcttgactattatatatgctcctgggaacgcagggtactacaacaacggaccaccggtgatggcgccgccgccgtaccagtacgcagctcctccaccgccgaggagggagccgagcttccttgaaggatggtaagcagccacgcgcgcacacgatctactagctagcttgcttggagcacgaaaactagctatgcccggcccattggagagagatagagagagaggggaaaaattagtatttggataaaaactaaaccatcactaaataatctgaacagttcgatgtttctcatttcactcgatcttggacacatgaatgcagtctcgccgctctgtgctgctgctgcctcatagacgagtgctgctgcgacccgtcggtgatattcgtgagctgatccggccgcagtccgcagcacatgccatgccaccgtcccagcccaagagacatgtcgcatgcatacgtgtgtcggtgtgtgttcgcatgcacttcgcgcctctgttggtgatatatgatgtttttt

SEQ ID NO: 2019 - DNA, 331 bp, Zea mays
actgtatcccccctcctctcgctaaccctttgtctccttcccccacaaaaccacctccgccccctcctcccaccagtacctgtgagttgtgagctccttgctgcggctgcttgctcccctcatctctagcctgtacactggttggagtggttgccagtgttcccccccacctgctcctctcgatccactccatcccctttggccatgggtgtgcaagcatacatctacggtaattgcatgcttctcctgccttgaagcggaagccttagccttagcctgccgcctgggggaaaccttctgtttcgccgctgccgctgctgtggtataaagg

SEQ ID NO: 2020 - DNA, 814 bp, Zea mays
tttcttgtgaaattatgttggatttcctaatttattttgagttcactaccaattgcatgtcttaccgatttagtaatttgtgaattgtgcagtcagatattttgttcagaatgatgtttttatctgtcgaaatatcttctgtgcgatttatctaaatcaacatattattgcaggaatgcatcaaaagagaaagagattaacctcctgaggaaatcgttggatgataccaaaaaaattttgcatgaaaaggagcaatgtttactgaaagaacaagtacttcttaatcagagggatgacagcatccttgagagacttgcgtacataactcgctcagagaaaaggttggaggaggaaaagttaaatctcgaagatgaaagaaaggttcttttggaagagaagaataagctggatttgaacatacaggcaattatatccagggaggaagtatgtgttgtttcattttattcttttttagctagcagaattgcattatgaagcttatgacagaagtttgtttcactcttctattcttagcagtttgttactgagattatgacacaaaatgctatattgtaggctataattcagaaggaatccatacttgacaaacgtgaaagtgaactattgattctccaagagaccattgcaagcaaagaaagggtatgattttctagtatcatccaatgtggcacagtttatcttgagtccatacttctgaatcagtgtttatcttgagttcacacttatgaaatctgaatcattatgatatttgctgtaggctgaaatagaaaggctccgtcaagaggaagaaatg

SEQ ID NO: 2021 - DNA, 315 bp, Zea mays
ctgcacttctgcctgcaagagctcctgctgctggtggaacatagtagctagtagtagctaggtgaggaggagaaccagcccggcgaccagcgaccagccctaagattagctcgttccggttgtgcgagccggcgaccagcccggcgctggcctccatccccctggcgctaccagatctcaagatccagattgtttctaagcaattccagattctttctatcacacgtctcttcccctctctctctctccctactctcccctgccggcttcttggctttctctctccactctactctgtggtgtgaactgtgaaga

SEQ ID NO: 2022 - DNA, 382 bp, Zea mays
ccttcgccgacctctggacccgcaacggcctcttctgcccgccgtctccctgccagttctaggcagggcaggtgcagccgggcaggatgctcgccgtccaataacacggccggcggcgccacgccatgcacgtacccttgcatactgtattaattaaccactagatttagctttagctactactaccaccaccacccagaaaaaaaggtcatttctaccattaacgagaaggcaaaagcagctcacgcgagaccgagatcgacgctattatcggaggtccccggccggcgagctgcatcttgcatagttgcatgaatttagtgcttaattaaggtgagcgcaaagaaggctatgcaagatcatttgctgttgctgctgtaaa

SEQ ID NO: 2023 - DNA, 301 bp, Zea mays
agctagggagttcccttgggagcacccaatgaccgacgctgctggtcagggagggggaggaggggaaggtggaggttccatgaatggctatggttcaggatctggctccggctacggatccgctggagctaccaacactcctggtgggccgtatgggaccggtagctccatggctagtgtagatggcggtggcggcggcggcggcgttaatggtgggtctggagctggttctgggtcttcggcaagtcgtagctacactgttggcttctatggtggagggtactcagatgcacaaggcagg

SEQ ID NO: 2024 - DNA, 247 bp, Zea mays
gttgctgctcttgtaggatctcggccactactccctgtctctggctccctgctggcggcaagcaatgaagcaagtagcaacaatcagggcagtactccaatagtattctctccactctccaacctccaattgctgtccagttcaaccggcaccatgtctcagcaagagaagcaaacaggcatgtattcttcaatagatgttcatgtttatactctttttttttgcaaatccgctaaaaggtttagct

SEQ ID NO: 2025 - DNA, 406 bp, Zea mays
agatcgatctaacaaaataactcagatctgtttgtgtgtcagctcgacaagtgcagttaatactagcatgcttgttgtcggcacctaaaaacagtgaagcaggtaacgatatcaatttgatcttgcgtccaactatttcaatgactgaaaatacagtacatgtcatagctgcattctgggtgccatcctcgatcatggaaaacaacattctctatcaaattatatctcctcatgtaagcaaatgtagcctcttcttctgtaatatgattagtttgaacattgatactgaattatatgcacaaacatacagtaggctattattctcttttgtgcaggatggtgctcaaattttgaaaaatagatgtaggtgatccaattagattttactaccatggttcattgagcg

SEQ ID NO: 2026 - DNA, 317 bp, Zea mays
gtgtccaatgacaacaacctgcaagttgctggtgttggcaaatattatgtagtagatctttttcttagatatgtacttttgagtatggttatgaggattttcatgggtctggttttgcttttcatgttataattctattagtcttcctgtttgcatgagagtaaagcagttgttacccccaagaaccatatgctacatggtcaagaaagctgagagcgggtggtggccaagactgctgaaaaggaggccaaggcacctgtgttcttgaaggctgactaggacaaatggcaggatgaggatgatcaagatgttggatg

SEQ ID NO: 2027 - DNA, 335 bp, Zea mays
ggatatctgatttttatagagaatcctttactttccattggaagatgttgtgccttatttgtcgctaaaaagtttttggttccttatctgccaaccactcttaactttcttatccaccacttctataaatttctcagttagttgctgttaagtggtaccgaaatagacttttttgccacttccatgtgtacaccatgtagtaagataagatttgtcctggtttccttctttaccactgataatgtaaacatatgactattctggactttgtatgacgccatgtacagatgtggtctcttacatcacttttaataaagtgcatacatcagcacaag

SEQ ID NO: 2028 - DNA, 412 bp, Zea mays
attctgatctatgatcacagaaggaataatctttggtatgtacaacttgtcagttcgatcaactcttatgtataccttcttccatttgatatgagaatgctcggtgaaaaactagagacgttttcctcaactagaacaattcatcattggacagtcatgcaactattgagatcaccaatcctggatccactctggagcagtgagatcatctgggtcttcaatcggcacggaaggagatgcggacaagtcctcattaagagtttctatacagtagttgatgcgctcagtgatttcttcaggtgctgcacaagtcccagatgctattcgctcccaatcagtgccatcaaaccaggggtgtttcttcacagcttcagcaccactggttccaaggcgcgcgttttcgtcgaccacg

SEQ ID NO: 2029 - DNA, 395 bp, Zea mays
ttgccgaggagctcgtcggagaggtccctcggcaccacctgcaccaagccacagctgctgccttccgaggacgacgagtccgccgcttcctcggcagacggagacaggtcgggcggcaggctcatgaggtccagcagcgacggtgatggcggcatgctggctcctgtcctgatcaggcaggcaggcggacagtaagaatgcatgaggaacaaacaaggatgggtggatggagatggataggtagatagataggtgagctgttgtactttcttggtagcggggcaagatgcctgtggtgtgggggcactgcgcggatggccggatgggacggacggaggggctcctgctgcctgctgcctgctggcttgcttgttgtctttgggtagatcaaaaaa

SEQ ID NO: 2030 - DNA, 371 bp, Zea mays
  misc_feature (18)..(18): n is a, c, g, or t
gggacgagtcctgctccnagtgaagaggcgacacgagcgggtccttctgggatgtcacaagtggcaccggcgcctcattcatgtgagtttgtttcttttccgtttatgcttctgcaactgttgtagatcgttatctgaaaaaaaaacacacttggtttatctgtgttcaagtagactatgcacgttggaagtaaaacaccgtgcgaaggttaacaatacatgatgtttgtggtgtttgcagcttatgccaccaggatgcagggcgatgttccctgctgctgggtcctttttgtcctcgcgctatgcgtcctaacgagcctgctacgatgagaaggaagtgcacggccggccaacgagatgtacatcagcga

SEQ ID NO: 2031 - DNA, 441 bp, Zea mays
tcgagcgcatgcggcggcacccctcttgacattgacaaggtgttcgacaggatggtggccctctccggtgtcagcgttcaggcggcgcccggcggcaacggcgtcgtcgggagcaacgacttatcagttgaggacgctttcctctagttctcgttcttgctgtttaattacgatgaatataatatgcatgcatgttgtttcttaattttggatggaacgaacacaggtggtgatcttcgccctgatcgacaacgtcttcggcaacgtcaagtcggacatctatgacatggtctctgcttccactccttgttagccatcgtcaccaagctacgtacgtgtctacatacaggatcgagatttgcagtcactagcctcaagtgattggatcatgcatgtgattagctctagtcttgatgtgatcatgcacataagcaaacaccg

SEQ ID NO: 2032 - DNA, 395 bp, Zea mays
ccttaattgcttcatcacacatacatttttgtagagttgccttgattagagctcatgctacacgtcaatcaggagttctcgggaatgttcaaagatttttcttgaggtttatcatttcaagtttcccaaaatcatttgcagaataccaccatattgttgctatttcagacatgcaaaaatcttctggttgatttgatgcaactagaattattgatggaatatgcaggcctaaatgagacgtcacgtacatattcttgcggaattaccctgaccaaactctggccatatgcccatatgtcaacaaaagttttccaagatattcagaaatttctcctgaaatttatttgatcgcacattttaggcacatgtaagataaattttgtaggcaccatatc

SEQ ID NO: 2033 - DNA, 223 bp, Zea mays
  misc_feature (212)..(212): n is a, c, g, or t
cacgattaactcaggaattttatgtaatgttgatgcaaggacactgacttttatcatcagaaagacttcctactgttgatggtatggattctagcagctggattttagtttttgtatttggtgaactttgttcaacacactcgttgaagttaacagtaacagatacaagtctattatcctgatatttttaatatgcatttgcaggcattagnataaatcatat

SEQ ID NO: 2034 - DNA, 242 bp, Zea mays
  misc_feature (202)..(202): n is a, c, g, or t
  misc_feature (210)..(210): n is a, c, g, or t
  misc_feature (228)..(228): n is a, c, g, or t
aaaattattacatacatggtgtattgagaaagtctacttttttcacgtattgtagcaattgttacccgtcagcctagcgaaacttctgggtacgcatgagcctgaaattcgttcctacggatagtcgaactcgggacctgagaagtgttacttagatcacctaaccaactcggctagagaccatttcgtttggtacacatgnatggaagncattattatgttgaaggntacacctcttgccc

SEQ ID NO: 2035 - DNA, 474 bp, Zea mays
gctgaataccgttgaagctacaagaaccagtcgaactgaaccgacttcagttgaaacatcaactgttgctgaaatggcaacagataaaatgaccacttatcatggtaaatgaacagcgtccttctgttatgtttttccattcttacctgtgttgtgcttgattgcatttttattattcccttgtaatgtgtgtgcagtggaagagcacttatccatgtcgtatgcaagggtatttgaaaagatgaacatatgtaagacagcggaattggatgagaaatttgatgaagtgcctcctggaatggagactggcttagtccctttaccacttatggacaaaaatatatatcagccttcaaagtcagtgaactctattcctttgatttctagatatataacattggctctctgtcggcaaaaactacatgagaatgttgtgagagagtggacatatctcttctcagatacaattagcag

SEQ ID NO: 2036 - DNA, 324 bp, Zea mays
gggcgggcggctagctcatggctacgctacaagatggcggcgcatgcatgtgtctcaacagctagccgcatgcatcctgcattcctgctgcattgctacacatatcggccggcattatttcagaacaagcatgatgcatgctcactactgaagcaggtcatatcgagtagtatatacatgaccagtgaccttttttaacggaactttgggagtaatcatggatgcatggtagctacgtagaattcatcaagcaagagagcgtagaatttatgcaaaagaagaagaagagttaatttgcgtgtaatttcatgcccatgctttcag

SEQ ID NO: 2037 - DNA, 324 bp, Zea mays
  misc_feature (68)..(72): n is a, c, g, or t
  misc_feature (76)..(78): n is a, c, g, or t
  misc_feature (83)..(83): n is a, c, g, or t
  misc_feature (105)..(105): n is a, c, g, or t
  misc_feature (110)..(110): n is a, c, g, or t
  misc_feature (121)..(121): n is a, c, g, or t
  misc_feature (177)..(178): n is a, c, g, or t
  misc_feature (182)..(182): n is a, c, g, or t
  misc_feature (234)..(236): n is a, c, g, or t
  misc_feature (240)..(257): n is a, c, g, or t
  misc_feature (259)..(262): n is a, c, g, or t
  misc_feature (321)..(322): n is a, c, g, or t
gggcgggcggctagctcatggctacgctacaagatggcggcgcatgcatgtgtctcaacagctagccnnnnncatnnngcatncctgctgcattgctacacatancggcnggcattatttnagaacaagcatgatgcatgctcactactgaagcaggtcatatcgagtagtatatanntgancagtgaccttttttaacggaactttgggagtaatcatggatgcatggtagcnnngtannnnnnnnnnnnnnnnnnannnnagaatttatgcaaaagaagaagaagagttaatttgcgtgtaatttcatgcccatgcttnnag

SEQ ID NO: 2038 - DNA, 767 bp, Zea mays
ggactcaccaagtgtaagttaaatcatgcttatcaaataccttttcattcttgaacttccatttaatgatagatgtttcattcatcctcaggtgagtcgaaagctaacctattctccagcaaaggataaacctgaggtaagtctatttgatatttgatatgaaggaaacaatccaccatgttctacaccaacacttgaaagaaaaaaaatgaaatatgacatcttttttgaatattttcaatatatgattttttttcaaaaaactttaccaactgttcttaatttcccttttactcttatacaaataatttaactattgcacagacaaaccctcttgatgctgataaaaatagagctcctgcaacaacacttgaatcacctacaaaaaggtctgtagttctcatctcatcatatagtactacttccattagtacattcgctatactatacagctaaactttcatcctacattcatccaggatcaaacaagaccctaagaatcaacaagagtagacgttgtgtgcaacacagtaaggtaaacaatgcagctacaacttcaaatagactaaaactttactctatgattgaaatatcctaccattattggctgcaggaatacttctgaacatcacgcccaaacttcaacaaacgaagcatattcctcactattttgtctataaatattatgtgtgccttcttctatgaagcaaaccttaccctcgatatgctatatataatatctatgtattgtcatgtaatataaccat

SEQ ID NO: 2039 - DNA, 519 bp, Zea mays
gaaggtccatcgcaaatccaacctgcaaaggctgaagatgaatacgatttcttgcacgacggcagaaggcaggccgaagccaggctacagagagcacttgcccgggtgcactctatgtcacagtacccagaagcgagagagcagtaccacaggcttacaacctgcgttgctgaaatgaaacagtccagggtatggtttgatcgctcgctcctatgctttcgaagcttgctgcaggacgtgttttattttccctcggggtttgatcatgatttgatgctggctactttggaacagatgatgcaggatgagatgctaagccaggcggctggtggtgcggacgatttcatggctggactggaggacttgatctgcatagatgatgccccgccccgatgtctgccattcggtgaagctgagcctttttacatcagataggcagggaggcggtttccttgctccccttttgtcagactagccctgtaaatattcttcagctagttgttcaccccgactgtttac

SEQ ID NO: 2040 - DNA, 882 bp, Zea mays
  misc_feature (871)..(875): n is a, c, g, or t
gggaaatgctgaaaacccacccgcaatagtttttcataaggattctccaaaaggattcaagaggcttctaaagtttgctcgaaaaaacaagggagacaacaatgctaacggctgggcaagcccctcggtagtttcagaaggagaagatgaactagaagaaccaagaggcactagtgatggtacaaattcaagcaggagaacttttgatggttcaaagactaatagcatcttatcaggtacctttccgaaccatggttttgaagatggttctgcatccaagtcttaacttttataggagcaatctcagtaccgatatagttggtgtctgtcaaggctttttgataattacatccatgatttaaaaatgattatatggtctgaccttgtgctgacaccaggtagtgatgatatgagagtttgtatagacaagcacatttccaattacgttaacctcatggcatcacgcacaaattttacagctttacctacccactactaggcagaacttttttgttgaagcatttcatctttctatgcttgatcaaattagctcagtagtgttaatgtttgaaggtcatgcatttcttggagaaaaggttttcatggtcatgcataaatcttagcatattcattttcagctcaatcaactaccggcagcttcaactctttgaactcggataagctacgggagagatcaggtgctgccacatcaacaagaggttagttctcgccaaacaatgtaatgtgatgtgatcgaattaggacgttgctaacccatctgtcacggtacttccagcatcaaggtcgttcttctcactctcaaacttccggagcagcaggtcaaatgagtcgaagcttcgatagtgtctgnnnnngtttgtc

SEQ ID NO: 2041 - DNA, 309 bp, Zea mays
ctttctagacacgcagcctgtgaagccaaatcaccaataaacaagagagagagagagaggcagggaggacatggagtaatagctagagagacggagctcgtggccggcccgtcgttaagatctaaccgcggctttaatctagcgatcgcgataggtaactaaacaagcacgtacgctagggtaggtacaagctcgggtcctggacgtccgcccagcagctcccggcgctccagtacgccgcggctgacgcggcgtcgccgagctcgaatatcccagcggcgtccagggatgcgaacggcgccatgatgt

SEQ ID NO: 2042 - DNA, 569 bp, Zea mays
  misc_feature (509)..(510): n is a, c, g, or t
  misc_feature (558)..(558): n is a, c, g, or t
tctcctcagttgtcagcttatttgtgttgttaccttatgtgattaatgtgcttcaagatgtgtaagtatcgcacacttcctgcaggtgctcgctgataaaggctatgatggtatggctgcagatgtatggtcctgtggcataatcttgtttgttcttatggctggatacttaccctttgatgatgccaatctgatgagactgtacaaactggtaaattcggttaatacacttatatcttggtttccctatgaaatgcaagggtaattttgatgaacttttatttgacttccttttgtagatctgccatgcaactttttcttgcccaccatggttttcttctggagcaaggaagtttattaagcgcattctcgatcctaaccctgataccgtaagttcgaattaagatgtgccttttcattatctgtctcatctctttcatttatctgttgtattgttgtcaccagattacaaccagtgtcactgttatcactgttggataaatgggtgnngtattcttgcagaggataaaaattgcagaaatttggaagatgaatggntcaaaaaaggc

SEQ ID NO: 2043 - DNA, 499 bp, Zea mays
ttcatgttagcactcttctatataatttgtcgatattcttctgtgatcccctcagatcatgattgtcctcctgctggtggctatccttttcggggcactgtataccaagtgatgcacttgtagctggcctttttcccctatggagacgagacaaactctgccaatctggtatggcaaataatttgaactgtttaaaccgcattgcttttgaacagtttccgtttccccctgaggctgactatgttgcgttaccggttttgcatagatccttttcgtactctgtagtccccaatggctgcaggaagttcgaaattactggctgtagaagtgtagatcatacggcagcatgctactgcttccatgactccgttactgctctcgattcgtttcttcattatgttttctcgcgcgttgtatcgtttgaagctgttttaagcaacggaaaaaaaataccatgtgacacgtgtatcctacgaacatgggtttctgtttagttagc

SEQ ID NO: 2044 - DNA, 421 bp, Zea mays
  misc_feature (380)..(402): n is a, c, g, or t
  misc_feature (411)..(416): n is a, c, g, or t
ccccagtcagtgctgaaccatccgatagacattgctgaaaaggttactcggatgggttactcgaaggatcaggttgagggtcttgcactccgtatggtggctgcaggccagcctgcagaccataaccccctgcatgataggttgagctctgttagccatggtgtagctcctcatgcatggtctggataggtaagaacgacaaatgcagccgtcacgcttacttattactcatgaggtgtttgtgtgatatatctcggtatgtgctttattatcgtcggaaatcttcaggtatttcctctggcgtctttttttatcagccaggattgcatatccaccagcttatttttaccagttggaggatcgagatgaaataagatgcnnnnnnnnnnnnnnnnnnnnnnnaaaaaaagnnnnnngagga

SEQ ID NO: 2045 - DNA, 421 bp, Zea mays; identical to SEQ ID NO: 2044
  misc_feature (380)..(402): n is a, c, g, or t
  misc_feature (411)..(416): n is a, c, g, or t

SEQ ID NO: 2046 - DNA, 323 bp, Zea mays
  misc_feature (307)..(317): n is a, c, g, or t
tgcacattccaaccgtatgcagacggcatccctaccccaaaattcactgctagtgtaagctttcaatttttttcatgacctgtgcctgaaatttgtatttcgaaatattgttgtacctgaagtaaataataactatgttgtgaaagctgctcacatttgtacttttcattcttttcaggagaggaattttctgctgtcagttttagagctgacctcaccagggtcaaggcctgaaacttctcagcagccatcttgcaaaagggctcttcttaatagcctttgaaatgggtttgcataaaatcccaannnnnnnnnnnctatgc

SEQ ID NO: 2047 - DNA, 372 bp, Zea mays
cccgaagtgcagctgcccggtccgttcccgacgccgtaccgatttggcgacatcatcagcaatgtgatacagcagagcgcggcggcggtctacgtccgtgacgacgacgcgcagttcggaggcgacatcgccgtcgcgtcaccggggctgaggttcggctcaggcctggacgtggcgggaggcggcgggttgcagcagccgcacaagtccacgggatccaacgccagttggttctactgactgcgcatgcggcagaatcatggatggaatggacaatggaggttggatattagaattcacgagtagacgacgagatcgtcgtgagttttctccagtctcgtatttaagtatttgtataagcctgcaaatata

SEQ ID NO: 2048 - DNA, 310 bp, Zea mays
gtctgggcaggaaggtgaggactggctgttcgacaaaggcggcacccagccaaggaagccggccagttcagcgcctgaggctgatggagtcccccaagtgtgggctcaggctctgaaaattgaccatgctgatgtcattgctctgccatacgtgatacccttttagctgagtgacaatcacctgtgaagctgagacatcaatgaacaacagcactttgtgtggctgggatgtgttgccagcttttacaagtagcttgtgtggcatagatagatagcttcatgcaccactcccttttgccgtgggcgtgct

SEQ ID NO: 2049 - DNA, 283 bp, Zea mays
actgtacagctgacttaagcttcctcaccaacataaaggcaaaaaatactgttcttcttagcccccttgccaccatagagtatacctccatgtcaaaaaaaatttaccctggtgttaggatcccaagatatagagtagcttttaagttctatatgtcgcatttcatgacgtgatttgaagccaatgttcataattctgataaaactagttctactcctcaagcaagatggggatattttggaatgtaacttgaccatgcatgtgttgcggattccagatataa

SEQ ID NO: 2050 - DNA, 240 bp, Zea mays
  misc_feature (229)..(229): n is a, c, g, or t
cacgctgtcaagtccatgcagtatgactcggtctcgatctcggctgtggacccccagttctactcggagcgtttcttgaacttcatccagaccgtcttccctgagaattcgtagctccatccaccaatacttttcttggaagatgcccgcccactaccacttgctgagaacttcatccagacgacagtccatgtcttcgaatttggagcttgcgagcatcataagaacnttgcactctct

SEQ ID NO: 2051 - DNA, 350 bp, Zea mays
taattgtatgtttgggcctggtttggatcatcggtcaaactgacccagcgggctgcttgcttcaactccgatctccactcttctctcctctcctctcctgtctcctctatatagagattagagagaagagatctaggaaggcagacactgcaactagctagcaggtccggcaggccgcacgccatggacgcctccgccggcagcgtgctctgcagcaggagctactcggccagcgtgagcagagcctcgtcttcccagcaagcagaatcgtcgtcgcggctgtgcgtggaggagcaccgggcggaatggtgattcatctgcatgtactacgagcagcatttgttcgattt

SEQ ID NO: 2052 - DNA, 411 bp, Zea mays
cgtgcaaggagaagctccggcgcatggaggcggcggcaacggcggccgacgataagacgagcaagcagggacgcctcgcggagaagaaggtctcaggcacaggacgacgcctgcttgggctcctgaagaagaaggtgcacccaaaagcggccgcgtcgtcgtcgccacccgaaagcggcgctgaagaagcagcctcgtcttcttgattcagctccgtccaacaaattcgctgcccaccattgccggacgatagatcagccgtgtggtagacgaagacgaagcacgagcacgtgcgtggcctgctcgaaaccactcaaacagagacagagtgcgtgcttttctagctaggattgtgttgttgtgtactacttgtgtagccttcgttcgttcgttctttcgttctctgtaaaa

SEQ ID NO: 2053 - DNA, 515 bp, Zea mays
  misc_feature (500)..(510): n is a, c, g, or t
tgcacccatgacaggtgctgaaaatatttacattcatgtgcataaagataacttaccagcatggaggctctatgatcagattggattcaaggtatgtgccttgtttcagtttaatcctgaaaaacttcgtgaaggtacggaagtctaaattgaaaataacacgcatgctatttgtctgtagatcgttgatcaggatgacgattgtcgttcatcagacctgtgcttactctccttcagttcataaggcttgctgactagataggaatagaagggacatggcccctagttccatctccctgtccagggaaatgccatcagtcctcgcgatttggaaaggcgggatggtatgtgccaagtaataccttcaccaccttgtatatgatgaaagtgtttccaaatgtttgcggctttcgagattgtcactagatcggtggcagttcagatccaccagaatgtttgaggtatctgaatacatcaaaagcttctgtcgtgtatagttnnnnnnnnnnncaaag

SEQ ID NO: 2054 - DNA, 168 bp, Zea mays
cacaagacgagcagcaaaagatgtctgtggtgaaaggagatcatttggtagtttctcaacacgtaattctgttatactgggaaactctcctctgcaaagggttgatctaatgccttatggaataaagatttccatcaaattttgtgacagcttcatttggctttgggg

SEQ ID NO: 2055 - DNA, 596 bp, Zea mays
  misc_feature (556)..(571): n is a, c, g, or t
  misc_feature (573)..(573): n is a, c, g, or t
  misc_feature (577)..(589): n is a, c, g, or t
  misc_feature (591)..(591): n is a, c, g, or t
aactgtgatttcactgcttcatctcacggtttaaagttaacgctccttgggtttgtatcttccttttcagcttgtaaatatgctgggcgaatcagaaaaccgcaagtgcaacgtcctcttctctcgtctagaccttctcaaggtgagttcgctgtttcacttagcttggttaagcaaacttctagtggtcttctagcccagctacgaattccatgctctgcatgcagagatatccgtttcgcgtatcctgtggttcagctgttcagtttgcagtgtgaagaaatctatcttaatctctatatgacacttctcacatgatctggatccaagatgagatttcgtttcttgctgctaacttgcagttggagcggatcgttgggacgtcttcggcgcgaaggttgatttcctcggagaagggcatgtttgtcttctgctgatgtagcagcctagcccgtactgtagagcaggcgaatggttttatacattgatccctagcaaatgtacccacagcagggggtcacgttgttgtttgcctgtcaggcaagaatctggaccnnnnnnnnnnnnnnnnanaaannnnnnnnnnnnngnccccc

SEQ ID NO: 2056 - DNA, 270 bp, Zea mays
tgatgatgagtcagagtgccacgtccttgtgcaaaatataatgtcatcagctggattaggcacttcacagtcacgtatggttttcgccggctggcatttacctgatcaccctcttgacccggtgctgcgcaacaaagtatctcagctgcaggagaaaagttcatacagaaggcttctttttgactgcgtgaatgttgctctaattgagatcggtgagaacgccttactgagcgccctcccatggagtaaaaggagctccagaacatggag

SEQ ID NO: 2057 - DNA, 271 bp, Zea mays
  misc_feature (235)..(238): n is a, c, g, or t
  misc_feature (241)..(261): n is a, c, g, or t
tacgatcatgccctcaagcatccagttttttttaccatatggatatgtgtggatacaatagcaattaattttattgtctatcccaattaagaatggccacaatgtagcatttgattgacatacacctctaatatatcgtacataagcaagaatatgtgaatacagtagcggtttgtttcattacatgaatttatttattaagaatggccataaaaaagggggtttcgttacctannnntgnnnnnnnnnnnnnnnnnnnnnaaattgaaac

SEQ ID NO: 2058 - DNA, 271 bp, Zea mays
tactgatggacatcgatgcagaggggaagccatgcatgggccatctggaccaacagatcgtccaggtctctgacccaacacgggcaatctgaagctgtgttggaccttttccagtgtagtagattagggatctaaaaatcttttattctttcaagcatcgagattattaattctttgttacgtagatatatagagtagtatttcattatgtatatatatcaaccagatgatccagataggggaatctggtcagtcattggagttattgaaa

SEQ ID NO: 2059 - DNA, 246 bp, Zea mays
atggatccggatgattagagatatgcggagcacctttttaactgctaccaggtccaggctactcaagcaagaaaagcaggaattatcttgcatcgcagcagcgcatcaccatctggagtagccccagcatgacaagctggtcatccatcgtgggggcttgcctggatcgtactctggtatacaaccaggctgaatacgaaactaacactttgttctcttcttccttcacgtcttactcattttttt

SEQ ID NO: 2060 - DNA, 133 bp, Zea mays
atactgatgcctttaaagctaacagtactactttaaatagtgtaccacagtaggtttgagaaaaaaattaatagcataccatctttcatagattggttggctcaatgcaatctgcgagtggcaagaagagttt

SEQ ID NO: 2061 - DNA, 394 bp, Zea mays
  misc_feature (387)..(389): n is a, c, g, or t
gctaggacacggattgaggacgacctaaagccttgccgtgatcttattgagcagctgtttggaaaggagaagggttgacagatcaactggaatggagatgaagccgagcgatcaagagtcagctgcagcagcagtagcacgaccttactccatcctagagttgtgcactaggtggaggttgatgaagactttgccgcaaagatcgatgatgaatttctcgtcgttgaatcaggtggcacagctatgaatctggaatgtggaccaatcgtcatgtgactaattctgtttaaatcactttttttcttctaggagagagctcttttatattcatgaaagatagcctacttactttggcacaatttgctatgaaagtggacagagcatcannnctgag

SEQ ID NO: 2062 - DNA, 417 bp, Zea mays
tcgtgtgatgtgatcatcggctaccccaggagctgttctctatgaatgcaaacctgcaaacggatatctgacagtgcagctttgacaatgcctcggttctggtggttcattccttttacctggtactttcctgcgacctgtttctgatgcgattttggttagcggaccttggcttatgggaattctgcaatggggaatgttaggttagcgaaattctccagcggcaggccggcagccaacgaggtacaccaacgtggatcagaaagatgtcgttgtttatccgggaaattctcagctgcgaagcaaatctgacattgtaatgtttatgctgcacgagaaagaacaaggcggtttggggactagattctcatctcgctttcaccatttctgaacgcatgtgtaacagaaccaagccca

SEQ ID NO: 2063 - DNA, 589 bp, Zea mays
cgagagaggttagacaaatttttttttgctcccataatttgactcgtgctatggttcttttgataacctcaattatattttctgagaagccacgtctcaaacacgttttgctcgtgtgtttttctatatgtattattaggctctatgatacagccataaaattagggaagctccaatccgagttcaaggtgcctgtggaccctgaagagtatgcacgtgataatctcaagtttggccttgttgaggtcgtctacgagtgggcaaaggtatactcgtcttcaggagaattcgtctccaagatatatgcaggctgcaggattataacgctgtcacttgttatattatatcaatgcaggggacgcctttcgcagacatatgcgagctgactgatgtatccgaagggatcattgtaagaacaatcgtccgtctggacgaaacatgtagggaattcaggaatgcagcttccatcatggggaactctgcgctgttcaagaagatggaggtcgcgtctaacgctattaagcgtgacattgtgtttgcagcaagtttgtatgtcacaggaatctgatgcatgtaacctcgtagtctc

SEQ ID NO: 2064 - DNA, 698 bp, Zea mays
  misc_feature (532)..(556): n is a, c, g, or t
  misc_feature (559)..(564): n is a, c, g, or t
  misc_feature (684)..(684): n is a, c, g, or t
caattccagattctcatgtgagatgataaaaacgtcataattatttgctaagtttaatgacctacgtcagtttctgcgtactaaaaactattcgctagttgagtcgttccggcatattcaaaattattagctacagttgttcctgcatgcgccagattctcatgtgagatgataaaaacgtcataattatttgctaagtttaatgacctacgtcagtttctgcgtactaaaaactattcgctagttgagtcgttccggcatatacaaaattattagctacagttgttcctgcatgcgtctaatgtccttcggtgaacttgtctgtcattatcatttaaaaacgtatctagatgcattatggaagatttttagtttcctttgttatatttgagaagttatatattgtatataccgagagatgcacctgtgtattatttgctgtagcttcgattgcgagacgcatggttgcagtcattttattgtagttagtttatatgatacgtcgttgtcaccgcatgaagattaactgctnnnnnnnnnnnnnnnnnnnnnnnnnttnnnnnnttgagctgtgcgaaagcttttaagtttacatttactcaccactccatgaacggcaacgaagtatgcatcagttagaaaagtgcacctataattttggttgcttataactttctatttgtnagagatttaactcg

SEQ ID NO: 2065 - DNA, 565 bp, Zea mays
gcacgcacaacctagttcatgtttcttgcccatactgatgttcggatgctgtttctggtgttacctctgcgtggaaatctgaatatgctctcatactatgttcaggctaaggtatttttctctttccctctactctggtcaatttccctagttcatctaaataaaattttcaggcagattttaccattcatttgagctggacactaacaaaaaaaattgttatccatgtgcagaggcttgtgatgaaatacgggtcacttgtgtctgttgtctcttttgttggactgtttatctaccttgtcgcgagcccgtcgaagagcagctcaaaggcaagcaagaagagacgctgatctacttataggtcgcagttgacggtgtagctggtggttttgcctggaggaactcttggtagtttgagctgtgcgaaagcttttaagtttacatttactcaccactccatgaacggcaacgaagtattcatcagttagaaaagtgcacctataattttggttgcttataactttctatttgtcagagatttaactcgaaggacctgtaactagga

SEQ ID NO: 2066 - DNA, 247 bp, Zea mays
tactcagcttgcaaaagaaagaaaagagaagaaaaggtttctttatgaccactcagacacccagcaatattcttacttcgatcacactggcttgatcaagtcactgctaccgacatggtgcttgggattttgtagctggaataatgctggaccgccctgcctgatgtgtaatcgtgcacgtaaatgctatcagtcgtgcagggactcttgtagtacaactttgtggatcagggtgaccatgtaaaga

SEQ ID NO: 2067 - DNA, 288 bp, Zea mays
gccattgatatttaagttttatgaagctaattgttgcacttaccagtttcatgcgtcacgtccgaagcgtgtagagtagctcggtttttctttcccatatgtcgtctaacaatcaaggagttaccagctgcgagaaaacatctaagtctaacatggcatgaagttacatagatgtagcactcttgaatagtatcacttcgctagctgaactgaggatgattgattgaccgagttataaaaaagtgtagcatctacaatttaatatttagtatgtggctcatatgtcca

SEQ ID NO: 2068 - DNA, 1091 bp, Zea mays
  misc_feature (1082)..(1085): n is a, c, g, or t
caagaagtatggatgtctttacccagaagctataacccgtttttattttgcactggaccataactataaccctcttttttcagattcccaatttgatgttcgacctatgcctaagtaggcattccctggcggtttctatacattggttcatacacacaaactaccactaacaacatcattatcaaataaagtagactcgacaatatcatcttattcatcaatcaatgtctgacagaatcaggaattttcacctactacattcttatcaaatggtggtcggtacagattatagagacttatgtcatttatatgatgcagtacagttgtttcgtagaaggttaaaatatgagcttatcaagttgtattcagataaaccacaactgcctctaggttcagatgaactggtagccttaagctgtgctgccttccgtagctgtcattgattatcaagtctgcacgacttgtctattagtgaataccagtcgttggttgagtcccatttagtctggacgtagtagttttttttcccacttgtcacactgcttgatgcgtgaccataaaggccgccttttccagtctgagtcacacaatgcttctcccttgttaatcctttcaccacatggattttcctttcttttttattctttaccatgtgtatagtcatgaggcacatcagtacatcacattgactacctttttttcgcatttacaccataattctgcggttgtaccattgtacatttgtactcacaattttctaacaaatatttattccttttctttttggaacttttgcttctctgaaacagcagcagagtgacactgcgcgccctcttgcatatcgaatttaagctatggcagccattgttttctgctgcaaggatgagttcattacttttttggccaaggcagcaagattctcaatacgggagtcatttgtatagacgttcctaatttcctactcatctttcccatgaaagagcccatacagatacagtcttccaccacgatttgaagccagttgcagtacatgtgggttgctttttactaagatgcatgaagtttagaataatgtacgtagnnnntaatgc

SEQ ID NO: 2069 - DNA, 356 bp, Zea mays
cttttgaaggggcaaatattaattattgaggcctaagtttgaactgaagatcctccaaacagacgtagtcatatgttggagtaatatataaccgtgtaacagtattcccccacgtttaagatgcaagtttttgacatatgtaggattttgaagatacttatcttcatatatgaaccagcttgtccatactgatgattgcctgtcgacctaacagcttagagttgatggtgtactgatgaggttgagagacactcggttacattgcctgtttggaaacggcgacggagccaagccagtggtacttcgtgagtgctgctggagggaagcaacatttgctactttgtctgcgaaaggat

SEQ ID NO: 2070 - DNA, 647 bp, Zea mays
tggaggcatagttggaggaggcgatgtcggccagtaccagctctacgacgacctccaggctcgactggaggcagacaccgtcgggatggcttcttcatccgtaattgggatgatagttttattatgatttacaggtggagggaagaagttttgttgaagtcccctcttagtgtggtggagattggcaaatgacctaaaaagatgctggagcaaacgagccttcacaggaaccatcacaagaaccatcacaaccagtatatgataggtgaataattgatccactacgtttctatggtcatctcgtgctaccattcaaacctaacaatgtttatttttcagtttccatgtagtcgtcttgtgctattttcaataagtggatgtccatcctcaactgtgtcgagtactgaagttcaggttacacaaggtgaagcagcacaagtgatgcaggcagtagtagttgaagggtggcaggcattagcagtgcaaggcagtaccaacgaagtttaggctacatctagccaagtgagcccaagtgaaggttcaggtgtttgtatgcttaaaaagaagttgacactaaggaaactgctgcaatgtaggacgaattaagtttcttgtacttctgtgaacttgtattggtcgccaccttg

SEQ ID NO: 2071 - DNA, 486 bp, Zea mays
atgatctgtcaggtccttcggagccaacaatgcctagcattttcgatgtttttcctcccaataatggagtcctcgcaacagatgatccagccaactacttggacccagccatgcagttccctttctcatgattggtcaccatttgtcatggaggtacgtatgtttatacctgctctttttgtgcttgaacttgtctggactgcttcggtgttgcaacttgcagcttgctgttgctacaactctatccaccctgaacgtcaaggacgtcattgatgtcatgcctgggctcatgaaatcgtctgttgctcttctgaaccaagccgaccttggctggtatttcttgtaagcacggtgcttggaacaatctgcatcgactgctgtatgctcccaactggttgagctaacggccaatctcggctcactctgccgaggagatcatagcctgtaaatctttgtttatgctattacttgtgtgtatcgcaacct

SEQ ID NO: 2072 - DNA, 420 bp, Zea mays
cttgctggattttctggaagaccagccatgccgcgtcgcgctctccataatcccagaaacccatccgctctccagatatgagagcgtgacccatttgctctacagaattgctgcgtgacccattcgctctacagaattaccgccccagcctcctctcgatccacgtgatccacgtctgcgctgtccagagaaggcgaccgtccgcgttgacgccctagatcgccgccccagcctccatggaaggggatctgcacgccccggcctctatggaaggggagggtccgacgccccggatctgcgtctcagcctccatggaaggcgtggatttgcagtttccatcggcgacaccctaaccccttcaattcgctaaccttccatgcacggtgcggatctgtagtttccatcgacggcatcatcggg

SEQ ID NO: 2073 - DNA, 604 bp, Zea mays
gaaagaaaatataaattcaactacttcaagttgatcgccaaacgtaggcaaactttgctaggaatggtcaaggtaacgcaaaaggtgcacaactaaagtctagcaaaggtaaacttggggatgctagataagaggcaacatatgctctactattgcattgatatggataaaaaatgaccagaagatgccctctacagctgcatattttcaccaatgtaaaaaaataatcagtatggcaaatgctacagagatacctagccaatatcctgtcccccgtaaacaattaataaagaaccacctatcccactagcgctcttcagaattgtacttattccaagcctcctgcacaatcgatcacgagtgaaaaagttagcctccctttatcgcaacaagtaacttgatatattcggaaagacagttatcaaattatcaacacaagacttgctttcgctagtcattagcaacaggcatacttccaaagattttacgaaaggcgtggccagagacgtactcgcaatttagaatgagcaagcattttaaaacgcagtattactagatctgttaccagtctctcacggatgccaggttcgtacagattactaat

SEQ ID NO: 2074 - DNA, 395 bp, Zea mays
  misc_feature (358)..(365): n is a, c, g, or t
  misc_feature (368)..(374): n is a, c, g, or t
  misc_feature (379)..(388): n is a, c, g, or t
attatgccagtgccattattaatcgtttccatgttgtttcatgcaccggtttttatccctggagcagtacctgctgggatttatggtaatggtgccgtagatttttttgtcatccttattatattcttgctcatacacaccgtgtgcacttaattgatacgtacaatgataatcctccgttgcatgcagcaaaagttcattatggtaccttgctgtccaacgttgactggctgcacgggggcgctgaatcgctgctgactctcaccaacctgtttatcgttttggggctgaggagagccctgaggaagctggaggaagagggcacagacgagagcgtttctgaagcttctcaagacannnnnnnnaannnnnnngtctnnnnnnnnnnatcatca

SEQ ID NO: 2075 - DNA, 463 bp, Zea mays
  misc_feature (352)..(358): n is a, c, g, or t
  misc_feature (363)..(369): n is a, c, g, or t
tgcgctgcattcatccagagtcggccaaagacttgcccggccgcggcaaccactgagacgacgtgccccgccccagctgccaatgatgcggtggcgcagggggtgaggaaggtcagggactacttcagctatgtgacgtacgctacactgcatgagtgagctgtgtcggcatgagtactagaacaattagccaaaatacaatcacatgcggtgcctcgatagtattttggctaattgttctagtactgtattcatgatgtgcacactgctctgtactactggtgtgcatgtgattgttgtacatttgctcttcacgtgtgttgctgtcacatctagatcatctgatcatttnnnnnnntacgnnnnnnngttgccgcggccgggcaagtctttggccgactctggatgaatgcagcgcactcctccgggcgcctctggttggcgagcccaggaatgcagttgc

SEQ ID NO: 2076 - DNA, 370 bp, Zea mays
attttgttgtgacatgagcttagaatttctcaccctgaccgtcgccaaaaactaggtccttgctgattctaatgcttcaagactcttccgtgctagatctcgcctgtatcaagttaaactcattagttgacatagttctgtgtgtattcgggtgcgcccattggctgtgaattgtagctaaagcaaagttactaagcctagagtttaggatgttaatagcctgatgctcaacatgtccatggtttcttaatttaaccagcacaaagtgtactgtttgtagcaatgcagtatgtagcatgttcccattatttgagctctggaacatggacacaggtaggctcgttgcttgttgccggtgtattgctaattt

SEQ ID NO: 2077 - DNA, 402 bp, Zea mays
  misc_feature (371)..(373): n is a, c, g, or t
  misc_feature (389)..(391): n is a, c, g, or t
tatacacactaatcagagcacgatgggttgatgaactgaaagaacccacaaaaggccagctgccacatctcagtcacggcacgcaaatgagttgtcactttcagtaagaattgctcttctctctgcagatggaaatggtttggaacaacgaaacggatagagcacgcccgtcaaagacgatgaacacgcaagatgatgctgtccgttggcccgaatttggctagagcagcaatagttcttgaggctcttcgcacctgtagaggtaaaatcttactgaaaagcttggcactggccttaactgaagcatcggatcacataataaaaacaaaaactccagtgaatcatcgaagagatgaaaccgttcagagcgnnnttgtgaataacccatnnncatgcactttc

SEQ ID NO: 2078 - DNA, 364 bp, Zea mays
ataattgaaactaaactttagcacttcaattcatatagctaaagtttagtaggaagctaaagtttatcccgtgacattgaaacggggcctaagatatatttttccgcggtcagaggggagagcaactgatattcgaaagtgggattcagtctgggcatatgtgcaatgatattacagactttggacaagtcatcagtcatgggtgattgcctttgtgttgcttccattttcgaccatctcatcctacgatctttccaagttatctttaatgaggtgtgtcgtgtggtctatgtttcctgcctctggatcttttatgtaagagaaacggacttgtaaaacagttccaaattatcatataccaggc

SEQ ID NO: 2079 - DNA, 225 bp, Zea mays
ttgcactaaccgtttgccttttggacagccgtgttgaaacaaggatcggcccacatctgtacatgtcattaaccacacagctcagaaagaaaaaaaaacttctcgtccccaatttggttctctttttttttaggagagttagtaaacatacatattttttctttctttgtttgtttctccctttgcatttgggaaatctttttagaatgagattttggagtgtat

SEQ ID NO: 2080 - DNA, 579 bp, Zea mays
  misc_feature (404)..(425): n is a, c, g, or t
  misc_feature (430)..(448): n is a, c, g, or t
  misc_feature (455)..(475): n is a, c, g, or t
  misc_feature (482)..(501): n is a, c, g, or t
  misc_feature (508)..(528): n is a, c, g, or t
  misc_feature (533)..(559): n is a, c, g, or t
  misc_feature (568)..(573): n is a, c, g, or t
agagctgaacggacgataaggaagggcgactgcgaggtgcagatcatgggggagcctacgggggagttctacgacgtcatactgtattttgggatcatcgacatactccaggactacgacatcagcaagaagctggagcacgcgtacaagtcctttcagtacgacccgacgtccatctcggcggtcgatccgaagcagtactcgagacgcttcagggatttcgtgttcagagcgttccaggaagacaagttcgatttgtgactgaagaaggcacaaggaagccagcctaccgggtgccggccgctgacatgtacggataaccagtgttgaaatgcagagtcagacatgcatggcactgctggcatcgcattgcagcagagcttttggtgaccctacctgcttgnnnnnnnnnnnnnnnnnnnnnncactnnnnnnnnnnnnnnnnnnntgctccnnnnnnnnnnnnnnnnnnnnncataacnnnnnnnnnnnnnnnnnnnnagaccannnnnnnnnnnnnnnnnnnnnctacnnnnnnnnnnnnnnnnnnnnnnnnnnntttttcacnnnnnnaaccat

SEQ ID NO: 2081 - DNA, 353 bp, Zea mays
ctggtgtactgaggtccttctggaaagctttttacaactcgattttttgtgagttgataaaaggaagagtgcgggcagcaaggcctttctttattgaccagaccaaagaagcagctacagaggttatatagacgcatacttccgcatcccccgctgataatgtgcagttgcaaccggtgttctgttgtatatataaaaggtgttcttgatccattctttgtaggatttagacaccatagagtttataaacaatgtcaaaagctaacctaagagagacatcgggggggatgtggatttgttgttctattgctaccgtgccctggccctagatgtttgttgagatgggcagaggg

SEQ ID NO: 2082 - DNA, 353 bp, Zea mays
  misc_feature (283)..(287): n is a, c, g, or t
  misc_feature (328)..(328): n is a, c, g, or t
ctggtgtactgaggtccttctggaaagctttttacaactcgattttttgtgagttgataaaagaaagagtgcgggcagcaaggcctttctttattgaccagaccaaagaagcagctacagaggttatatagacgcatacttccgcatcccccgctgataatgtgcagttgcaaccggtgttctgttgtatatataaaaggtgttcttgatccattctttgtaggatttagacaccatagagtttataaacaatgtcaaaagctaacctaagagagacatcggnnnnnatgtggatttgttgttctattgctaccgtgccctggccctngatgtttgttgagatgggcagaggg

SEQ ID NO: 2083 - DNA, 350 bp, Zea mays
ctcgacgcacgaaactggtgctttaatagagtagagattaaaagatttcatgcaaagttttgatttactgattctgttcaataagcttttctatttttccaacagattgtgagtaggattaagaaagagtgccctaatgtaccccttgtgttgtatataaatggaaatggaggtttacttgagcgcatgaagaacacaggagttgatgttattgggcttgactggacagtggacatgactgatggaaggaggcgccttggtaatggcattagtgtacaagggaatgtggatccagcatttttgttctcaccattaccagtactgactgatgaaattcataggttagtaaa

SEQ ID NO: 2084 - DNA, 523 bp, Zea mays
tcctttgaaatgcaggaagtctagaggaatatacaggaatttcacaagaatcagtctattttcacagaaaaaatgcaggaaactgaaaaaaaatccccgcattccaaagggggcctcatctaggatttcttcataccgaattatcgattgacttcgaccacataccgtgcttttgttcatgtctttgaacacaggcacacccaaatttcgaggtagcaaattttgcccacatacactgtatataaagtagttacagtacaagaacaatgctaactgatcaggtgatgtctcgtcctccccccggttctattattgttactgtatagctgtaattagtccaagtgtacagctgaatctactaaggtttacaaggaaaatcgccaggctgtaaaccttcaattcttatggctaggttttcattctgaaagtcatgtcttccgcgtcagcataatcctgtgttcctgtataacctctcttcggacttagtagtgctcatttgagttctaattcggccgggcaacta

SEQ ID NO: 2085 - DNA, 362 bp, Zea mays
gacgcatcataatgaacttggacaattgtcaggcgcgcagcaagttgcttacctgaacccgtttcatctattgagatgtgggaattaaagtttgagccacaggcaccggctgacagacttatcatgaaagcgttgatcttcgaaatggacacctaacgcgcctaagcgcgcgttaatattgtttatcttaaattagcgtacctcaacgttatcgtggagataaaccagcatatcaaatggcagtatctatccagctccttcttttttaagctacctgaacgtttttagctaattttatcagacctagcagtaatcacagagctgtcaaacaaaactgtcaaacagagcagagagacgaagtt

SEQ ID NO: 2086 - DNA, 438 bp, Zea mays
tctcccgatggccccgatgcggagaacagtgacttgaggagcaggcatcagcgtaagatcttggagcgtgcaaggaagatgtccgagaagatcgggaggctggaggtggaaatgcagaaggtccagcaggctctgctcaaatacgaggaggagcagagtaccaggagtacctcaaaagccctgcagcggcggtccaaagtgcagctcgtggagtatctctacggccggcggcgggacagtcgcaaacagcagcggaactcgccttgtggttgcatgagagcgaaaaccatcgacgactaacgacgtgcctttcatgtcgcttccttttttttaaggcgtaatggaaggccaatcttgtcagcttcagaatgtatcaggtcttatgtttatttcatgttcaatgtagataaatgagtggctgtataagggctgtaaatt

SEQ ID NO: 2087 - DNA, 423 bp, Zea mays
ggaatgaacgaatccattgtacgaacctgtcgcgtatcttatgcctgaaataattgatggtttgtaagttagaataggaccactcatttttccgtataacaccttcaagctttgtttcaggtgagaagagctcttctgattatgcatcaaagagacgaggtggagtacaagagagagcgccatgtgatcgtccggaaggcttgatgtggagagtccagtcagactcattcatggcatacaacgaacgttcatggcgtcctctcctcagacgcgtccataccttcactgagactgcacatctgtccgtcctgaggggacgagacacgccttagttggtctctgacatgactgactgttgtaatcagcaaacggcttgagcatgtaggctctgtttttgaagtgaccaaaggttctgattgaacc

SEQ ID NO: 2088 - DNA, 952 bp, Zea mays
  misc_feature (492)..(717): n is a, c, g, or t
  misc_feature (721)..(949): n is a, c, g, or t
ggtgctgctgctgcaaggcaataataataatggcggccaagcagaggcgcagggctctcgtggagacgaacgacgacaggtagcttggaaagagcatgacggtgaatgtagcaaggagaagcagccgacgagcggggagatggtcacgagcaaggcgagagcgagagaaatggtagcagggaagaaaaggagcacgctgaagccaaggtcggtggcctctctccttagactgctcgcgtgcaagggcggctttgccaccccggttctggaaccgaggagccctttcccccagtcgagaatggagaaggtacagtttcttgtatagaatatagattcgcacggcttaattaccgcccgccctcttctttctctgcatctcgttcacgtacgcgtggttggtttggtcaccgctgctgcagctgctcaaggcgatactggagaagaagatacacccgcagaaccccagcacggctgcagcgaggcggcaccagnnnnnnnnnnnnnnnnnnnnnnnnnnnnnnnnnnnnnnnnnnnnnnnnnnnnnnnnnnnnnnnnnnnnnnnnnnnnnnnnnnnnnnnnnnnnnnnnnnnnnnnnnnnnnnnnnnnnnnnnnnnnnnnnnnnnnnnnnnnnnnnnnnnnnnnnnnnnnnnnnnnnnnnnnnnnnnnnnnnnnnnnnnnnnnnnnnnnnnnnnnnnnnnnnnnnnnnnnnnnnnnnnncccnnnnnnnnnnnnnnnnnnnnnnnnnnnnnnnnnnnnnnnnnnnnnnnnnnnnnnnnnnnnnnnnnnnnnnnnnnnnnnnnnnnnnnnnnnnnnnnnnnnnnnnnnnnnnnnnnnnnnnnnnnnnnnnnnnnnnnnnnnnnnnnnnnnnnnnnnnnnnnnnnnnnnnnnnnnnnnnnnnnnnnnnnnnnnnnnnnnnnnnnnnnnnnnnnnnnnnnnnnnnnnnnnnnnnaaa

SEQ ID NO: 2089 - DNA, 627 bp, Zea mays
agtgagtttttccagcctattgcgtccagccaatgcaatttcccagagtagtcccatcactttcattttttgaacttgcagatcgccgaagatgacacccaagatttcgactcaaagtaccgggcacttgtcgcaatcggttctcttgtatccttcctgaacatcccgttattgcagggcttcatgcgatgcacttctctttccttgcatcatttcttctaaattttccatgccttggcatgtgttgcccttaacctaatttactatagatgctcaagggccttgtgaagtcccttgccctcgaccttgatgttaagagcgttgcaagcagcgccaagtcttcaatggaccagaagattgcggaagtaggaggtgacatcgaatcgctaacaagatgactacaataggtttgcgtacacttggtcgttgcggacattgctgctccttcgcttgaggcactaccgtagtaccgtgcataacttaaagccggtctgtgttgcagaccaattcagacgccctccacgtctctaccaaaaaaatcgcaatgggttatgattattttttcacctttgtaaccatcatggaagtgtggattttgggtggtagcgcttagattttgtaaattga

SEQ ID NO: 2090 - DNA, 379 bp, Zea mays
ttcttcaggaggcaatgtggctgactcagaaataccatccgtaagtagttctgtccggtttgacatgaccgacccttactatggcgagggttaccggagggcctataatacacagaatgctctgcataggttggatggttaccccaacgaaaggttggattcaactgcaccgccgaagcgttgggcatatagccatccaaatccagctgtgaaccttgcatacaattctaatgtatttccacagcagatgggagactactaatttagctagtgggagggatattcagactatatgtatcgccgtggcaatgggcaatggtgatgcctgtatactaataataatactttgtaaacaaaccatggtgccaagtctaaagtt

SEQ ID NO: 2091 - DNA, 647 bp, Zea mays
gacggcggcgccaccgcgtttccaggcgttggtccgatcgggattctcgggctccagccacgggggagacgtgagacgtccgccggctcggccgagccagcatcagtctcaggacaaggagcggacgcctttcttcatcttgtgattgctcgactgttctgtccgttgtacagttattagtgggtcccggtgcggctcctaattcctctgctgcactgcagggcaaggctggccgtcggttctattcttgctgctgcagcgccaatgctgcattccagatgggcgtcgttcctgctgattcagagtaaagcaaagagccctggttccgaaagactctgtaccgcgcgccgcgaaactctgcaccgatgcgaaatttaactctgcgccgatgccatcaggtgaggtggatatggtgaaagtgtgagagaccgatatgcacgccctgggttagtaccacctcgcctaaacaagggggccgtgttgcacttataagggcgggcctccctcctctctcagcctaggttttgagagcgaggtgcccgtctgaataggctgcgcacgagcgcatgaacgtccgacgctggcgatggtgtcgtcggaagtggccgagctgcccgagaacgggaggctgaggacagcggccgtgc

SEQ ID NO: 2092 - DNA, 671 bp, Zea mays
tctgtgatatatactgctgtccctactattgtcgtcgccattctcgacaaggatctcagccggcggacattgctgaagtatccccaactctatggcccagggcagcgtgatgagaactacaacctgaggctattcatattcatcatgatagactccgtctggcagagccttgcatgtttcttcatcccctaccttgcatacaggaagagtataattgatggttccagccttggagacctatggacactatccgttgttattcttgtcaacattcacctggcaatggatgtcatcagatggaactggattacgcatgcggcaatatggggtagcattgctgcgacatggatttgtgtcatgatcatagattccataccaatcatgcctggtttttggtaagcacgcattccagtatttgttttctacacttaggccccgtttcaatctcacgggataaactttagcttcctgctaaactttagctatatgaattaaagtgctaaattttagcttcaattaccaccattagctctcctgtttagattacaaatggctaaaagtagctaaaaaaaagctgctaaagtttatctcgcgagattggaacagggccttacacgaaaagtatgttcacaattactgattcggtaactgtatgacagggcaatctacaa

SEQ ID NO: 2093 - DNA, 359 bp, Zea mays
tggggtggaggcgtggagcaagcaatgttcatagaaaccacggtcacgtactatacaatactactaccgtaccacaccacacggcagcatcattagcagtaggagattagtagtaatcattaattccttattgggttcttgtaatttcgtatataccacgccgccatttttccttggggccgggccaggccagccgataggtgcccgagggccactgcactgcactgctgcattaggtaggagcaggagtggtgggtagcgaatccaccttccagcagcaggcatcacatttgtgtatttttcgactgggtctcccggttgttttgggtcactctgtatcattgttacgacgattgtat

SEQ ID NO: 2094 - DNA, 487 bp, Zea mays
  misc_feature (359)..(359): n is a, c, g, or t
  misc_feature (377)..(383): n is a, c, g, or t
  misc_feature (439)..(442): n is a, c, g, or t
  misc_feature (465)..(467): n is a, c, g, or t
tgtactccaagatttaacacttctttttaaggaagcgcatctcatctatcatcacctgatgtctgggatgcttctgggatatcagtttacgtgtagcatggagttctcctttgactttgatgtatctatcagtggtactcaatttttgcgaaaaggtcctctaatgtaatggttaagacttccgagcagcacttataggtctcgggttcgatccctcttgagaacgaatttcgggcttagctaaaaaaaatctcctctatatgtcccatccgctctcggagatcgatatcaaacgcgtcaccctccagctgggccgttgtagagtgggcaattgatcagcccgttagtgatggagggcngagtttgatatcgatctnnnnnnncggatgggacatatagaggagattttttttagctaagcccgaaattcgttcgtctnnnnggatggatcgaacccgagactcnnnaagtgctgctcggaagtctt

SEQ ID NO: 2095 - DNA, 256 bp, Zea mays
gctctggctcgcgttaacactcgcgcgcctgctcgttgttactgcgtcacgctcgctcttcgtccatcgggcttcacgtgtgctcgcgtttgtcgtcgagccgttgaacccgttttaccttgtcgacactcgaccacgtgttcactcgttaccacgccatcttcagcatcatggttctataagactccgtgcactcgtcgacacccgcctgtcgatctccaccacgcagcgctgcatcggacttaccctgtatgat

SEQ ID NO: 2096 - DNA, 341 bp, Zea mays
agcaaatttatggactgtctactagctacttacaatagacagcatatgttgaatgctgagcggcaacatattctaacaaacatgtttgtaaagttcattaaaagtaacaaattaaactcacctcatgagtagaagctgtctatctgattctgaagaaagaaagtcatcattatcttgggcagaatagtggttggtcctgcttgtatcctggtattttgaagttgctgcattgctcttgcccttttcaatagctctcttgactgtaccgacctgaatatgctcatgcataaattgtgaggatccatgcaataaatttaggtacattgtcaactgcagaattc

SEQ ID NO: 2097 - DNA, 351 bp, Zea mays
ggtggccttgttcctcatttcgttaatctacattcctctagaaatcttatccagataatggatccacaggttatagaggaaggaggcgaagaagtacaacaagttgctatgcttgcagcatcctgtataaacatgagaggtgaagaaaggccaacgatgcgacatgttgaacttagactagaaggacttcaacaaggttccaataaaaagtacaagaaaggtaatatcgtaatgaaggatttcgagaatagtagcaacggggcaaactattcatcagggattagtgaagggcatagttatgaggaatctagtagaagatacagtttggagcaagagatgatgatgtcggca

SEQ ID NO: 2098 - DNA, 353 bp, Zea mays
acgtgagcatcgaggaggcgctcgccaagatcccgccggcagccgtgaaggcgatgcgcgaggaggtgatccggctcatcccgagattggtgtacgcggacgcgagatcggcgcgtgcggacttcaaggacgcttttgacattgcgctggacgtcgtccttgaccgggtggccaagcggcggcgaggggatgtggacggacgctgatggaccggtggccggccggataggaggagtggcctcggcgtctggcctctgccaccgtcacgtgaaccaccctccatcgtgacagtgcgcgctcgtacctaggagtagcatttgaatgggatcctgggaaacttcgacgcctgtctc

SEQ ID NO: 2099 - DNA, 283 bp, Zea mays
gatggctgcaagtaatacacgattagggtcagacagtaaccacttcctgacaaaaatgtagaaaaggcagggaagaaaggggcgacctgtcccgttgcaaaagtgtgcatagattactagtacaaagaaacgaaatagtagtgacttattaactgtgtttattatgtgaaggaatacgagtaggttcaaggggattttgcaaaatgtgtaaggattaagattcagaaaatggaaatgtgttgtttgccattgtttcagtttttgaatcttcggagatggatgg

SEQ ID NO: 2100 - DNA, 357 bp, Zea mays
cgcctccgcccctgcacccgcctctgcacagcattgtaacccagccccgcgccgcccacggctagcgtgcccatgcttctcgactcggtaccgctcgtcaacagcccaacggcagcgtcgaagcatgtccgcctgcttggggtcaacctcgacaacccgcaaccaggcacaagtgcggagtcaagccaagatgccaacacattgtcgctgaggacaccgggatggcaaagaccggggccgttgaggttcttcgaatcgcctcaacacggcgccgagtcatctgcagcctcgtcgcagttgtcatcgtcttcctccaagagagaagcgcactcgtccttggatctcgatctgtgagca

SEQ ID NO: 2101 - DNA, 355 bp, Zea mays
gagaacaccaagatgctaaatgacaagacaagtaatttattatgctgaacttgggaggagacttctactgactgaaggcatgggaatcatacggaaagcagcgaaatcgggtgattaagccgtcagtgcggtgggcagtgacaataagctgacaggggttgccttttagaggcgagggttatcctgcagaggttagcaatgcagtcggcatctgcagtattcattgtgctggctgtgaccatatatgtacataagcatggaggatgatccatgaccagcacacatagaaataattttgtgtaaagagggtaatctgtactgatcatagttttggtgttgataattaaagcaaagg

SEQ ID NO: 2102 - DNA, 696 bp, Zea mays
  misc_feature (397)..(399): n is a, c, g, or t
  misc_feature (473)..(476): n is a, c, g, or t
  misc_feature (478)..(481): n is a, c, g, or t
  misc_feature (484)..(488): n is a, c, g, or t
  misc_feature (519)..(523): n is a, c, g, or t
  misc_feature (535)..(536): n is a, c, g, or t
  misc_feature (564)..(564): n is a, c, g, or t
  misc_feature (601)..(603): n is a, c, g, or t
  misc_feature (605)..(609): n is a, c, g, or t
  misc_feature (619)..(620): n is a, c, g, or t
  misc_feature (625)..(630): n is a, c, g, or t
  misc_feature (634)..(636): n is a, c, g, or t
  misc_feature (638)..(639): n is a, c, g, or t
  misc_feature (643)..(646): n is a, c, g, or t
  misc_feature (648)..(649): n is a, c, g, or t
  misc_feature (656)..(658): n is a, c, g, or t
  misc_feature (663)..(668): n is a, c, g, or t
  misc_feature (672)..(672): n is a, c, g, or t
  misc_feature (675)..(676): n is a, c, g, or t
ccacgatctccttcttcatctcctgcagctgcttgaggagcaggtcctcctcctcccccttgctgccttctttgccgccgccgtccttgttgcgcttgtcgtccttggcctggtcgtactctcttctgaagagcttccaggcgtcatcaccttcgagcttgggcgggcggaccacgaggcccgtgcgcgccatggtcttggcgtcgtcttccttgcggcaggtcaccagcacggcgcccctgtgtttcgtcttgggcaggccgtaggcgaggcggtccccccactcgccctccaccggcggtagcagcgtgaggttgctgtaccagcatccctgtgcgtcgtcgtcgtcgtggcggtacgcccggatgtcgtcgaacacgatcatgtacgacgtctnnngacaggatgctggtacagcaacctcacgctgctgccgccggtggagggcgagtggggggaccgccctcgcctannnntnnnnagnnnnngcacaggggcgccctgctgggtgacctgccnnnnngaagacgacccnnagaccatggcgcgcacgggcctcgtggnccgcccgcccaagctcgaaggtgatgacgcctggaannncnnnnnaaaagagtannaccgnnnnnngacnnncnncgcnnnnannaccgccnnngccannnnnncggnagnngggacgaaggaggacctgct

SEQ ID NO: 2103 - DNA, 670 bp, Zea mays
attccccccaccctcccattttcttctcttttctagacatcttactatgctctttctaggaaactggtcgtgctgattcaacaacattctatagtcaaagtcttttgcacaaatgaatcttatcgtcttgtcctttttttcttgtaatttacatttccaacctgctctaagtttcctacataatgacttcaatcaaccctttttacagtgaagttcacgaatatgctatgagaaaattctttgccagatattttcttgtgaaaattcagttggatgcatttgctccttggttaaagagtcgacttcagacaagttcgatataaaagaggaggtttgcctctgccttaatgcacctaatttatttttccacatattcatgttgcatgttgcgcagttgtattgccatattgtacctaatctttaaatttccatgctacaaatttattaatcggatcatacctatttggttgtaaatcacttttgcatggtgataaggtttcaacttatactgcaatcatgatcaccatgacagctatttcctttgctaccaaaggttattattagtttgatgatgtattaccaaaaatagccacaccgctcaaaagacgaatttgaatatatttttggtaatatattaccaaattgtacttttagaattgtgtaactgtaa

SEQ ID NO: 2104 - DNA, 362 bp, Zea mays
gcttctgccctgctcctggtcctgaccgtgttggtctcacggcgacgcggcttcccttccaggcacctgggcttcatcctgtccacgatggatctcacatagcaagaaccacagctctgtgagcccatctttttccccctcctatcgtggatgctagatggaactgtatgccttgagcattcgtggcagtgctctcctaaatacatatttataggtagggcatgcacatttgcttagtacaattgagcattggaaaataagtaacttaactaaattatcgtccacttagattatgacaaaccttgttcatgtcaaaccgggacaggccatgatgattagagcaaagactcgtgaaagagaca

SEQ ID NO: 2105 - DNA, 149 bp, Zea mays
atggcactcaagttttatctttggatcacttgagaggggttgaaagcaacccttgtccaaagggacaccacaacgtggatgtaggcaagcattttaggcttggctaaaccatgggataaaatcaccggtcccacttgtgtatttacttt

SEQ ID NO: 2106 - DNA, 373 bp, Zea mays
gtttcccctaccgtcgatgacagggccatactcctgaggttcaagcccatactgcaacatggtctctccaatctcagtagcctctataacggatgaccaaatcaaggattcagaacaccaacgggtcagaatgggcagtcatatgcacacacaccaactgtcatgagaaacgctacataatgaactgacctccatgtaccagtgtctgggacggtgatgatctcctcctgctcccttttcatctccacatggcgcgggcgcagatcagaaattcagaatcatgcattaatgcacacctttttttaattgaaaaaaatgtggtgtttgtcatgttctcagatttgcaagtagagctcgtgcacatgtccatatc

SEQ ID NO: 2107 - DNA, 217 bp, Zea mays
  misc_feature (184)..(184): n is a, c, g, or t
gtttaggtcagattccaatcgattggtgacaaattggagctgatggggtttcgttaagtgcaacggatggaaatgtattccttgatcagatcgtgtcaacagctcagtgaccagtcatatgtacaataggtagcttgcagattgtgtcagtgaaatccatcctatattgctttgcagtggtggnttagagaccagaactagcttccttctactccta

SEQ ID NO: 2108 - DNA, 644 bp, Zea mays
  misc_feature (279)..(415): n is a, c, g, or t
  misc_feature (421)..(425): n is a, c, g, or t
  misc_feature (440)..(444): n is a, c, g, or t
  misc_feature (451)..(456): n is a, c, g, or t
  misc_feature (486)..(486): n is a, c, g, or t
  misc_feature (506)..(513): n is a, c, g, or t
  misc_feature (564)..(570): n is a, c, g, or t
  misc_feature (592)..(595): n is a, c, g, or t
  misc_feature (602)..(624): n is a, c, g, or t
gatcacttgtgtcttgcaggcccacacataaaccaacaaaggaggcgtcaaatgatgaaatctgaccttgaacttcttgagcacctcaaccacaaactaaatcaacagaaaaccacaaccaaagatggtaatgaatcacgatacaaatgtccctcacaaaaagttagggctcttaaataatgttagtttaaaaataaatagtaatagggtccgatcctaatccgattcgatccttaaaatttatagtgtaaaaatctagagcctattaccacccctaannnnnnnnnnnnnnnnnnnnnnnnnnnnnnnnnnnnnnnnnnnnnnnnnnnnnnnnnnnnnnnnnnnnnnnnnnnnnnnnnnnnnnnnnnnnnnnnnnnnnnnnnnnnnnnnnnnnnnnnnnnnnnnnnnnnnnnnntgactnnnnnaggtttgcgtgcacnnnnncgttccnnnnnntgctgctccttcgcttgaggcactaccgtngtaccgtgcataacttaaannnnnnnngtgttgcagaccaattcagacgccctccacgtctctaccaaaaaatcgcannnnnnnatgattattttttcacctttgnnnncatcatnnnnnnnnnnnnnnnnnnnnnnngcgcttagattttgtaaatt

SEQ ID NO: 2109 - DNA, 631 bp, Zea mays
gtttgcgaggtaattacaaagctgcaggctgccgcctggaggcagtgggaggccctggtgaagtttcttcaccgtgtttctaaccctgctcattttgtttgcagtgcaaatttctcctgaagttactctcagctcgaaattgcagtacttatgttcatcatattctaataagtgtagggcgcccgaagggtgcatgatattctagtttcagatcaatgctgagtgcagggagaggcaatgtcttacctcttggatgttcatctctatattagtccatccataggttagtcatttcatcgtcaccaaatcattataaaaataattgattgattatggtatctttgtggtctctctactgaatgcatgcattgatgtgctaaagttctgctgtaatctgcacaggtatgcagctttggactgtcgatgttaaatcttgtctcaccagcgactacttctgatggtgtggctacctgagcagcttgtaccgattctgccttagcttgccgatcaacgctgtccaccaggacagagctgaaaacttgaaatggcaagaccagaaccctgaagttgaagtgttggcaagaaactcagataggtggatgaacgttgtgagccacctagctaagagctt

SEQ ID NO: 2110 - DNA, 960 bp, Zea mays
aatttcatctggaaggaaaacgcgtattggaggtgcgatgcttaatttcaggttcatggttatgcatataccatgtgaacctctgtttgttaattaaattctttattcttctattctactgaagtcactgaacttgttacttttggtgcaacctttattcttttctgtagtaagggatgcaagcagctttgtctgcgatcctgcaaatatcccatttttatgcgggttcagagataacattgtatcccacggtgtatatatagttatatacttgtcaacaaatgaatctgcactgataatatgtgctctgtggtataatgttcaagtgactgttttttttcaacagaagtattcaaatgaaaccgttgtaaagtaggaaaccaatgtattataagcaagctacttatattagctactttattttgatttttagcttggatgtggacatggcctccctggcatttttgcgggtctcaaggtattgcccttgatcctttcctttgtgccactttcaaataattcctcatgtatattgatttttcaaaaacttgaactgtcagggtgctgacctgattcatttccaagatttcaatgccgaggtgcttaggtgcttgactataccaaatgtaaaagtcaatcttttcaaggattcaccagaaggaacatgtacatgtccgattgttggtttctttgctggtgattggagtgaaatggataagctactactttgcggggatgctgagcaagacaaaacagccagtggtgatacagaaggtaaaatgtgtaatggttatgatatcatcctgatggctgagactgtttacgcggtatcttgtcttccaaatctctacaggctcatcaagaaggttaacattcaaaatttccattttgctgaatattctttcttgaacattaaaaaaattgcttaatactggctttcttacacactgaaagtctttt

SEQ ID NO: 2111 - DNA, 379 bp, Zea mays
gagaagacccgatcgagaggtaattaacgtcgtccatggtgatgatgggccagctggggcgtctggtggacggcatcaagtccaggctgcgcgccggcgccggcaccggaggcaacaagaggggcggggcgaggaaggcggcggcgacgacgacgaccacggggtacgacaaggtggagaagacggagagcatgcgtgtggagatccgcagccgccaggcgcgcaagctcatcgccaagaacctcgacgccgccggctccgtcggacgcaccggccggaccaacaagcgcttcttcctcgccttctgatgcatcatcgatcgagcgtggttcgtcgtctatatatgtgtgttattatttatacgtaaggtgctagtgac

SEQ ID NO: 2112 - DNA, 1048 bp, Zea mays
gtctatgtcaattccctgatccacctcgtccgttcataccgtttcctgatacgtactacacctcatcccggagatgtgttcactttcaattttgaaggcctgtactgtactgtaccctagttactaaaccttgggtttccctcgtctctcgcttcatttaggatacgtacgacgcttaagtcattcagatcggctaacctatccggtggaatgagtactgtctgcgaatctacatcatgcctttgtgaattttccttcaactttagtagtattattaaattatacccgttttgagcccatatgcttaaaagaggggaaacagtaatattatagctttaacgaacacacgattggagtgtcaagcatggatcatatttcctctgttcctgtttatatagtaccatccgtgatgccgttatagtatttatggaagtcaaactttttttgctggactgcatacaggacaaggaagcgctgaaggtagccatggtctgcaagacacaaaggagcaggacataaaaaagggaaaggcggctcttgtttccactgaactgctgagggaggatctggttcagagtgctgttagttttctgaaacacccgaaagtagtagcctcttcagatggacagaggcgttctttccttgtaaataaaggactcaccatggatgaaatagatgaagcatttcgacgtctacaagtaagatttgtttgcttaatttctgattaagtccgcatcacttattattctgatttcttttacttttgcaattctttttttgtgggaaaattaaagagcccgtcatcgaattctgcgagctcaaatatgtgcacatctcaaggtatggcagagtccatttactaagttagctttttatatgatattttagttctatatgttcgtggatcatataatgatgtttcattgtttatgtgtgttttccgctgtaaatgatggtgattccatatgaaattacccattcagagtttcagacctaaatggcttcatcatgacaaatctaacttagtaacttcattgccttattatgc

SEQ ID NO: 2113 - DNA, 440 bp, Zea mays
cctctgagcaatgttacattcgttgttaagcttcctgtggatcctactctgctcaatgtttcacccaaggctgtgctaaaccgggcagagaaagagcttagatggcatatttcagacattcccctgaaaggtccagccggcaggctcagggcgcggatgcctgttgaccaagactccaaagatggtgagctagaggttgttgggatggtgaagtttgcttaccaaggtccattcacattgtctggcattaaactatgcccagccactgatggcattgcccaatttaatgaagttggccataccttctccagtgggagttacctgtgcatttgataggtacctgcttgtgctgtaggtgcttgttcacctgttttatgtttgtttctacagcagggtgtgaaaatcctattgtatgtagcaaagtgtgtttctttcactga

SEQ ID NO: 2114 - DNA, 440 bp, Zea mays
  misc_feature (388)..(390): n is a, c, g, or t
tatctttcgcctcttgtgttcccggtgcttggctgccattcgctgctttcgcttggcattgcgttctgggtccacggctgcaacaatcttctgtgcctgctttctaccgtcccgcttctgtttcaggcccatccgaacgctcttgtagacttcaacaaatttctcggaaccaatcaggtcacgtaacttgttctggaccccctgggccagttgcttcacttcatctgaaaccacaacaaaagaacggtactcagacagatggcaagccccaagcactgaacttgcctacacacctccgatatgctgaaaacaaataatgaacaataccaagacaggaatattaacataccactaacaactttcccagcaaatccttcagaaactttannnacgtcgaggaggtgcttgggctgttctagagatgttagcctctcaaacaa

SEQ ID NO: 2115 - DNA, 296 bp, Zea mays
gggtatgtgctgtgtgtagcaacagattaaagtagttataagttctagtagaaagattagtgtagctcatttatgcaaaaaaaaattaaggttgcagctcttggcaaatttaatttgcagggtacgagcaaggaaggatcttcaagaaatacgggtgggatggaagttgccttggtatcaactgtattgaaggttttggggactaagttagctcctcttgcactcaaagagttgagctctaaagcaggtgtggccaaagatcttcaggaactccaggacctagtgaggagatcaac

SEQ ID NO: 2116 - DNA, 927 bp, Zea mays
  misc_feature (862)..(869): n is a, c, g, or t
tttgtagtccccaaaatgcacataatgtcaggtatatatatatactttttttagaaatcctgatgtcttactaaaaaccaagtactgactacttttctgttgggatctatacctttccatatcatgcaaatagcctgctaatctaggttttcatgatggcattgtggctagagtcccatttcttgttttgggttaaaaaattagtaacctggtaacttctcgtcctgaagtttggattttggaatctaactagctagtaaatgtgcttctatatactccagaactacatgttttcgtgaccagagaaagtatttaacaacatgggatcaaatggagagtctatggccttaaaccagttctttgagaatgaaaccagttttggctgttaaggataaaggatctggcaagttcccagtggctttttaaacctgagctgctgagctgtcatttaacacatgaattaagttcaccgatatgctgttgtgtctgtcttgagaagttccacaagcaatcttggagaaagatcatgtagacatcactattttttcctcattattttgttttgtgcccaggtgcttgtttgaagagagagtaatattggctttggctatggaagcagcaggcgttggtaatttgtcaatttggctaggggtttgttaaaccttattcagattttgtgcttgtggaacgtcgtccctcgtccatatcttcatgtaggaatgtacatatggaagaaagcgacaacagaggctctgaaagagaggacaaagacatccaagaggtgaataaggaaattattaaggcttagtttggatactctgggattagagtgttttgaagggattggagagggtgtaaatcnnnnnnnngatcaaatactctctcaatacacctcaatccacttcaatcccactcattactagagta

SEQ ID NO: 2117 - DNA, 1211 bp, Zea mays
  misc_feature (404)..(405): n is a, c, g, or t
  misc_feature (446)..(449): n is a, c, g, or t
  misc_feature (455)..(456): n is a, c, g, or t
  misc_feature (458)..(462): n is a, c, g, or t
  misc_feature (467)..(468): n is a, c, g, or t
  misc_feature (472)..(472): n is a, c, g, or t
  misc_feature (486)..(486): n is a, c, g, or t
  misc_feature (490)..(490): n is a, c, g, or t
  misc_feature (492)..(498): n is a, c, g, or t
  misc_feature (501)..(508): n is a, c, g, or t
  misc_feature (513)..(518): n is a, c, g, or t
  misc_feature (521)..(528): n is a, c, g, or t
  misc_feature (534)..(553): n is a, c, g, or t
  misc_feature (556)..(599): n is a, c, g, or t
  misc_feature (602)..(611): n is a, c, g, or t
  misc_feature (614)..(614): n is a, c, g, or t
  misc_feature (616)..(618): n is a, c, g, or t
  misc_feature (620)..(644): n is a, c, g, or t
  misc_feature (650)..(658): n is a, c, g, or t
  misc_feature (660)..(664): n is a, c, g, or t
  misc_feature (667)..(682): n is a, c, g, or t
  misc_feature (684)..(733): n is a, c, g, or t
  misc_feature (735)..(735): n is a, c, g, or t
  misc_feature (737)..(870): n is a, c, g, or t
  misc_feature (872)..(876): n is a, c, g, or t
  misc_feature (878)..(901): n is a, c, g, or t
  misc_feature (904)..(904): n is a, c, g, or t
  misc_feature (906)..(915): n is a, c, g, or t
  misc_feature (917)..(972): n is a, c, g, or t
  misc_feature (976)..(1019): n is a, c, g, or t
  misc_feature (1022)..(1043): n is a, c, g, or t
  misc_feature (1045)..(1049): n is a, c, g, or t
  misc_feature (1051)..(1065): n is a, c, g, or t
  misc_feature (1068)..(1071): n is a, c, g, or t
  misc_feature (1073)..(1111): n is a, c, g, or t
  misc_feature (1114)..(1119): n is a, c, g, or t
  misc_feature (1122)..(1122): n is a, c, g, or t
  misc_feature (1124)..(1164): n is a, c, g, or t
  misc_feature (1170)..(1181): n is a, c, g, or t
  misc_feature (1183)..(1187): n is a, c, g, or t
  misc_feature (1190)..(1208): n is a, c, g, or t
acttactcttatcgggatgggactggacaccaatgaagaattcctaatggctatgcaacaacagcttgtccatgaaattcgtgaagtatggacaacttcagttgagcatctactttatatcaaggaagaccttatcatccctcatggatgtgttcattctcttgtaatctacgaagttctgttaaagttagttgaaccattttctgattctatgttctctctactatttgacaacaacacatcttttatgaattaattattaaacaaaacggggcgcaagactgattggtaatagttcattcccctggaatcgacgaatgtccggaaaagttaatccaaccattttctgaatcatagtggtctctcctgcggttgacaacaacaccttttttaagaattaattnntaaaaaaaatggggcggaaaaatgattggtaaaaatgatgnnnnaggagnngnnnnncatcnncgancatcatactagtgngcanannnnnnnggnnnnnnnnagaannnnnngcnnnnnnnnttaccnnnnnnnnnnnnnnnnnnnnggnnnnnnnnnnnnnnnnnnnnnnnnnnnnnnnnnnnnnnnnnnnntcnnnnnnnnnnacncnnntnnnnnnnnnnnnnnnnnnnnnnnnnaaatcnnnnnnnnntnnnnnaannnnnnnnnnnnnnnntnnnnnnnnnnnnnnnnnnnnnnnnnnnnnnnnnnnnnnnnnnnnnnnnnntntnnnnnnnnnnnnnnnnnnnnnnnnnnnnnnnnnnnnnnnnnnnnnnnnnnnnnnnnnnnnnnnnnnnnnnnnnnnnnnnnnnnnnnnnnnnnnnnnnnnnnnnnnnnnnnnnnnnnnnnnnnnnnnnnnnnnnntnnnnntnnnnnnnnnnnnnnnnnnnnnnnnaancnnnnnnnnnncnnnnnnnnnnnnnnnnnnnnnnnnnnnnnnnnnnnnnnnnnnnnnnnnnnnnnnnntacnnnnnnnnnnnnnnnnnnnnnnnnnnnnnnnnnnnnnnnnnnnntcnnnnnnnnnnnnnnnnnnnnnncnnnnntnnnnnnnnnnnnnnntcnnnncnnnnnnnnnnnnnnnnnnnnnnnnnnnnnnnnnnnnnnntcnnnnnnccntnnnnnnnnnnnnnnnnnnnnnnnnnnnnnnnnnnnnnnnnnaccctnnnnnnnnnnnnannnnnccnnnnnnnnnnnnnnnnnnntat

SEQ ID NO: 2118 - DNA, 244 bp, Zea mays
gatccccatgagttggaccaacaattcatctggccataaaaattgagagcttccagtacagaccaaaatcctaaaaaaaactatctctttcatttccaatttgcatccagtccttaaggcatagcagttcctctgcgctttcggtcctatttggttccacttttctagaatcctagagatagactcaatactaggaaccttctgatgaggaaaaacaaggcactggatgattacagttgtgttc

SEQ ID NO: 2119 - DNA, 364 bp, Zea mays
cgcctgtagcctagcggggatgaggctgcacctttggtgcaagattttcggttactgtctctggatactactgagccagcaaccgaggagtcgctggagaattatctgggggcttcgcagtttcccaatgacgttgtcgtgccccccgtggagaaggtgaatagtccccgatacactgtttatgattgatgccggacaagccccggtgggccgcagacctcagccacgtcattttcgcctcaacccatggtggttgggtcgctggaaatgactgggccaagatcgctgcaccctgcggactgtccccctcctatgcctctactcatgctgcaagaaaatggaccacagtacaatgcccaaacta

SEQ ID NO: 2120 - DNA, 358 bp, Zea mays
cctttgttttccgataatcttcagagctgtctaagcaattccagagtacagaaggcagaagggtatactctgatcctagaaaagatggcatattctatcggaccagagtcaccagaccttggatgaaagggcttcagtttaagtcctacaagagatggtacgatataggcagaaaaaaattggcattcctaccctatcttggttctaagctgtaaaccttggcctaatttggttaaatctgtctgagcctttgtagaacgatggcaaccaccaaaagtccaactacgtagaggtggatggtgctctggtccgctccattgttcatctgacaggcaatttgccgttttttcttctcatg

SEQ ID NO: 2121 - DNA, 359 bp, Zea mays
cgcctcatcgtgcagcagttcatgtccggctctacggactacatcacgcccatgaacctcagcaccgtcctcgccgtcgacctccagaagcagcagctgcgtacgtgacgtgatgtcgtcgtcggcttcatcagctgcctgatcagcttcgtgcgtcgccattgccacatcgtcagatcagtttcgtatgcgtgtgtagtgagagtacctagctagtgcatcatgtgccatcagtttccggatgtggttttctgcagggtttcgttcgttcgttcgtgtgtgtgtgctgcagtgcaggtgtttaattgtgtgatagtgacgaccatatcctgtcaattgtcatatagcaggacagcttc

SEQ ID NO: 2122 - DNA, 279 bp, Zea mays
ctggagcttgtcgcaaacttcatttcaactcatcttctgtccccgacctaaacgccgaggttcctgtacccgtggactacactgagaaccattattattctaagaagggacttgtgaggtcaaatgacagtggtgactctgagacctgcgccgttggccagactgcagagccgcctgcagttgaatctcggcaagtaagcaaggtgaatagcgtaccagttaataaatgcgagcagaatggtgcttctgctatttgccatgaaaagatgctctccggat

SEQ ID NO: 2123 - DNA, 458 bp, Zea mays
gtaatataacatatactaagtgttgagaaaatctgttacggctgttataggaggatgaagctacaaagtgtagcttgtgtgggtcaatcttccacaagcaatgctttagaaagatcagtgtttgtccttgtggtaaggcttctaatggcaggaagatcgcggcgcttgagcaagctgtacatgatggcacgggcatgccatcaacggaatctattcagcctccacctctctcttcatcttatgggtttttctctgatattctctccaaagcaaggccggacaagcttctgaggccgagaaatagcagtcctgtgatccttatgggttctttgccagatatgtctatatgagctgagttgtatttttgtgttccattgattgtgtatttttgtacacggtaggaaagacgctcctagttttgaatgaatgtaatcctgcagtgttattacttgaggtgt

SEQ ID NO: 2124 - DNA, 360 bp, Zea mays
cacatcaaggcgtcaggtggattcaggaacgccttcaggaagggcaatggtgtgtcgaactccatcggcatcctcctgctcttcatctaccctgtctgggccggtgtgctgcaagtcctgtaggcacccaccattgcctcagtgtttcccctgtgcggtccaggcgtccagctccgttcccgttcgtgcccgtgcaaatgctccctctatggtgatccgtgatcctgtgtcacgagtaggtgatgtttttatgtgtgcttgagttgatcggttgggcatgttgccatgttggtggacagttttgtttatctcatttgttgtagttcgatgtcagcatttggttcgttcgagtacataaac

SEQ ID NO: 2125 - DNA, 337 bp, Zea mays
tacaatgatctgtttgtttcaaccttttcagcttgtggccaacagaagctgctacagacagccaaacgctcagcttttcagctcacttctataagtaccagtttagtcaaaatcgtccaaaatcaacgtaaatatgatatcagtcgactcgttgcgataatagaaaaccgtcattttatacattctaaaccctaccacacgtaatctgcacaatattagaattctctctggtcttcataactaaattctcaccgcaactagattctcaaaaggatcatgagaaaaaagctaaacaaaaaaggctactgtgcagctactctgtgaatggttaattgag

SEQ ID NO: 2126 - DNA, 450 bp, Zea mays
  misc_feature (196)..(212): n is a, c, g, or t
  misc_feature (214)..(214): n is a, c, g, or t
  misc_feature (217)..(221): n is a, c, g, or t
ttcaagtcgatggggattcttgctaattccttctcatcttcaattatcatgttgtgcaagataacacaacattgcattatattaaccacatcttgtcttttccacaagcgtgcaggacgactaacaatattaaatcttgattgcaatacaccaaatgcacattcgacgtccttccttacactttcttgacgagttnnnnnnnnnnnnnnnnngnagnnnnngtaaggaaggacgtcgaatgtgcatttggtgtattgcaatcaagatttaatattgttagtcgtcctgcacgcttgtggaaaagacaagatgtggttaatataatgcaatgttgtgttatcttgcacaacatgataattgaagatgagaatgaattagcaagaatccccatcgacttgaacatgaatgcaggcgcatctatcgccctaccacctgaagtgagcactcaat

SEQ ID NO: 2127 - DNA, 336 bp, Zea mays
cctctgcatcgatgggctgcttggccaatgcagaatcaaacagtttggccttcggagccttttgacatcacaacagttttggtctgtgcagacagtgactgaaggagctccaccgaaggtataacccacaactgtgaagtgactgaatgaaaacataagtggcgacccttcgcgtattggacgtttaaggttgagtgtgcaattttctagagttcattttgcgtgtacaagtaaaaacttttttagagtcgatgagaattataaactggcatatagcttaacttatggatatttattccttattcgttagcgttgaggtgtgtggcggcgtcatgt

SEQ ID NO: 2128 - DNA, 336 bp, Zea mays
  misc_feature (237)..(237): n is a, c, g, or t
cctctgcatcgatgggctgcttggccaatgcagaatcaaacagtttggccttcggagccttttgacatcacaacagttttggtctgtgcagacagtgactgaaggagctccaccgaaggtataacccacaactgtgaagtgactgaatgaaaacataagtggcgacccttcgcgtattggacgtttaaggttgagtgtgcaattttctagagttcattttgcgtgtacaagtaaaancttttttagagtcgatgagaattataaactggcatatagcttaacttatggatatttattccttattcgttagcgttgaggtgtgtggcggcgtcatgt

SEQ ID NO: 2129 - DNA, 289 bp, Zea mays
actggtgtcgctggagatgccatgttagtattatctgtttctcacttttttagttagtaggtaagggtgaaggttgtatctatattcattacatgtgcacattccctaccgtctgaatgggagcgcccgtcccagtcctgtacagaaatgtcaactcacagcagattgtgcacattctttttgtactcccatgggcgggtgctggcctggaacatgcagtgtgtgcaccactgtcactgaattggacagttaatggtttggatacatcgttgcatgtactgttccaact

SEQ ID NO: 2130 - DNA, 1129 bp, Zea mays
  misc_feature (248)..(248): n is a, c, g, or t
  misc_feature (266)..(268): n is a, c, g, or t
  misc_feature (297)..(297): n is a, c, g, or t
  misc_feature (352)..(358): n is a, c, g, or t
  misc_feature (362)..(363): n is a, c, g, or t
  misc_feature (366)..(370): n is a, c, g, or t
  misc_feature (373)..(373): n is a, c, g, or t
  misc_feature (375)..(382): n is a, c, g, or t
  misc_feature (384)..(390): n is a, c, g, or t
  misc_feature (392)..(393): n is a, c, g, or t
  misc_feature (418)..(427): n is a, c, g, or t
  misc_feature (434)..(439): n is a, c, g, or t
  misc_feature (448)..(449): n is a, c, g, or t
  misc_feature (451)..(453): n is a, c, g, or t
  misc_feature (455)..(459): n is a, c, g, or t
  misc_feature (465)..(466): n is a, c, g, or t
  misc_feature (471)..(475): n is a, c, g, or t
  misc_feature (480)..(482): n is a, c, g, or t
  misc_feature (484)..(484): n is a, c, g, or t
  misc_feature (487)..(487): n is a, c, g, or t
  misc_feature (494)..(523): n is a, c, g, or t
  misc_feature (529)..(537): n is a, c, g, or t
  misc_feature (539)..(543): n is a, c, g, or t
  misc_feature (545)..(546): n is a, c, g, or t
  misc_feature (549)..(551): n is a, c, g, or t
  misc_feature (554)..(554): n is a, c, g, or t
  misc_feature (556)..(559): n is a, c, g, or t
  misc_feature (563)..(565): n is a, c, g, or t
  misc_feature (567)..(597): n is a, c, g, or t
  misc_feature (599)..(601): n is a, c, g, or t
  misc_feature (603)..(607): n is a, c, g, or t
  misc_feature (615)..(625): n is a, c, g, or t
  misc_feature (627)..(630): n is a, c, g, or t
  misc_feature (633)..(637): n is a, c, g, or t
  misc_feature (642)..(645): n is a, c, g, or t
  misc_feature (647)..(654): n is a, c, g, or t
  misc_feature (656)..(673): n is a, c, g, or t
  misc_feature (678)..(678): n is a, c, g, or t
  misc_feature (680)..(688): n is a, c, g, or t
  misc_feature (692)..(703): n is a, c, g, or t
  misc_feature (705)..(716): n is a, c, g, or t
  misc_feature (720)..(724): n is a, c, g, or t
  misc_feature (726)..(736): n is a, c, g, or t
  misc_feature (738)..(741): n is a, c, g, or t
  misc_feature (743)..(766): n is a, c, g, or t
  misc_feature (769)..(780): n is a, c, g, or t
  misc_feature (783)..(787): n is a, c, g, or t
  misc_feature (790)..(806): n is a, c, g, or t
  misc_feature (809)..(822): n is a, c, g, or t
  misc_feature (826)..(830): n is a, c, g, or t
  misc_feature (832)..(832): n is a, c, g, or t
  misc_feature (834)..(854): n is a, c, g, or t
  misc_feature (858)..(871): n is a, c, g, or t
  misc_feature (878)..(885): n is a, c, g, or t
  misc_feature (887)..(903): n is a, c, g, or t
  misc_feature (906)..(906): n is a, c, g, or t
  misc_feature (909)..(921): n is a, c, g, or t
  misc_feature (924)..(930): n is a, c, g, or t
  misc_feature (934)..(936): n is a, c, g, or t
  misc_feature (938)..(942): n is a, c, g, or t
  misc_feature (950)..(957): n is a, c, g, or t
  misc_feature (960)..(966): n is a, c, g, or t
  misc_feature (971)..(994): n is a, c, g, or t
  misc_feature (996)..(996): n is a, c, g, or t
  misc_feature (998)..(1007): n is a, c, g, or t
  misc_feature (1009)..(1016): n is a, c, g, or t
  misc_feature (1019)..(1019): n is a, c, g, or t
  misc_feature (1021)..(1022): n is a, c, g, or t
  misc_feature (1024)..(1026): n is a, c, g, or t
  misc_feature (1031)..(1052): n is a, c, g, or t
  misc_feature (1057)..(1064): n is a, c, g, or t
  misc_feature (1066)..(1076): n is a, c, g, or t
  misc_feature (1079)..(1084): n is a, c, g, or t
  misc_feature (1088)..(1100): n is a, c, g, or t
  misc_feature (1102)..(1108): n is a, c, g, or t
  misc_feature (1118)..(1119): n is a, c, g, or t
  misc_feature (1121)..(1123): n is a, c, g, or t
  misc_feature (1125)..(1126): n is a, c, g, or t
gtctctggctggtgcgtgcgtgcgtgcgtgccgtgtgtattgtgttctgttcgagagtggctggagggtggtggacggcctgaaactgttgcatgatgaggagagatgcttggtagtcctgtgaggtaaagaggcagttagaaggctggtgcctgtgccttgtaccacttgtaccccatcccttgccacgtggattgctggcggcggcggcgtcgtcgtcgttgtactgaagtaaggaaacccatctnaactaacttctaaccttnnncaggccgtccttgcctgtgcttcttgagngtaggagtgcttttaagttttgtgactccgatcttcaatcagtttcttccatggnnnnnnnctannagnnnnntangnnnnnnnntnnnnnnnanncttgatatcgtcggtagtcccggannnnnnnnnncttttgnnnnnnggggctagnnannngnnnnngtattnnaaagnnnnnttgannntnccntcaaagnnnnnnnnnnnnnnnnnnnnnnnnnnnnnnatcatnnnnnnnnntnnnnntnntannnttnannnntacnnncnnnnnnnnnnnnnnnnnnnnnnnnnnnnnnncnnnannnnnacttgtannnnnnnnnnntnnnnatnnnnngaaannnncnnnnnnnntnnnnnnnnnnnnnnnnnnttttntnnnnnnnnncctnnnnnnnnnnnncnnnnnnnnnnnntctnnnnntnnnnnnnnnnnannnntnnnnnnnnnnnnnnnnnnnnnnnnacnnnnnnnnnnnnccnnnnngannnnnnnnnnnnnnnnnctnnnnnnnnnnnnnnccgnnnnncncnnnnnnnnnnnnnnnnnnnnncctnnnnnnnnnnnnnnttacacnnnnnnnncnnnnnnnnnnnnnnnnnccntcnnnnnnnnnnnnnctnnnnnnntccnnncnnnnntcccaccnnnnnnnncannnnnnnctctnnnnnnnnnnnnnnnnnnnnnnnncngnnnnnnnnnnannnnnnnntanannannnttccnnnnnnnnnnnnnnnnnnnnnngtcannnnnnnnannnnnnnnnnnaannnnnnccannnnnnnnnnnnncnnnnnnncttccttccnncnnncnntcc

SEQ ID NO: 2131 - DNA, 396 bp, Zea mays
gcagcgccaagcgccgctcgtcttcttactgaattacccccctgcgtgggacgtacgactgtgtgtgcctgtacatacgggagggttgactgtggtggctggtggatcctaggatgggtgggggtacaaaggggattttctcctgcagctcaaccgttttagtgcctgctgtctggtgggaattttttcttccttctttgttgttgctcctgccgtgattttgggtcttcgtccagatctagctctccgcagtcttgctctagctctctagtggtggttgtattgaagtagtactagctagttgtgactgctcagcagtgagcactacctgccttctgtttccctcttagggcttttgagttcttaacaatactccaatgccgcaaggctagtgat

SEQ ID NO: 2132 - DNA, 368 bp, Zea mays
tagttcaggatctagaaagcgatggatttctaccatcgcgatgattcaaccgattctgtgtttatgttgattttggatggtttctaccaaaacgattcttataaaagcgggttgaaaagctggatgtttgacagtccgcagcagcttttggtggccagaagctaaaaaaaagcccaaacaaacagggtcattccggcatccttttattgatagttcctgttagattgagtacctactagctagtgttgagctattgctacccatcagaggccaatgggttgatagttttaatttgtgccgagaagagaagctgaaagtgtataacatgaccgagacttgactcttgctgttttttttcttccctgaag

SEQ ID NO: 2133 - DNA, 349 bp, Zea mays
tccgactggagctagcgggcaacatcatgatgaccaagcacgatatcgacgtctccatcgttgaacctagtgtacaaaacagattggagcagttctagataggcggaacattcgttttgtccagattcagagaagcaacagcctcttgttaatgcagtggaaattgttcagagacgaaggcgacccttgttttctctattagttcggtcagaatgggatgttctttcagatcaaggaaataaatcgggagtcatctcttgtaacaaagagaatcagagcatgatgtacataaggaaaaatcataggcacggtttatgttggatgatagggtagggtttgcttctgtgta

SEQ ID NO: 2134 - DNA, 277 bp, Zea mays
ctcacctccatcacctggctggctggctggcgcgtttgcatgctgatgcatgcaacggcggggggcggccgttttgttgttctagggtctagttcgatcgacgtgtcctgtttcgactgggtacatcttctttcgttgatggtgtctagtgtctttcggttagggctctgctgctagacttcccactaattgcactgccgcgccgtgccaaagcactcgagtcgcgagtctggtgctgttgatccgcggtcctcccgtgaactaatccaagccatgc

SEQ ID NO: 2135 - DNA, 310 bp, Zea mays
cgttcaaccagaaggtacgtacgtgtacttacttactcatctctctgctcgctggtgcccacttcatttccgccctcgacgattaaaggaccgcaggctgttgctttgttcacacggcatgccattctattcttctagtcatgttcggttcgtaccccatcaatcacttggtaaaacaaaacatattccgacgaactgtgcagacaaggaagctgatggtgcagcaaagcggcagctcaagccattccgtgccgatctcgcctcgaggtcccggacccggagtactggtggaccacagcaaagcggtgcc

SEQ ID NO: 2136 - DNA, 684 bp, Zea mays
ggatctctatcactaaatcactaatgcactatgttgtttagcctctcttgtgtttgttgctttgatgtaactctgttaatgttgttgtgaactacttggactacagaacaatgttactgaaatcagagcagatgcattgaagttgttagtcatgttgaaaacacctgagccgcgtgctgcagctacaattggagcatggttgaacatattccaggtttactagctgaactttttaatttcactacttgtgagttgtgggaatatgcatgccctgattcactctgaagtttgttttcagttcttggttgtgatggcaatatgcaccaactgcttgcttctcgtttgtctgtatgacgaggaggggaaatggaggattgagccaggactagcagcaatcctcataatggagcatgctctcctcttaatcaagtttggtttctcacactttgtgcctgaggtgattttctgtatctatctgcttctgttcagttgctgcgatttcttcataactgaagtgcccttgtgctgtttcttggttttatttctgccaattaggagcctgcgtgggtgaaagcaaatcgtgtgcgatatgtagctcaggcacaaaacgtctgctccaaacaacttttgaggagcatttcaaaatttgacggaaaactggattgagaaacatcatgcacagtt

SEQ ID NO: 2137 - DNA, 403 bp, Zea mays
ccggcacccatgatgataaatcgcggaaaagatggtggggaaagaagagctccaagtgaaacgtgtgagaggtgccccagatcatttttctactgccccgggccaaggaaagcggccaagaatgctagggcagacacgaagaacccgcctcggttctcgcaccgcagaagcccggcaagataatgatgagctccatcgcgggtgggtggcggcgctgttactcgtccagagtgtcaaacagatcaaattagccaataggtcaagcaagagttctgtatatgtatatcaatcaattaaattagttctgagttgtcagttgacagtgtatgtatgctatcgtgtatgtatgtagagtgataaatctgagatgtggaagggtaactagatacagattatccaccat

SEQ ID NO: 2138 - DNA, 1292 bp, Zea mays
tgtaaacatgtcgaggctctggtgtggtatgtttgaatctatcctttggcaacatattttccacggcatgtttcttacaggcaacaaactccactaaattgtagacatcatttcagcaagttgattttctttgcaaatacctgttgttttggttatttaaagcaatagtttcaccaaacgcactgtgacagaaaacattaattgtatccttgttctgtcttgttcttggagcttcgaagacaacttacattggataagagggactactctgaccttcaaaatcttgtcatgaatgcagatatacatgcagaagggtatatttactgtcgaatgtacttgctccctgtgcaatgggagcgggaaaattgtcaaggtgcagttttctgtttcaaaatagcatattcttgttaattttgttatttttctgacgttacattccacagtaagttgaacataagatccaattaatcaatcatcattggctatggtcgttaaattgagtgcacttagttctttagggggtggggtctgccagcattttatagaatatctatacggtttatcaccggtgatgatttttcgttcttggcttaatttttttgcttttcaaaatattgatttgtagagtttttgcaagacttgcaaaggagaacaggtagtgaaggggaaaacgtcagtcaagctagacatagccgcaggtaaggaggaattttctttactgatatatgtatatgcttgacatgaactccctccatcccaaattataggttcttttggattttctaggtacatagcttgcacctagatatacactgttccaaactgacctataatttggaacggaagtaatacatcttattacacaatcctgaattttctgttcaaatgcaaaacataagtgtatttctttctttttactggtgatttgaatgctgtgaattctcctgcatagttcgagaatttattttgaatgctgtgaagtgtaaacttgtggttttacaagcatttccaactggtgtacttgttataataactcaggcaccactttccatgcactgctaagttaagaacgttaatattcaagccaaatcatttagctgtcctagagccatattataaaatatggttctactgaatcattttgcatttctgcctgttctgttagcatttgaccctttcctactatcatgcaatcttaagtgcttattgcggacaggactttgtgtacattataattgaagcgttttttcttcaggaagtgacgataatgacatcatgaaggttttggtaag

SEQ ID NO: 2139 - DNA, 434 bp, Zea mays
accaacggcatcgctgccactgcagcaggagtggcagcaactactcacagaaaggtcggcgttgttccgtttggcatgtcaaacatgtattagtgactggatcatggccgaatcatggtgaatcctctgtgcggttgatgggtctatgctgccttcaggtggctaaacaccgacaacttgaagcggccaatcaaacctttggctggatgctgcaagtttagagtgcagtagacagtgttttttctgtgtggtcaggaaaagaggaacaccgccggcggcatgaagcctgccaaaaagtttgtatctgcctgtgcctgagaagtgtgcccttggttgcacactgagaaggggtatagtcggcagtccggcggcatgtaatctgggcaatttaggcgccaatttctttttctagagcgaggaggcagaagggaaag

SEQ ID NO: 2140 - DNA, 444 bp, Zea mays
taatcgactgcccagcgtttgcagtcactctctggagaaaggctcttcaggggaagtgcaagatatgggctgaaggacacaggtactatgttttacttctcaatatgatgccatgtcgccatgtactcgactctcgtgcttccaaaactcttgcatctgtggcatgtttgtgtagttatttcttctttaatcctttttccattgttgattgtgaacttgtaacgattcatcatattccgcacctgcatagattacatgctgttataggatctctccctgatagcaaattatattttggacgtctggctgcagttcgaaggtggttgcgggtttcctggagtcgccaagtacggaggtcaaggatcttgcaaaacctgagttgcagccgctggttgatgctggcatccttaaagtgccagaccctaaggttgttcaaaaatgact

SEQ ID NO: 2141 - DNA, 368 bp, Zea mays
  misc_feature (359)..(361): n is a, c, g, or t
ggagcatcgcgaattgctcgccggtgttgaacctccgtcgtggtgccatatctcgtcacggggcgagtccgctgctaatccaccgttagtgagttacccttggacatatttaacatcacgtccgcttcacgtaggagtagttgaatgagagttttaggccacaagattatggattgcgtgcgccggcgagctgcgccaccgctgcctggagtggggcggtgaagaaagtgggtggtcatcaaactgagaatagatggtcctgattaaatatggcataccatttcagttgggtgtgcctcagccgctaatctcaaatcaagcgggttcggtttgattaagggagttttaaatccatgcgnnntatattc

SEQ ID NO: 2142 - DNA, 750 bp, Zea mays
  misc_feature (736)..(744): n is a, c, g, or t
tagtctgcaatcgagaacaactatgtagtgcaactgaaaagcaatgtaaaaatggtcactgtaggtatgcccttgttcgaagtattacaagataaaatggagagatttgttagagagtgtaaaccagttgaatgatgctatgatacaagttcccatggaaactactaccaagatatgtcagcacctggttcttcaattccaaacgatgtatgtaaaaaaaatcagcagaccagtcatcatcgtgacacataaggctaagaatttgcaattccaatacttccttccatggcaagatcaaattcaaaacgatgcttctttggaaacaattctttgtcaattaatgttcaacattttagccttcacactttaggcagacaagcaagtccttcaatgtggaatttcagcatacaagcacaaacaatttcttagccatggcatctagtagtaagaggctaacagctttatccgcaaaagaaggcattactaacttgtgcaagtatgagcaacaatttttccatccttacctgaaaagcagcagcatatgcagcttgtagattcgacatgccttcaaatggcattctattggtcaataattcccacaaaacaatgccaaagctgtacacatccactttatttgtgtaatgctttttctcaccacgtcgaagtgtgactgtgctgtatagctgcaaatcacataaagaaagaatatgagctaccctttgcacagatcagtccnnnnnnnnncctttt

SEQ ID NO: 2143 - DNA, 312 bp, Zea mays
gtccagtgtcatgaagatcaccaagaagctcgaagggaagagtgcaagcgccgcgcttgctgctaaacggtcgggaaaaacgaagcacaaaaagaacaaataagtggggtacaggggtagtggcgaagcttcctactttgtaggagccgaccagatgatttttttggagaaatttgctaccattttttttggtgggtaggggtggatttcggtctgtacagttcgggaattcagaacgccgtagttcttgtcttttcggataagttttgtattagaagcttgacactttggtgtttgtattagactggatcg

SEQ ID NO: 2144 - DNA, 376 bp, Zea mays
tcgagtggacgacaccttcgcgctcgacaccctctactacgccgagtacatgaaccgagggcccggcgccgatacctccgccagggtgccgtggccgggataccacgtgctcaacgactccgccgacgccgccaacttcaccgcgctcgacttcatccagggagacatctggctcaacgccacctcattcccctacacgctgggatttacctagctatagctagctagtactacaacgttcgattttgcttcgggttcttcttctggaatactagtatactactgtgttctgccagctccatcgatcactcaggttttcgctttacgtaatcctgagagctgaacctgcatccatcttctactactgtatgattct

SEQ ID NO: 2145 - DNA, 375 bp, Zea mays
taactcttgtatcctctcgtgttctccaccttccaacagacaggcaaaccgcttaggcccctcctcatcttaggattagggcgggtgcgttccgccacccggccggtagaattctcccaccgacagccaggtctattccaacccttttcctctctcaaacggtcacttagaccatatgagccttctccttaatcaatcgggtcactaagaccccacaaggaccaccacacacttaggtgtctcttgctagctttacaagcacttagaaaaagaatgaggaaggaagaaaggcaatccaagtgacaagagcacaaatgaacacaaatgatactctctcaagtctctaagcactagagttgattttggaaacttgga

SEQ ID NO: 2146 - DNA, 527 bp, Zea mays
cctgcttcgcgcattgccagagtgagctacaggacacatggttcgcaccaaattctccatccatatataacaaggtacatgtaattttttagcacacgagctgtattttagccttaggtggtgctttggctaacattgtagagttccagaaaattgcagaggtggtaggtgattggtactttgaaagaggagctgacgtggagattgactgcgcctatccctgtgattcacagtcttgtcgcaaccttataccaattgataaggttagttgcttccgtgaaaagaggttaactgttttggcaaaataaatctactggttagtaactcttctgccaaaaatggaactgacataaaattcatcatttgacataggaactgaggatgtattaggagttcgacagacgattatactcaattatcatcataataaaaaacactcttctaattgttgatgatgttatgttacttgcatcagatagcaaaccaccctattgtacaatctgttggtggaaacatgtttgtgttgt

SEQ ID NO: 2147 - DNA, 595 bp, Zea mays
gcagcatcgtccacatcccaagggaataagagaacagcaggttggaaacaatagtgttggtgttactggggcctgtatgattttgtttaaactgtgtgcacgtttgtgttggcagtggaggaggagagagcgaagctgtttgaagggtcaaacagtgcggataaaccgagaatgagaacgcagcaggagattctaaccaaatataggtttggcggggtaagccatgaacattgcgttttctttttttgatgtgtatcagtgtagagcatggggtggggagctaaatgtagtaggtccattgcattgcaggacgccgccgccgcagctgctcatgcgaaggataagctgatgcagaggcaggagaaactggaggtgcacatatggcttgtaagcaattgctttgggtgagagcagtatgtaattctgtttgtttaatttgtttaccagagaattagccaacaaaccgcggagcttcagaatggagcggagaactttgcttccctggcgcaggagctcgcgaaaacaatggagaacaagaagtggtggaagctataaactgggtttgtttgtacgtatgtgtgttgttggatgacac

SEQ ID NO: 2148 - DNA, 361 bp, Zea mays
taattccctgtgggttggtataaagtgagatgtcaacgtagagaaagaaaatagttagtgggtgagtgagcagagtgaatgggcattctttcatgcaaatactgagcacaatgcttaatgtttcagccttcactgacggtgacatgtcaatagttggtgttcgtcttcacaaaggaatctgtcaaaggaaggcgccttgtaaagtctttcttgtgctgttgtgtgatagttttgtgtgaagggtaactgaaagttgaatgggttttgtgctcgagtgatagtctattttcccctcttcttttgtttgttgatactaaaatgagaaaagacaagtgatattggtttggtttgctaggagtat

SEQ ID NO: 2149 - DNA, 361 bp, Zea mays; identical to SEQ ID NO: 2148

SEQ ID NO: 2150 - DNA, 674 bp, Zea mays
tcttttcatggagatggctgatcaaggcagttacagaaatgctgtgacagctagcattcttgtcactcacctgactaagcatggtaagcgcttgtccctttattcagctgctgcctgctatatatatagctcgttctttttccaatggccatggttgctcactcccagggaaatttcaagaggttgaaaacatcatgcatggctgtttccgagatgaagaccagctcgacactgccttgtacaacacatttatcaagtcgatgcttgaatcaggtctggctaacatatcatactgttcatcagataggcaaacagttttctggctgcaggccagggctatcatacctgacctgaccgctgcagttttagtttccaagcaggtaaactgcattcggccgtcagcatatacgatcgcatggtatcctctggcgtttctcagtcaatgcagacgttcaatacaatgataaggtagataaatgctcggaaaccccgggagccaaaaaaagaacggagttgcgttatttttcttgaatatactgtcggtacggtagtagcccccgcatcaccgctcaccagcttcagtcttctatccagtgtttatggcaaaggaggaaagctggacaaggccgttgagatgtttgctgctgcgcaggagctaggcctgccgatcgacg

SEQ ID NO: 2151 - DNA, 459 bp, Zea mays
  misc_feature (349)..(390): n is a, c, g, or t
  misc_feature (395)..(452): n is a, c, g, or t
gctcggtgtaacatggcagacatgaacaagtgctgagtcacattgctcgccgttctcttccgccactaaggtgattctaagctttctgtttgtttgttaactgatacatatgtataaggatagataggcataggatagggtgggtaagcttacatttttagctagcgtgcattttcagtagtttctgtaactcatatctatctggtttcaagagaaaaaggcaagatatcataggtcggtatgagtttcttacggaacaatgacttgtggggagcaaagagctttttggtgtgtgtcagagctagcttcaatggccgagctcatagagtgacagttacaaatcaatcgnnnnnnnnnnnnnnnnnnnnnnnnnnnnnnnnnnnnnnnnnncaagnnnnnnnnnnnnnnnnnnnnnnnnnnnnnnnnnnnnnnnnnnnnnnnnnnnnnnnnnntttctct

SEQ ID NO: 2152 - DNA, 355 bp, Zea mays
atactacgcatccatacacggaaaatgaagttgggagaggatgtagatctttggaaggttgcagagtgtaccgagctattcaccggtgctgatcttgaaggcctttgcagggaagctggaatggcagcattgagggaagatatctcagcaagtttgatacatgacgctcacttccaagccgcacgaagttcattaagcccctctcttacaaaagcagtagttgatgagtactcaaaggtagatataaatgatccatcgagtaggaaacattgatatgttccttttctatttctttgttgcacactaggcgcaatacacatttgcaaccttggcaccaagacacacagatggagat

SEQ ID NO: 2153 - DNA, 585 bp, Zea mays
  misc_feature (561)..(568): n is a, c, g, or t
agaaagtgttatgatcttaagaagaaaacagtgagcgacatatttggctgtcagcttatgcaggtaactcgattcattcgatgccgcagtttgattgcaaatgtatcgcaaatgaatataaatacgatgtgcaggtaccacaagtaacagaagaagctgcacaagctgttgtagagctctatccaacccctttgttactggcaaaggcatactctatacttgtaagtcctctgcctagttttttttgtttccgtttaaatatacaggtcacaacagttcctcatgttcggaacaaattccatgccctttgtgttgcagtgctacagtactgtgtcttacaaaatacttttttttgagacatctaagctcatgtccagattggcaatgttgtagggtggcgatacctctgcacaagagaagatgctaaagaagaagaacgagatggtaaatgcaggagcaagccgaaacatatttcaccttatctggggtgacggatgaaaaatactctggactggaaccagttgcgggccaactgaactttggtggcttatggtgtcaccnnnnnnnngaccatcttttgtgtct

SEQ ID NO: 2154 - DNA, 772 bp, Zea mays
gggaacgggtgcccttaatgctttccggcaatcaaatttcaatgctgtaggcttgcaaggctacaaggtatgctcagcatttggtcatcagtttctgctaccaggcatttatatattcttcagaactattctgaaattcagtgcttttggctttagaactgttattataatgatgcatttacaacagagtttaggaacatgtactttaaaactttgggttcatttttaacctgttcgatttggtatattctatattgttatgcagcttccagcagattgtcgtttggccgctgtatttgttgctggtctttcgctcactggtaccgtttgtgaacttgtttcttctttctaatttttaatctgttgcattccaacatattttatgttgttgcctgtgaactcaatgcagaagacggtgaaagtgacgagcaggttgttttggttagccagagtggcactgtaaacagaatcaaagttaaagatatatccatccagtctcgacgctcgaggtaagctaggcttcaatgctctaataaaagcgtgtagctggttccaattcattaccttctcgtttcccttccgactttttcaaccatgatctacctctgttgggcaactaggggagtgattctgatgaggctggagcatgccggaaagatccagtcagcatcactgatatccgcagcggcagcagaagtaactgaagattagtcttgcacccaagatgcaagtagtttagtctgaatttaatccctggcgtacgctgcagcat

SEQ ID NO: 2155 - DNA, 251 bp, Zea mays
cgttgtagagtgagtttatgtgttagtgataggaaatagtctaaggactgttctacgataaagcctggagaaagctgaagtggctggtgattacaaaactggtggcaactcccattcctgtggtagtcctggctaactgtaaatatcgtttgacagagcattaccatgccaactcaatctgttgtgatcctcttgtaatgactagtgagttaaggtgaactgttgggtagatacgagatactaggttatta

SEQ ID NO: 2156 - DNA, 374 bp, Zea mays
tttgttgcgatcgatgcgccgacgagcagaccttcctatcgaagaaacggattctggaactcaacaccgagaagatcagagtcgcttctcctttgtcacctggaaaagaaaaaacataatatcataaattagtaaatagagaataaagttgtagtcaattcttgagttattagatagtaaaagtctaaaaccgcctgtgcgcaaaataattttaaaatatattttgccgagtgttcccgtaagacactcggcaaaacaaactttaccgagtgttacctaggctgacactcggcacagtacgctttgtcgagtgtcacctttggacactcggcaaagtatatttttatttttttccttttccagccaaactttgt

SEQ ID NO: 2157 - DNA, 334 bp, Zea mays
atggacaggctgtgcgagcggtggcgcccctaccgctctgttggggcctggtacatgtggcggctcattgagtccaaggtgccccagccggcgccgcccatccctgccctcccttcgccggacggccagattatgctacagcagcagcagcagcaatctgtcatccaaatgatcattcccttttagatgctcccagggatggggtgaattcggtatcacttctgcccattagtcactccatcttagatcaatgtttactctgcgcatccgatagtcagttccgcactttgttgttctggaatggaacggcaggagggtggacatgaaatgagta

SEQ ID NO: 2158 - DNA, 1029 bp, Zea mays
  misc_feature (831)..(833): n is a, c, g, or t
  misc_feature (1010)..(1012): n is a, c, g, or t
catcccttacgatcccttatctacttttcatctcctccaagcactatcaaacaaagaaattagtggataggaagccgccatcacgtagaagccattggatctggggcctgcgctgttcagcacatgctagttgcgcggggtccggaagccatcagatctaggggtgttgctggtcggcaccatcccctgctcccaccacgaagtcatcgtcgccatcagtgacttccaatttttttcaacggaagaagctgtatggatgtagttggaagctacgagatggatgctgcccctgtttgtctcgttgcttcatatctcacttgtgacagaaacttgctctaggatagtgcagccaagattggagttctagttagaatatttcctgctgctacctgttatctgctagtcgcgtcctcctcctgctaccctgttgatggtgcctgtctgcagctgctaaaataactagcttagtgatgagcagtacctaaaacaactaaagtatgtatagttaaaggcaagtagtacttgaattaatgctactactgaatgggatttatagcttcctaagttatatgttatgcattagtagtgttctcaaatttctacggttgtgcatatctccccatggacatctcaaatattttatctaaatcctcacaaaatcaagtgcattaaaataagacagataagtgtgtaaggctcaaaatattttatcttttggttctcaggtccatttgcaagtaagagactttcatttggtactgcttcaaggtgcgtgaatgtttgatggcatgcaaattcattttcatgtcaagtttacattgtaattagttnnnaatttatctagatgggtgtgaaggagatgtatcttcaatattacaatagttacaatcagtacctacgaagaagaagggtgcttatttgcactaccatttgcgtggtttttttgtggtataaactggctagattacataagaagagtattaaatatggtcctttgttactaagagatnnnaacgagagaagcggctc

SEQ ID NO: 2159 - DNA, 485 bp, Zea mays
tgggcatgtacagatggacatgattatactgcttagcttacggtctttcctgtaaagtgtaagtaacaaattcacccctggtcttctaattttgttttcttctaattgtttggttactctcttcacaatcatgtttgttgtttttttttggtagtgttttggaacaagacatttgagggggtttgttttatctaaagattctttgaatggcatacccgctggaaacagaagtgcaaggccctaggaataagtaaccaatcattgtgtcgacaaatgttccacgtctgtaggctgctgtatacataacatactccacattatactttacatgggcggctcacggtgcccttcaacatagtagaggatgaatgtccaagttcctcctggacagtgttctgtgtagggtagtggttttgatagaggattgtatatctagttggtatgttggtgatcacctttgttttgttttttaggaaccaagccta

SEQ ID NO: 2160 - DNA, 349 bp, Zea mays
ctctgcagcaatggcttctgatgccgccggcgccggcgccaccgccgccgttgccgccgccgttctcgccattctggtcgtatcttccatggggcatccaaacaaagggccattatgcagcgagtgtgggtcgctgtgcaatacgaactgcactgcagaggctgccaactccacaacctgcagaagctactgcgacaacgacaccacggctgcccgggaggactgcgaaaggcaggtcctccaggggtgccaggcggcctactgcagctacggcacctgcagccgggactgcaacttggaagcccagaacgcctgcctttctatccatgacgactatacagattgccaa

SEQ ID NO: 2161 - DNA, 496 bp, Zea mays
ggcacggttgaccgccgaagtagctacttcgaaaattgcaagcgttagtcatttcgacttcaatggatgattttgtttgagaatttatttaattgttctacaaattttcaggattgtgagagacgatcaatagcgaagctattccatcaccggacagaagagagacacaacagtgcacaattaacaagatgacacatccttcctagtgatggagggcagaagagagaggttagggattgtattctttgatatagctcagctatccacaagactctccattgaaactttatgcccctgtctaggagtttgtactttatataatgcaagccttctttcctttgtcactccagtcctgcaggccagttcccgcctaacattttttgcagttgacaaggcggattaggagtttctagctgtttggtttttctttgttctccgtaaagctctgtttattcttttgataatatggcccatggatgatctggggaagctatga

SEQ ID NO: 2162 - DNA, 296 bp, Zea mays
tattgatacatggtttattcctaaacggaagactagaggaggcagcaaggtattatgaagagatgaaaagtaagggctttttaccagagaaaaagactgaagaaatggtaatggcttggcttgaaggcagagagcttgccaaggcatcagttattagctccaagggtggtcgtggtccagtgtctctcaaacttcccaagaagtgacaagtttaaggtttagggtttagggtacgataaagttcaagaatgaaatgaaacgaaacgatatatgacggcgcttattgttattcctgt

SEQ ID NO: 2163 - DNA, 420 bp, Zea mays
  misc_feature (19)..(23): n is a, c, g, or t
atgggtagcatgacttatnnnnnaagagtacaacctctgcagagtgtaaaactggtatactagatgtgctcgtggtcatgagcagcccaggactctcgcatgattaacttatgaaattaaacttaatttgtcatatgcatcgcattgtggttttattattaatttttatctcttattactttgggatggtatatacttgcacttagtaattgctaataaaatttgaccaacttattaaaagcaatgctcagctttaaccattatttgttgatcagccttacacttcacatgagcccccattgttggtgagctcatgcacattattccccacacttgttgagcgatgaacttttttgagctcacccttgcgatatataaaccccctagttgaagagcaggtggcctaagaggaggactact

SEQ ID NO: 2164 - DNA, 1060 bp, Zea mays
caacaaacattataaactgcacttagggcctgtttggtttgatggctaacttgccacactttgcctaacttttgtgcctaaggttagttcttcaattcgaacgactaaccttaggcaaagtgtggcacatttagccacgaaccaaacagccccttagtgcatgcacaggtacattgttaagatttcatcagtgtctacacgatcagtttgttccaaatgcctctgcgattatgattctttgaggttgttaatcactagggatgctagtcaccgtatcacttttacatgtataccttctctcttaacattacaatggtagaggataaccataattggagtacatatttggatatggatacaaggtttactgcctttcttggatgtttaggagacaaaattgatgcaaaaataaaattcaattagtactcacaggactactagctgctttgggaattttctggaatatataaaaagaagtgaactcaaaaccattcaactttttatcttagtttcagttgcgcattgctgaatttaacatatgtgcaattaagggttggcaatcataatactcatggatagaagtagaatttgtgaaggttctaagaatttattttctggtcctccttgatgactcgacgatgatcagagcatagggaggcatacttttatcttcgaacaaacctttggtggatatacaagtatttgttgactgaagaatccgatgcagcagaaaatgtctttgaaaaagtttggattgttttaccctgttgcttaatacaccactagcaataatgacatcctttactgaacatgattttcttttgcagccaatttcttagattgaggttgcggttgaacctagctccagctccctatcatcatcaaaatttgaattttatgatctggaagaaagcatcagcaaggcatttcctccaaagtagcgatatatgctgcccttttggctagttgaaaagcacaccggggcctgatgtgtccttttgctcacatcacatgccacggcaatagctagtaccacgaactattttggataccggcagtt

SEQ ID NO: 2165 - DNA, 354 bp, Zea mays
caaccatcatagggaggttccgctgtccaccgattcatcggagcagtccagctggccagagccaggcagcaacgtcggcgaccaagaccctgaactgctggtgaattggccatcggagaccgacttgtcagtggacgagccatggctgggttttatgagcaacggcaatgagcttggcgatgtcgaggggacgtcgccgtgggacggaacaacagactggctgctggactaccaagattttggcatgtgcagctccaactcggtggacgattcaatgttccacgcctcaaatggattgaacttctaaacgttggagaaaggctgtccaatttcaagaaatagggaggaagacag

SEQ ID NO: 2166 - DNA, 1063 bp, Zea mays
  misc_feature (938)..(939): n is a, c, g, or t
  misc_feature (966)..(967): n is a, c, g, or t
  misc_feature (987)..(991): n is a, c, g, or t
  misc_feature (1026)..(1028): n is a, c, g, or t
  misc_feature (1047)..(1051): n is a, c, g, or t
cgagctgcgcgcctgcctccgatgccgcctcgtcaagacctacgaccaggaacccttctccgctggcgccgctcccctcccccctcctcacgcctaggcctgcggtctaggttcaccagcctcccgttgaagggagggttcgaggactgggggtttcgtttctcctggtgcggtccgttctcggcggcggctaaggtttagctcgctgcccctctcgattccaaccggtgctagattttatttgtttttttgcgttgtagcattgaatacctattgcaatggcagtgtaaaaagtaaaagagatgaaaaatacatgttcgcattttacttttgtcataacttttaggtggcacctctgtttctgtgcaatacatgaattaagagatgttatagtttctacatgatcagcatgtcagttctaaataagtgcctgatgtttatgtttgagcttgtatttagagctaaataaaatcaaggccttgcatcagtttgtttaaagttcacttctgttcttggttcatagtagaatttatttatggatacgtctattcgttgcgctgtggcattattaaccgggatcatgcaaatctgcaggtaggttcattccgggttgctacacacttgctgtttcggaggaacttcaagaagagtatcaggtgaaaactacgtacctccattttagaaacgacgatgactaatatacaagcagctattatgtgtaagcgtgcaagtagatctcattccgttagatatagatctaaccatatgtcatatttagcatttaaatcctctcactgccgccttactttataaaaaagctcctaacaaatcacgattacacatacggttggatcttagatctaacggacaaagagagctacttgcacggcttgcatatttgtcactgcctttagaaacactcactatgatttaatgcnntactcgagacacgtcgttgttcatcanngcaggggagccaagacaacnnnnngtagtatgtgccacccaagcgatgtctagagctcnnnaagcagtatgaataatttnnnnnatataaaaaagt

SEQ ID NO: 2167 - DNA, 290 bp, Zea mays
tccagctgcatgcacagcacagcacagcacagcacagcacaaggtttggtttcctccaatgcctcaaatcaatgcaactttgcatgcactttcaggattattatccttttccttgacagactgaccaaatacagcatttctaaagagtgagctacaattggttggaggctaatggtacccgagttgctccgttccttgttatacaattgactagaagctacaagcaagataggtgatatcactgtccggaatctgtgaatggcgtccacaaataaatacaccctccatcc

SEQ ID NO: 2168 - DNA, 397 bp, Zea mays
aagtatcttttgtggagggcagttatggactgagacatctcatctcacttgtagagttaagtaaactaaaatagcatcaagttaattgttagtttacacaatattttgaaatgcgcccagcaacatgcattttagtacgtgtttatgtcatgtgatgcatgttcaactgcattatcttcattttcatcccttctacaaagtttccaacatctgaaccatctgttacttctcagcaggttgcagatgtaggccattcctgaagaatgatggtcagttgctgctacgtctaatcattgggttccgtattactacatacacggagaaaacagattttccacatatattctttgttttgttctacaaacaaagttaagtgcttcgacaacatattcctacc

SEQ ID NO: 2169 - DNA, 342 bp, Zea mays
ttattttgctgatctactcgttgatcaagcttgagaatgaagaggtatacatgtatcactacacaattacatgacaacacactattacatgacaacagtattggttcaatctttgtactaatacaaaactgtttttatgttgctttagatgagaaaagaagagaatgatgcaagtgatcccgatggcatgaatgatgaagaagagttgtttgggacatagtaatttgtaatatgatatctgtttgacatgttttatgtttgttgtttgcatgtgatgtgtttgtatgtgtgtgacatgagtgtagacataacttctcactcaaataatgtcaccatgtatta

SEQ ID NO: 2170 - DNA, 411 bp, Zea mays
  misc_feature (211)..(213): n is a, c, g, or t
  misc_feature (270)..(273): n is a, c, g, or t
agctcccttgcaaatggcgattccgtgtgttcaagcgggacgatgcctgcttcaaggcaacgtcgtctagcgaaggaaattgcctcgtccagtacctcctctccatgcttcctcagtgacgctcacgcagtcacgctccatctcatctccactccacttctccgccggcgccgcgacatctccaggcgtgggctgaagctgaatggtgagnnntgagttggtggctgtgggcctgtggttgctggtgcaggcgtgcacctggctgggcgnnnnccgactggctctggctgccggtgtgcttgtgtttgtgtgtgcagtgcagctggctagtgcagatgtgcttgtgtttttattttattcatatcttattcttgagaacttgatgtatcttctcttatcatgagtgactgt

SEQ ID NO: 2171 - DNA, 258 bp, Zea mays
cggcgtcaccaaggagcgcgccagcgagctgctcaagatgctcaacggctccaaaggcagcgtcgagtgcgtcgagaccgtcgacttcaagggactcaagaggccattttgatcggccgagggacgaaacgagatttctttttttttttgtgaagatttggttcgacgcgtttagatcagatgtgtggatagctgatacatacagatacatgctgcttaattagttttaggagaaaattttgacgctgtaactgcaca

SEQ ID NO: 2172 - DNA, 658 bp, Zea mays
ctgcagagcatttgcaaaaggcgatttgtgaatattcgagtgatgagatcttaactgtgatgtgagtcttccacaaacttttgttgattaccatttgttttcaatggatgctttgacttctagcctacccagcttgcttggaactaaaaggctttgttgttgctactgttgttggatgctttaacttcgtatcattttcccttaagatctgatattcgtatctcattgcgggacatagcatgacacttgtttagaataactactcaggtgcatgggtcataataaaggatgggaagaagccgcctctatgttttctggcgattcagttttgcttgagacatgtaacgctgcgttgctagaagctgcaggcaaatcatgggttgaggtcagcataattatattgaccctatccaaagcatgcttcttttcatctttactgaattggtcttatatagttttatgtacaatccagctgaatttactgaattgggccatgacatggtatgcaggccttttttgtggctggtctgggaggatggaagctccatggaattgtaaagccatgaattattgtaactaaaagctagatgtaattttttagctgtttcttaattattattattattaacctttgtgtagtggtttttacatgccactg

SEQ ID NO: 2173 - DNA, 788 bp, Zea mays
  misc_feature (761)..(768): n is a, c, g, or t
  misc_feature (774)..(774): n is a, c, g, or t
  misc_feature (778)..(780): n is a, c, g, or t
  misc_feature (783)..(783): n is a, c, g, or t
tatacatttccaaaaacttaccaggtcttgacaccacccaacttttgctctacattttctccatgttacccacaacttattcatggcttgatgcatttctaatgtgcaatattgaatacatgacatgctgcgccttattttcattctgtggcatatgtgatttatacctctgctgaattctctttttgactgtcaacatcttgcgacttacacttttaaaatgtgatttatacctctgctgaattcattttctcaaaaggctgcccttttttttttaaaaaaaatgtgtgcaaccttgtgcccatcagattttaactgatttgccggttaaaagtgtaatttctgtatatccatttttttttgtcaaacatgtgatttggtgcggcacgccagattcatcacctcaattttcattcataaacttccagactttgtacactactagttactataagcccactaatacccttttggtcaaacagcaggtaagcactgaagcaaaattcatccttgatgccaattatgttatcgtcattggctgtacctttggcgcttacctggaatattgttgctccctggtgtttccaaatcccagctgctggcttggcctaaaacgaaaacctccaggctccagctgctagctgtcataccctacaagtgatggcaccgcactctacactagaattgttacctagtgctgcgaacagcagcaggtcaaggcgtctgtagactctgtacatgtaattctcgaaagaaccaannnnnnnntgcatntaannnagnatcag

SEQ ID NO: 2174 - DNA, 445 bp, Zea mays
gacgtgcagtccgagcttctgttccggaaggagccgtccacgttcaccttccacaaaggatgggccttcccgagaagagtctacttcaacggagacaactgcgtgatgccgccgccggacgcctacccgtggctgcccaacgccgcctccccgcggctgtcgccttcgcttctcctcccgctcgttgcggctgcttgggcagcattcgcagtcctttcgtgatgggcccatatgcgtagggaaggcaaggcaaggcacacaatgtcccatgacaagttctgacctgattcggcgttgctgcttgctgctgatcattagtcgatctgttgcgaagttttatttggtgtcttgaatcttgatccaggaacaggttcagatgtgcattcacgtactaccaagcatgtacattcccaatacttgtaaatttctgcaaagactgactggc

SEQ ID NO: 2175 - DNA, 567 bp, Zea mays
tggtcctggaaatgttcccaggacatctctgactccacaagggctgcaagcacaagcaggtatttccgtgttcacttactgccaacttcctctgttccaaattgcaagtcagtcgtttgggcttagatacagagcaaaaactatgttatctacaaaaaccaaaacgacttataatttggtacggagagagtactacaaatgatctgttgatattttctgacttacgatggcccgccctgttctgagattgttttccatttgccatagcaggatcagtaagagttaatggcccagtgacggattcaaggtatcctcctcaccaacagatcccacaagcatacggttaccgccaaatgcctgcaaggttggacagtaccaacccatcgcaggccatgggaggttacacgctgcagtcgcagaaggcctatgcttgtgcaaacggcaaaggctcgcctgatgtggccgtgaacatgagagctccccccttccatctcccagctggaccaaagaagaacccattagataggatagcacctgacaccaccgacatatacacaagatccctga

SEQ ID NO: 2176 - DNA, 352 bp, Zea mays
tttctacacctgaagacaaatgccttttactgtaccacgatataacttatgggactgctgcgcttggctgtgttttaaaattccactggtcgacatgaccacatcgttggtttgtacaacaattataggcaatcacagtattcgattctttgagtatggttattgaggtatgagtttctgatgtcaagcacgtaaggaaagaacacacgataatcgtgcatgcatattaccgttgggcaattttctttcttttttttattgcaattttacaactgtactgcatatggtcgacctgtaacaattattgaatttatgggtacgtgtatcctgcaagatatgaatcaacttgtaa

SEQ ID NO: 2177 - DNA, 665 bp, Zea mays
  misc_feature (522)..(522): n is a, c, g, or t
  misc_feature (526)..(530): n is a, c, g, or t
  misc_feature (546)..(548): n is a, c, g, or t
  misc_feature (553)..(558): n is a, c, g, or t
  misc_feature (570)..(573): n is a, c, g, or t
  misc_feature (587)..(593): n is a, c, g, or t
  misc_feature (630)..(631): n is a, c, g, or t
  misc_feature (655)..(656): n is a, c, g, or t
cgtatcatcaacgcgaagaaggcaagagagttgtgctcatgattttcagtcttactttaaccaaacttctagtatttacgtttatctatttgctctgcacattcagtcaaatgtgagcagaaatgttccccgcaaaccaccgtaccctcctgctcgtctgccgagacgtcaagctgatgaatactcggagagtgagagggaggagtcagaatatgaaactgacggcgaggatattgaacattcaccgcctcgtggaagggaagatgagctggatgaggaggaagaatacgaggaagaagttgaggaagaagcgcctctctcagatgaagaaatggaggtgaaatatcttttggcctcaaacacatgtttctttccctacgtgcttagattcaccttcttcttaagctaacatgtctaagaatggaatgctttgcaccagataagaaggctctcgattgtaggactatatatatttttaattaggagatcagtttagagggcatttctgtatttttttttgcntaannnnngtggaacttaagatgnnngctcnnnnnnggaagagagaannnnggggtggtggtggnnnnnnncgcgaggagctggcgtccgaggacgacgaatccccannaaggaagcaaccgactgttcagcnncgtagaaag

SEQ ID NO: 2178 - DNA, 818 bp, Zea mays
  misc_feature (706)..(708): n is a, c, g, or t
  misc_feature (768)..(770): n is a, c, g, or t
  misc_feature (791)..(795): n is a, c, g, or t
  misc_feature (807)..(809): n is a, c, g, or t
tctttccaagtgtataatcagagaaaatgcacagaagacacagcaatataatgcttcagttgcaaataaatttccaccccatgttcctcaaggtaaacacctgtgattccgaagaggtcattgcggttagctgtataaactgatttgttgttaccgtacctcaatctactaaatagtactccctccgttctaaaatagtattcgtcttagctcttgatttttatgtctatattcaactagatgttgatgaatgtagacacggatatatagaatacatacaccaaatattgtatgaatccattaaaaagtcaaaacgaattttattttgggactgagggagtaatacaaatacttttgttggattcagtgacaagatgcatccatataatagtatttcagcgaaacaaaccattttttggagaatgtagttaactgacgtgctgttgctgacaacattattctaaaaacactgatttgttatatggatggttgcggataacattattgtcaaaatggtttgtttggctgaaattttatttcacggatgcatgttccactgaaataaactgatatattatgcatcctgtatgaactgatgtgttgttgctgataacatgttaagaagtggaacaattttgcaactctgaacaggcagtttacgttagctgttataaactgatgtgttgttagttgttactgtacctcnnnctaattatcttctgtttttcttcattaacgttctgttattttggagaacggatacctggnnnatatactagacttgctttatnnnnnctgattgctgannngtgctgctg

SEQ ID NO: 2179 - DNA, 515 bp, Zea mays
tactgtgcagtcatgtctttgttgtttgagcggtaatctctgccgggcaatcctatgtacagctccgtctccacgtccatcccgacatccttcggccccgtgtgatcgatggctgccggcgctggaggcggcggaggagccatcagcataggcggcggcggcggcggctgcttcttgcactgcacgcatggcttggatcaggattataccatatgcgtgcatcatgatgttgcagaaatggggagactgtatgcacataagatatcacagcacaggaagtcgaggtaaggcggtagaatcaaagcctgttttcttgggttgttggcatgccgcttgccgcagtgcagcgtctgcaaaatgttttcgcccccattaccttttcacgtaaatcttcgttgctcttgcgcagattcatctcctgtttggtggttgacgcaacaaggcacaagttaggatgtattctgatgtttcaatgcccgatgtagcctgtaggacacgaagctgacttaccttct

SEQ ID NO: 2180 - DNA, 515 bp, Zea mays; identical to SEQ ID NO: 2179

SEQ ID NO: 2181 - DNA, 250 bp, Zea mays
cgcgtggcggcgagagaagatcggcgtcgtcgtcgtcggctgcggcggcggcgggggtggcttggggagtggccgtcgagggctctcgcagtaggtgagtggtgcgctctggattctcgctgttctctgttccgtccaggcggtcgatctcacggggcaatggcacagtgataaaacaccgtataagtagaagtagccggtacagaattcacaataccaaaagttgtggtttgtggactggatgaatgcg

SEQ ID NO: 2182 - DNA, 763 bp, Zea mays
  misc_feature (745)..(748): n is a, c, g, or t
attgaggatacgagaagattgccaagcagaagagggagatgaaactggagcagcagcaaggagctgagacaaattttctgaattcacttaatcatgttcagaagatagagatgataagtggcatcaatgacatgaagaatgagtttcagtcctttctggtaacaatcttttcttatttgattgagatgagtaggtgaaagctttttggtagttgaatgagattggagaaaattgttacttaatgcttcttgctaaaacacaggacaatagttccaagaagtaaacatggtttttgacaactgtacaggatttgagaaaattgttacctgatagtctgatatttcttttttaaacatacgacaaccattcaaagaagtggacctgcatgttttaaaactttactcagatgaacctgctgcccattttgttctttttcatccttaagtctaagacaacataagaagttcgtggccttcaattccgttttcatgtttttctagtgtgttagactgtatgcagcttgattttgtttgctgaatttacttttcaatttaacaatatatttgtcctgttcgtgtttcttaattcagaaaagaggaatgccattccatttttgtcgatgcatttgcttccatgttccgttttaatatgttatgttggcatctgattttatccggtcatctcattggtgtttttgctttacctgatacattgagcaggagtccttcgatgcatcaaaaccggnnnnatctgatgatataca

SEQ ID NO: 2183 - DNA, 377 bp, Zea mays
  misc_feature (368)..(372): n is a, c, g, or t
ttgtccttggctacatttgcatcactcctgattgagtttgttgccagactacagaatgttgttaacgcatttgaagagttgagtgagaaggctaactttaaggatcctgtggtggagcctactgcagttagcacgagtaatgttaggtttctcgataaactatgcaaatttgtaggattctagagttgacacggatcctgtgaaggctaactctaaggatcctgttttggcatccagtttccctttttaaaattaatttgggggtacggaatgtacactaaacttgtaaatgtgcaatcagatgattgcaagttgtattgctggagttcagtttacagctacagaaatcatcaatctggtaaatgttnnnnnctgca

SEQ ID NO: 2184 - DNA, 684 bp, Zea mays
  misc_feature (522)..(524): n is a, c, g, or t
  misc_feature (545)..(545): n is a, c, g, or t
  misc_feature (553)..(553): n is a, c, g, or t
  misc_feature (556)..(558): n is a, c, g, or t
  misc_feature (578)..(582): n is a, c, g, or t
  misc_feature (585)..(589): n is a, c, g, or t
  misc_feature (605)..(609): n is a, c, g, or t
  misc_feature (623)..(629): n is a, c, g, or t
  misc_feature (632)..(632): n is a, c, g, or t
  misc_feature (641)..(642): n is a, c, g, or t
  misc_feature (648)..(652): n is a, c, g, or t
  misc_feature (656)..(658): n is a, c, g, or t
  misc_feature (660)..(661): n is a, c, g, or t
  misc_feature (669)..(669): n is a, c, g, or t
  misc_feature (671)..(672): n is a, c, g, or t
  misc_feature (677)..(679): n is a, c, g, or t
ggtcacacgattcatggacgacatggcagatttcaaggtacgtacgtactatgtattcttcattatttacattgtagctgagatcaagcgccaccaagatcgttaattgtcaactaattaatcagcttcctctacatgttttttttctattgatgattccatcatgtatagagaggaaagaacaaaaccgatgtcgccaccaccgtggagtgctacatgaaggagcagaatgtcacgggcgaggtcgcctttgacaagattgggtcctttgttgaggacgcatggaagacaataaaccaagcagcactcgttggggaccgtgctctgcttccggttgtgcaacgagtcgccggcctcgcgatgagcatgatggtgtttttccacggcaaggttgaccgttatacggacagcgagcacctcaaggaaacgctggaagacctgttcgtcaaccatgttcccctctactagctagtacgcactagctagccgtggccggagtatatatatggattactcctacannngggatattccaccaccctctngagacttnggnnngatcatcatataaactcctnnnnncannnnnttttctttgttccccnnnnntttcttttcaacgnnnnnnnctncctgttggnntcttgnnnnngatnnntnngtccacangnnacacnnnccccc

SEQ ID NO: 2185 - DNA, 506 bp, Zea mays
tcttctataagtttgctgcaggtactgcaaggttctgaagtggttcctttttttcttcttgttttgcacatccttttccacttccttaaaccggttgctgaaactgctaacagtaaagctcaaagaaaacgactgatgcttactagaattttcagttataatatagcctacagtaaccattttattgcaccaggatgttgttcctgttattaaggccatcatgtgcaatatccccaactcaatcaacttcaatcttatggtgctgtcaaggaaagaaaaataatgctggtgctattccttgagctggtaagcggtggaatgcaaaacgcaaggggtcaagggaaggggattaaacggatgcctgtttggactgcagctgcgtcactaataagttcagtgaatgcaaacattttttcctgatgtgttcgctatcatatctagtcgagtgcttgactacattcatctttagtgttcgcaaagcatctgaaaacttgtcttaggctcta

SEQ ID NO: 2186 - DNA, 230 bp, Zea mays
gcttttctgcagccgacgatcgatccagtactactctacttgtgtgagtatgtgattggcgagaggtaacgactagggtgccctcacgtagcttccaggccgatgatgattaaggaagccggattacgtagatgcgtacgcgttgaaattcgtcgacagttttctgcctttattatgattattattgccagggttatatggagtcttggttctgcatttgtgttgtttga

SEQ ID NO: 2187 - DNA, 1139 bp, Zea mays
  misc_feature (804)..(806): n is a, c, g, or t
  misc_feature (851)..(854): n is a, c, g, or t
  misc_feature (954)..(954): n is a, c, g, or t
  misc_feature (982)..(993): n is a, c, g, or t
  misc_feature (1006)..(1021): n is a, c, g, or t
  misc_feature (1027)..(1039): n is a, c, g, or t
  misc_feature (1063)..(1069): n is a, c, g, or t
  misc_feature (1083)..(1094): n is a, c, g, or t
  misc_feature (1103)..(1105): n is a, c, g, or t
  misc_feature (1119)..(1122): n is a, c, g, or t
tcgtgggcttcaacagatgtcacgggtatgactattatcagatggtcttaccttttttttaggttgtataataaatcttgcaactaaaactggatgcctttctgacaagtgaaaagtgaaactgtacctagttttaatcttcaatcgtgtctcttctaatcggtatgtgatatgtgcataacatttatttttgcagtatgaaatactgaataatcttcagaaagcgcagaagtcctttcatatagaaaccgtacctccattgaaacttgcaccgccagctatataccatgagaagatacagaagaggaccacttcggttggtgaaactagcaaacattctgttagaagtcagaaaccccaaaaaatttggcaaatgaaggagaaaaaatcaaaagaggctgggagtcatcatccacaaaagtcaagttttctacgtgagttcatattccagtcactgacatcataggcattaatttcactgtgctgattcaattgtggctttctgtttgcctgcttacttcctttgatcctctgcaggttaatagaagaaaagattgctgatttgttaagtatggtatgtagttcaagctttacgccttcagtaatcttgcttgtatcgtgtggttttaatatatgcgatatatatggagaatgtctttgagatcaatactaaaagaaggatattaagtctccagcctatatacggctggatgcacgatgaggcagaacttgtcaccgcagtagctctttcgaagtgatgcgaaacctccatcttttgagtcttagcgaaacacctgatgacannntcagcgtggcacaacaaagttagacactgtttacaaatggcttcnnnngtacttatgatcaagagaaaaggtggcaggactagaaggaaagcgtgtgtatttgaaattttggatggagttcagagtttgtactgaaattcgctggcgnggatggttggatagactatagagcgtcnnnnnnnnnnnntagtgctatttcnnnnnnnnnnnnnnnngcgggnnnnnnnnnnnnntcgaatatgtttatcctttttgtnnnnnnnctggtatgcttgcnnnnnnnnnnnnatggctggnnnccaacatctcttannnnttggtgcagaaaccaga

SEQ ID NO: 2188 - DNA, 351 bp, Zea mays
caggcggagctttttttgcttagaccatattcagaaactgcacccttgaaggattttcatgctccattctatttttgtttgtatacatgggaactccaggatactctcacatcgcccttgccactacagcctacaataaagatttgcaggtagcagtcctgcagttgctgcttgtcattgagttgtggtggcttcctagggttatggagctgccatgcttgttggctgttgccaagactggattccaaaagctgccatctcctttacgtgccattgccttccaccaaagtccacgttgtttcctccagccgcagagctgcttcattgtatgaactatgaagtatcctgttt

SEQ ID NO: 2189 - DNA, 463 bp, Zea mays
gccgccgtcggcttgttccctccgccgcgaatccgcatccgaatcaccaaatcgagtcccctcccacgccctcggtgcctccaatccggaccctccaagatctggacctccggttcgcgggcatgcctggtcgcggcctccgcgtccacaccgccggcgccgggaggcggcctctactcggcggcgacgtacgagctgaccccggaaaacgtcgaccgcgtcctggacgacgtccggccgtacctcatctctgacgggggcaacgtcaccgtcgttgccgtcgaggacggtgtcatctccctcaagctcgaaggtaaataagccttttggatttcgatcggtaggagcgaaatcttgcactagtcgatttccatggtttgcaacttgtaggagcttgcggcagctgccccagctcgacgacgacgatgaatatgggcatcgagcgtgtgctcaaggagaagtt

SEQ ID NO: 2190 - DNA, 724 bp, Zea mays
tcctttactccggcgacgacccagctgcgacgcgccccattgccggaccaggaggtatatatccgttcgcgcctccgctgcacagctcgccgccgcggacgtctcgacggcgcagcagcttgaacttggttggttcttttggcttccctttttcttctaatgccttttcttcacgtcggcgttggtcggcgaatttttcgtcgcagggttggaggcggcggcagtgggcttcgtcaccggtaagaggaaggccaccgaggtagcccaagcgtaggtactaattcccgttgttggtttaagtgtgtgcactgtatagtgtaaaactataaacatctcttccagctctgaattgctgaaattaacagtatgggcttcttctgaagcttgttaagtagccaactagtacaattttagccctgtgtttactgagctgctgcagagagtagatacagtataaactcgagtgggcacgtttcttcgataggtgatagctaattttgtgtgtgtttatggttaggttctggagaaatattgttcagaaaggggatacggtggtcgatgccacatgcggccatgcgggaatgacaatgacacgctcgctctgcttaagatggtggctgacaaaacaggccgtggatgtgtttatgggatggacattcaagaatctgcgatagagaatacttcctcttttctgaaaatggccgtggatgatgaacatcatgtg

SEQ ID NO: 2191 - DNA, 418 bp, Zea mays
tcgctttgattgtgagtgatgtttgtaacaccccaggtgttatcaccagtgatgcaccgaatatggacctcgacaaggaatgtctatacaaataatgacttctttatcccgtgcatctctgtccatatcagattattaaaaagatttcatgaaagtttggaattcactaatctcatatgatggcgagtttgagccgttcggattacgcgtgtaagtgaatatgaaaaatcggaaaacgactgattttctgtaaaattgggaccccgcccgttgtccgagaaaaaccatgcaccgattccttaatcgaattgttatctagtcgaatgtttggatggcggcaaaattcatatatgtttgactaaaccaaatgttgcttaaaatatcaaagtcgatgtcatttggttcggtctatttgttt

SEQ ID NO: 2192 - DNA, 136 bp, Zea mays
cattcttgcggagcctttgattgcagttttagacaagagctagccagatgttttctttgtagctactctctgaagggctaattagggttgacaaatttcgccgtactgtattagttttcctgtggtgtacagcaat

SEQ ID NO: 2193 - DNA, 253 bp, Zea mays
ggatcaatctaattattttagattttttctaaatttgcctttcaatggctgaaatcccattttgatgcaaatgaaaaagcgaacatcctgtagactgctgttgctgtgcatctcaactgttttggtcttccaatctttttggaagtattattatttttactttcacttactcttataattgcatcatgttacacgatgttgacgtcaatatggatatacacccaaacaatctaaattcaaggtcttgtcaaag

SEQ ID NO: 2194 - DNA, 500 bp, Zea mays
tgtgtcgatggaggttcagtctacgctgtgggtttgacgaatgtccgtcgaaatttgttgatcagtgaccattcaattttgcctaggccaatttttccttctaggttgcagtttcccatcccaggaaatgtggttgattctttaggcccgtttgctgcaggcgcagagcagagccccgccctcgatgcttatcatcctgcaccatcagcaaggctagttcgttcaactgtatcataatctgtcccctcctttgtatacttgtattccgcaactaagctagtaaatagatgttgctggaaatagaattcttctatctggttcaattggagttgaagttcgaactgaaacttgccatattcttgtgatccatcgacgtgcttattgggcacggtacggtacttcaatcaagctgtttttttaggaacttgaagtttattttttttgggaattgtacgtaccattatatggataacaggatcgctcttcagagagctcctgtc

SEQ ID NO: 2195 - DNA, 446 bp, Zea mays
agattaatctcaccaatgaaaggtacttgccctgactgattttgtctgtctgttattgcttaattttctatgatttttccctatcttgagcttatgttttgcgtttgcagaatatcttttttatgcctaagaagtgaagctacaacacgctagagctatcgtgctcgtggcaagacgaacccttcttctgtgatgatggaatccaacctgttccccacattctaaggcatccttacggagttatgttgctagatggctaatgcaacggtatgcatcttactttgcaacgagaggctcaccttgaggctatccaagttggaccagtgcgtgcaactgaagctcacagcggcgctcgctgacctcgactcgtcgaacaattggtgggcaagtcagttgccacacttgaggtcgacatcttccaagggttgctctatgtgttcaaggac

SEQ ID NO: 2196 - DNA, 446 bp, Zea mays
  misc_feature (36)..(36): n is a, c, g, or t
  misc_feature (42)..(42): n is a, c, g, or t
  misc_feature (50)..(52): n is a, c, g, or t
  misc_feature (54)..(54): n is a, c, g, or t
  misc_feature (60)..(61): n is a, c, g, or t
  misc_feature (78)..(79): n is a, c, g, or t
  misc_feature (101)..(101): n is a, c, g, or t
  misc_feature (103)..(103): n is a, c, g, or t
  misc_feature (160)..(160): n is a, c, g, or t
  misc_feature (168)..(169): n is a, c, g, or t
  misc_feature (191)..(191): n is a, c, g, or t
  misc_feature (209)..(209): n is a, c, g, or t
  misc_feature (215)..(215): n is a, c, g, or t
  misc_feature (217)..(217): n is a, c, g, or t
  misc_feature (238)..(238): n is a, c, g, or t
  misc_feature (244)..(244): n is a, c, g, or t
  misc_feature (282)..(282): n is a, c, g, or t
  misc_feature (288)..(288): n is a, c, g, or t
  misc_feature (292)..(293): n is a, c, g, or t
  misc_feature (302)..(302): n is a, c, g, or t
agattaatctcaccaatgaaaggtacttgccctgantgattntgtctgtnnntnattgcnnaattttctatgattttnncctatcttgagcttatgttttncntttgcagaatatcttttttatgcctaagaagtgaagctacaacacgctagagctatngtgctcgnngcaagacgaacccttcttctgngatgatggaatccaaccngttccncncattctaaggcatccttacgnagttangttgctagatggctaatgcaacggtatgcatcttactntgcaangagnngctcacctngaggctatccaagttggaccagtgcgtgcaactgaagctcacagcggcgctcgctgacctcgactcgtcgaacaattggtgggcaagtcagttgccacacttgaggtcgacatcttccaagggttgctctatgtgttcaaggac

SEQ ID NO: 2197 - DNA, 467 bp, Zea mays
caacaagataaaaatggaggcgcctcgccgtccctgctcctcgctggtacttctgctgcgtttcttggcgatcttggcagcggcggcgttcttcatcgttctcgccgtgcacgttgagcctgtgcaaggtactacgtactattactactatatatataccctccgtttccttcagttcacaagctgcatgctagaacgttcagctacacgttgagattaagcagctggctctgctgtgcgtgcatgcaggagggaggcagccgaacccaccgccatctccggaggcacatacgaccccgcaatcacattgctgcaaccgtaggtgaaacaaattaagagaggccgcgctagctatacgattgggatgtgcgtctcttatttggtgggagccagcagtgtccaatttaaaccttgtgatcttattagaccatcttaatttaaaagtttttttcttctaaagctcgctc

SEQ ID NO: 2198 - DNA, 416 bp, Zea mays
  misc_feature (195)..(206): n is a, c, g, or t
  misc_feature (214)..(220): n is a, c, g, or t
  misc_feature (246)..(249): n is a, c, g, or t
  misc_feature (255)..(256): n is a, c, g, or t
  misc_feature (262)..(267): n is a, c, g, or t
  misc_feature (272)..(276): n is a, c, g, or t
  misc_feature (284)..(288): n is a, c, g, or t
  misc_feature (302)..(313): n is a, c, g, or t
  misc_feature (324)..(343): n is a, c, g, or t
  misc_feature (346)..(350): n is a, c, g, or t
  misc_feature (352)..(368): n is a, c, g, or t
  misc_feature (375)..(380): n is a, c, g, or t
  misc_feature (386)..(397): n is a, c, g, or t
gatgggggtcggtggagacgatctgtcagtgcctctctgtattctttgctgcgccctgtactgtatgtgcgttgtacatgtacggtgtcctcttgctcggggtcaaatgtccccatggcaaatcttgccggttttgcacctgtgtgtgccacgtgcggggattctctatctgtaatcgtacttgatcatcatgcnnnnnnnnnnnntgcaggcnnnnnnnaacccaagaagtcaccgccaccgccnnnnaggccnnacttcnnnnnntattnnnnngaccaccnnnnntgccgcttgatctnnnnnnnnnnnngtttcaaggannnnnnnnnnnnnnnnnnnngcnnnnngnnnnnnnnnnnnnnnnnctcccannnnnnatatannnnnnnnnnnnatgttgatgcatatatata

SEQ ID NO: 2199 - DNA, 403 bp, Zea mays
cctacgacgagatcttcgatggagaacgcgggaataccacggtcccaccgaacgccttttgaactaacaaaccggacagaaaaaaaagcccatgcagtacgatgcttatgatcaagtctgctgtaaggagaaagaaacaagacgacgtcatgggaggactggaagcgcccaactttcacgcatgtgcaagtgcaacgaacacctcatgattcttgctagcggctctgctctatgattagatccagatgtttagtctgtgtgctgctgcttcgtgggtaggtagccactggtttggagccgaaggccacctcgacgcgtcactcgtgctcattagtcattagtgctcatgcttttgttagtgtgttcgtttgttttggaaagggtaaagaaaacgcaatgtttg

SEQ ID NO: 2200 - DNA, 307 bp, Zea mays
ccttgaccgcctcgctgccaacggccggcttgaccactgctcctcggcgtatggggacgcgcgaggggataccgtgtgcgccagcctccgcgcgctcggccttgattacctcaaggagacgtcgggggacgcgcaggcgctcagcccgagcgtcgagcgctgggcccggcatctggagtttgcggtgcaccacctccttgaagctgagagaaagctctgtgtcgcggtgtttgaacggcggcctgaggccgcgcccttgtgctttgctgagattgcagctcgtgctggcattcttgatttcctcgac

SEQ ID NO: 2201 - DNA, 307 bp, Zea mays
ctcggtctcgtctcaggagcctccctgccggaaactaaagaggatcggagtagtgtcacttacgagttagagacaccgcgcgtacgtacgtccccactccgctctccagaaactcccccgtcgtctagctaggcctaggcgcctagccacctcccaggaatggatcagcgcgtctcccaggaatcgtcgtcggatcgtcggcgcaagtgcaaatacgtcgctgcggcggtgccggagggcgtccacggagagtccacggacaacggcgggtacgacgatactgatgagaccgcgggtgtgctgacca

SEQ ID NO: 2202 - DNA, 382 bp, Zea mays
ggacaatgccaactcatttctagattggccaacaagactcaagattgcacaaggagcaggacggggcctttcttatatccacaacacctgcaaccctaacattgttcaccgtgacgtcaagtccagcaacatcttacttgatagagaattcaatgcttatgtcgctgattttggccttgcaagattgatccttccttacaacacacatgtcacgacagagctggtaggcactcttggttacattcctcccgagtatggacaagcctgggtggccaccctgagaggtgatatatatagttttggagtggtcttgcttgagctgctcacagggaagaggcctgtccaggttttgaccaagtcgaaagaacttgtccaatgggta

SEQ ID NO: 2203 - DNA, 450 bp, Zea mays
cagcacatgagaggctggcggcggctactgcaagagcagcagccgctagctgttgtggccgggcttggggcatggcgttgcatacataaccgtgtaccaccgaccgaccgcagccgatcgatccatcagatcttgtgcgcggcgacgtttgtcgtgcatgccatcgagttgcccagttcatttcatttcccgccaccggcatgcatgtcgccatgccagcgtaccgccggtacgtacctggaggcacgcggtaggcgcatactccagcaccacatggaagaaatatatggagtgcaaatgcaacctctcatgaatgcatggctcagagtcagagccatgtatgtggtcatggctgcactgcaggagtgatgcagccagcttttcttttccatggcacaaggatgacgatgagttggtgcaaatgcgcgcacacatacacatactcctgac

SEQ ID NO: 2204 - DNA, 1414 bp, Zea mays
  misc_feature (384)..(396): n is a, c, g, or t
  misc_feature (398)..(399): n is a, c, g, or t
  misc_feature (406)..(407): n is a, c, g, or t
  misc_feature (418)..(424): n is a, c, g, or t
  misc_feature (426)..(429): n is a, c, g, or t
  misc_feature (441)..(441): n is a, c, g, or t
  misc_feature (443)..(444): n is a, c, g, or t
  misc_feature (446)..(447): n is a, c, g, or t
  misc_feature (449)..(456): n is a, c, g, or t
  misc_feature (458)..(461): n is a, c, g, or t
  misc_feature (464)..(467): n is a, c, g, or t
  misc_feature (479)..(479): n is a, c, g, or t
  misc_feature (481)..(481): n is a, c, g, or t
  misc_feature (483)..(483): n is a, c, g, or t
  misc_feature (486)..(490): n is a, c, g, or t
  misc_feature (496)..(501): n is a, c, g, or t
  misc_feature (504)..(519): n is a, c, g, or t
  misc_feature (527)..(535): n is a, c, g, or t
  misc_feature (537)..(556): n is a, c, g, or t
  misc_feature (558)..(561): n is a, c, g, or t
  misc_feature (564)..(564): n is a, c, g, or t
  misc_feature (566)..(568): n is a, c, g, or t
  misc_feature (572)..(610): n is a, c, g, or t
  misc_feature (612)..(629): n is a, c, g, or t
  misc_feature (631)..(638): n is a, c, g, or t
  misc_feature (640)..(646): n is a, c, g, or t
  misc_feature (650)..(673): n is a, c, g, or t
  misc_feature (679)..(681): n is a, c, g, or t
  misc_feature (683)..(698): n is a, c, g, or t
  misc_feature (701)..(725): n is a, c, g, or t
  misc_feature (727)..(762): n is a, c, g, or t
  misc_feature (764)..(771): n is a, c, g, or t
  misc_feature (773)..(783): n is a, c, g, or t
  misc_feature (785)..(802): n is a, c, g, or t
  misc_feature (804)..(845): n is a, c, g, or t
  misc_feature (847)..(852): n is a, c, g, or t
  misc_feature (855)..(873): n is a, c, g, or t
  misc_feature (875)..(896): n is a, c, g, or t
  misc_feature (899)..(924): n is a, c, g, or t
  misc_feature (927)..(932): n is a, c, g, or t
  misc_feature (934)..(938): n is a, c, g, or t
  misc_feature (942)..(960): n is a, c, g, or t
  misc_feature (963)..(999): n is a, c, g, or t
  misc_feature (1003)..(1019): n is a, c, g, or t
  misc_feature (1021)..(1025): n is a, c, g, or t
  misc_feature (1027)..(1037): n is a, c, g, or t
  misc_feature (1039)..(1050): n is a, c, g, or t
  misc_feature (1054)..(1078): n is a, c, g, or t
  misc_feature (1082)..(1086): n is a, c, g, or t
  misc_feature (1089)..(1094): n is a, c, g, or t
  misc_feature (1096)..(1114): n is a, c, g, or t
  misc_feature (1116)..(1172): n is a, c, g, or t
  misc_feature (1174)..(1175): n is a, c, g, or t
  misc_feature (1178)..(1178): n is a, c, g, or t
  misc_feature (1181)..(1206): n is a, c, g, or t
  misc_feature (1209)..(1223): n is a, c, g, or t
  misc_feature (1225)..(1258): n is a, c, g, or t
  misc_feature (1260)..(1291): n is a, c, g, or t
  misc_feature (1293)..(1313): n is a, c, g, or t
  misc_feature (1315)..(1355): n is a, c, g, or t
  misc_feature (1358)..(1370): n is a, c, g, or t
  misc_feature (1372)..(1377): n is a, c, g, or t
  misc_feature (1379)..(1411): n is a, c, g, or t
ggatgtgacctcttgccacggcgtgtgatgtttgttgcaacgatgcactgcactggcactggcactgcagcgcaatggatgatggattcaagtcaggttcggcctggccgacctgtcgcctgctgccactgccatggcgtccgtccccaacccttgcgctccatacccataggcagggctcgggagatagcgggcacagtggtcctcctcgtccctggtccggtggtgaatctgtcgctcttgctctggggctctgcgccgctgccgcctgccgtgcccggaggaaggccctgcaacgtgcaccgcgggggcgctctagctgctgcggcctcaccgtctccggttcacaggcaggactccgtgacctccctgcataagactgannnnnnnnnnnnncnnattaatnnatttatctcgnnnnnnntnnnngggggggggganannanncnnnnnnnngnnnnttnnnngctgtattcagntntnttnnnnnactcannnnnnaannnnnnnnnnnnnnnnccggtttnnnnnnnnngnnnnnnnnnnnnnnnnnnnncnnnnttncnnntttnnnnnnnnnnnnnnnnnnnnnnnnnnnnnnnnnnnnnnncnnnnnnnnnnnnnnnnnntnnnnnnnncnnnnnnngctnnnnnnnnnnnnnnnnnnnnnnnnccccgnnngnnnnnnnnnnnnnnnnctnnnnnnnnnnnnnnnnnnnnnnnnnannnnnnnnnnnnnnnnnnnnnnnnnnnnnnnnnnnncnnnnnnnntnnnnnnnnnnnannnnnnnnnnnnnnnnnntnnnnnnnnnnnnnnnnnnnnnnnnnnnnnnnnnnnnnnnnnncnnnnnnaannnnnnnnnnnnnnnnnnntnnnnnnnnnnnnnnnnnnnnnnccnnnnnnnnnnnnnnnnnnnnnnnnnnccnnnnnnannnnncccnnnnnnnnnnnnnnnnnnnaannnnnnnnnnnnnnnnnnnnnnnnnnnnnnnnnnnnnatannnnnnnnnnnnnnnnntnnnnngnnnnnnnnnnntnnnnnnnnnnnntctnnnnnnnnnnnnnnnnnnnnnnnnntttnnnnnctnnnnnncnnnnnnnnnnnnnnnnnnncnnnnnnnnnnnnnnnnnnnnnnnnnnnnnnnnnnnnnnnnnnnnnnnnnnnnnnnnngnnccntgnnnnnnnnnnnnnnnnnnnnnnnnnntannnnnnnnnnnnnnncnnnnnnnnnnnnnnnnnnnnnnnnnnnnnnnnnncnnnnnnnnnnnnnnnnnnnnnnnnnnnnnnnnannnnnnnnnnnnnnnnnnnnncnnnnnnnnnnnnnnnnnnnnnnnnnnnnnnnnnnnnnnnnntcnnnnnnnnnnnnntnnnnnngnnnnnnnnnnnnnnnnnnnnnnnnnnnnnnnnnttt

SEQ ID NO: 2205 - DNA, 732 bp, Zea mays
cgtcgcgcttctattggctgttgccattctgtcctcactgtctccatgctacgaagccggcggctgtaggcgccttcgatctctacttctaagggcatgtacagtggtgtttaatgtgggggctcttaaggtgttttagggggttatttgcaaaaaaatcttagagccgtctctccgtgaagagacgcatctggctcgtaaaccaagtaacaacagacgtctcacttcccactgtacgaatttgtcgtctgttctatcgatctgatgctatacaaatacatttaattctgtatttattaatagactacgtttatagacactccattgtacaatagagtctcttagttgtctcctgtgcttggagaaccgtttttgtgtctctccactatacatgccctaattacttacgcaatactgtagttactatttcgttctaagagccggcgataattatctattaattaaccggccgatctcgtttggactgcgatgtgtgtgcaggcatcgggaaacccaagaagtcaccgccgccgccgagaaggccatacttctcgtcctattccgaggaccaccagaaggaccaccagaattgccgcttgatctgtagctccaagggtttcaaggacggtggctggtgtgacgaaagcgtcgagcacaaagtgtgctgctgctcccattagaaatataatagcgtatgttatgttgatgcatatatatatgcatcgtccatct

SEQ ID NO: 2206 - DNA, 430 bp, Zea mays
cgcgcgagcatccaagaactgtggctcctttccatggttcttctagcgtcgtcctctcttgtctgtgcaagcatggcggtagatggtaactttcttctgacgtgaatatatacatacatctagtgttcataattctaactgacagaagaagcgcgtgtaactcgattgaccatattgctagggcaaaccaaagaggacatcaacgcaacgaatgtgacgagcatgaacatgacgaggtcgtcgtcggcgagctacaacatgactggcggcggcggagaacttaacagaggtccgtgcgtcgtgagatctggattctactggtgccagaacattggctatccgaccatgtcggagtgcttgaagaactgcgaatcgtaaagcactggagtatagaaaaggaataaagtggtctctgctagcttaatttctc

SEQ ID NO: 2207 - DNA, 351 bp, Zea mays
cgcgctcggtcgcctgctcgagatcgtagaccgaggtgcgatggattagatctctgagattggaggtgcgtgggctgatggaaagctggggtggagccgttgctctgcgtggattttgttttctagctgctgccgggatcacagtgacgagatcctgccatttcatgtgcttattgtatcatgcctcgaatctttgcatatgtcaggcgcttatagcaactcattcttattttaatgtggttttccatattttgtttgtagttttccatcctttgttttggctaagtagtttaactatccaactagcggctaccatgacgagggcagctatacctgtgccaaatttcaagt

SEQ ID NO: 2208 - DNA, 313 bp, Zea mays
gagctctcgattgccgcagcttctggaaggccggcgcgtacgaagcccccactgctccgaccagggagttccaaggtccatcgcctcctcgaattccgccctcctcccgcgtcgccgctcgctgacggtgctgtattgtggccgcagatgtccttgagacgggagacttcgaccgcgcgcgcgtgcaccccaagttcctccacaccaacgccacctcccacaagtgggctttcggaggttcgtgatgccttcggatggttcaatcttattggtgttaccttattagggcaaccgttagggcaaagaagagaaa

SEQ ID NO: 2209 - DNA, 252 bp, Zea mays
tgatacaaatgcttcaatctgccttgaagccagcaaaatcctcctagtgattagggctgtggtagattgggctgatctgtctatcagttggccgctccctattttctttttggcagcttgttaagaggataagttttatttctggttgctgtcatggtctagtttttttctttgtctgtttttttgccttgtttgggcattgtatttggtccattttggacttttctttctcttaatacaatgatgcgcagc

SEQ ID NO: 2210 - DNA, 671 bp, Zea mays
ttcttcttgctatttcagaatggcgcagccggaaaagaggcaacttgatgtaaaaacacaagagttgatcccatatctcattctaaattgacctacttcctagttgatacacgatccatataaaatttctcgaatataagtcttattcttctagaagtagccaagtaagtaaaggtggtctactaatacaaatgccaaatattagccaagtaagtaaatgtggtctactgatacaaatgccaaatatttcaacctcagtcttatagaggcaaatgatttgattattttttttcatcaaaatgtcacaccaccaccatcatttctctgaatttggagtacacggacaaatatatatttactctgtttcctcttgcaccatgcaggcattccacccctcttttatctggagatgagaatgttggcagcatgtctaccaaggcgtaacggcaaatgttgcatacttgcatgaagggatcggattttctctcatcaagggaataaagattaaagaatgaatacttgctctccaaattgcaggccttcaattcggtcgtttaatttcaagccagctgaaatgttcattgttttcacacattcttatgttttcattggaatttcattcccacttgtcctgttcctagcttgaaatgtacatgtgaatacaaaaaaaa

SEQ ID NO: 2211 - DNA, 390 bp, Zea mays
cagcctacctcgctcagatccgcgccgccggaccgccagatctaacccatgaacgtctcgcctactcgcggccgcctccttccttcccaccaaaaccccgttaaaaaaaactctccctctggcgaccgaaaatcactcgccgctgtcgccgtcgccgcgcctcccggaccaagtacccgtcctgcctctgaaggcgttccccgaaaggggaacagagcgggggtaaatcccaggcaaccgccaagcgggaagcgccaggaggaggaggtaacgcggcggggtagtccggaagtggccggcggcggggaggaggggcggacggtggaggggcagcagccggaggagagggagctggaggagggacggggaaggggatggggcgagagagac

SEQ ID NO: 2212 - DNA, 318 bp, Zea mays
tctgtacagccaagacggcaacgacacgaaagcaagctcctgcaagcacgacgccctgtacacgctgtacaacctctcgagccaccaggccagcgtgccggcgcttctagccgcgggcatcgtggacgctctccactgcctcgtcacggagtctccagggtcggaggaggggcttgggtggacagagaaggctctggcggtgctcatcagcctcgcggccacccaagctggccggaaggagatcatgtccacccccggcttggtcagcacgctggcgatgctgctggacacgggcgagtcgacggagcaggagcaggc

SEQ ID NO: 2213 - DNA, 613 bp, Zea mays
atcctgaatgacacccaactatagggaggtgtttggtttgatgaatcactctatgtaaaatgaagtgatgcatcatgggtcttgggtccatttctcaaatttggtgggatgactccatttcacatattagtactaaacaactaactatgatgaatgaggtggtgatggattaagtcactccatttcacaaaccaaacaaaaaagtgaggagagagaagatgatagactacatcattcctcaaaccaaacactccatagttgttttcttccattctttttctttgaatggtgaatttgtgaaactgtaatgtgaaactgtaattaacataaattcataacctcctattgtcttccttttgaagaaaacgcctctgttatccattgatttttttttacatgtctttcatggccgctaaggaaatattttgtcagcattgtctttatatttagtttctgctgcaggtgttctcgggggagggagtattcctgctgcaggacgacagctggacggaattttggaatacaccggcagagtagctgaaataacggctaggaatttctgagaaatttcatgttagggaaccaacgatgctgtttaatagaattggctgta

SEQ ID NO: 2214 - DNA, 599 bp, Zea mays
ctccctctcctccctgcccaatttcaccatcttcagttgccactggggccggttccattatccaatcccctgtctccctcactgattccttggcatccatggctaacaaaggagatggtttccctgacttttttcttagtgtccttctgcctcgcctcggctaactgccaagccaatgatgtctctaacgatgtaccacttttttctcaatcttgtttcactggtaggtcatcggcagcagggaatagccaccaaaactttgatctcaactcctaggaagaaagctttcccttccttggttcatacactggattctttcaacaggattttggggtcgctgagcatggaatgcctacattgacccatataggctgatctcgtcccgacacttttaatcatcctcgttttggtgatggtagtgctcgagctctccatagcagttcacgttccagcaattgtcatggtagctcattacacattggagcctagtccagtaggcaaaccttgaggttgtgcttgcaaactggttccaagttccttctctagagatgggagtccgagggcgtgggcgatttaggccaatggaccatatctcagaa

SEQ ID NO: 2215 - DNA, 708 bp, Zea mays
cattgctcgcggtataacatcatttgtcttctttcctattttattgtcctttcccttttgtgctgcaagttttaaccttttccatggtacctgtcatgctagtcatctgggaaagcattgcggaaggataaaccttcacaagatgtagaagaaacctctgttaaagaatcaaaaccatcagctggtactttgacattttcctctcattttcaggcttttatttgtgatatgtggtagctccttgcgtggatagttgattactgcctcttttttttcttcctgttctgtacaatagcaattttgccagaatgttctgatgatcagtcttttggtagttgacttaattttattagaaatagtaataatgttagtttgctgaatattaccctcccatattgaactggaaaatggaagttttagtgtgaagtacatttttttcatgtttgacagtttgagacatttacaccctgtactcttccaggtgaagatgattcgtcaaaaatatgttataaatgcaaaaaggctggacatctttctcgcgattgcccagaaagcacatctgaggtggaccgaaatgatggcagtattagtagaagcagagacgatacgggtaccaatactgctcctgctggtggcaacagtcctatggacgaagacgatgttcaagaaattggtgatgaagagaaagaaaagttgattgacttggac

SEQ ID NO: 2216 - DNA, 419 bp, Zea mays
gagaggctcggctgccaggtgcttccagttccatcggccgcccgctgcctcagccttctactggggagcgccaccgccaccggcggcggcgatcagccgtcattccagtccccgtacttggtactgcaggcggtgcttgtagacctccacacacctgccgcagctatcgctgacgccgccactgcaatggatgatgggtttgaggttgccctcaggatccgggaggtcaccggcgacaggttcagctggctgctcatacttgtcgcgctgccactgccgccgagagcgagccgcatcgacgttcgcgacgtgtgcaagcggacgggagtgaatggcgtgatctacaaacccatcagtccatcacgctgccagcgctggcagctgagctttacagggttctccaaaacgacaactgaccg

SEQ ID NO: 2217 - DNA, 408 bp, Zea mays
gtcggcggtgccccttcctgatgccagaacgctcctctacgctggtaaccactggattggcaggacatcggacggccggctttgtttcttcgtgatcagggagcagcttactctcgccacctgggttctccaagcacctgggaagtgggtggagcagcaacccgtggacctgcgcacgctgatgcacccggcgtttatgggtgatctcgcccacatgaagctctcggcgaagatgtcggaccagctccgtggcttcaaacttgtgagcttcgcagcgttctgtgagggtacatgcacgctgttctttgtcatggcagattgggttgtgatgctcgaccctaggacgaggagactgctgaggctgtggcgcaacagtgatgagtcgcggccattgggtgatgtataccc

SEQ ID NO: 2218 - DNA, 556 bp, Zea mays
ggaagcagaagcaagagctcatggattatgtcactcaaccagcagtgacacatgtatgtatacgtgaacaatttattccctttacaacataatatttatgcatatactagtgtagtatagcttcttgtgtaataggccaaatttcatgtagatctgaataattttttatgattataagtttttttaacaaactggcatagttgtgtctaaagcctccctatcctacttcctatttcaaactcccacatacacaccttgctggaaacaatgttttgcactcccacatacatgccttgctgaagatggtctgatagagaaagggcgatttctttcgtgatattatctatacgtaatttgacctgctgtcttttctcttctcacagacgtcacgtgattcgccagcaactcattcacccgcaactcctgagagtaatccgtttggagccaagctctccaacaagtggcggtaacattttggtggcgtacgtccctattttgttagggcttattgcctgttctggcatcagcacgacgtaactagcttttgccacaagct

SEQ ID NO: 2219 - DNA, 345 bp, Zea mays
  misc_feature (11)..(14): n is a, c, g, or t
cgacaactaannnnaaacggagagagtatatagcagaaggtaaaaagtgcggagaaaaaaaactacaactaatggacaagagattatcttcctagttctacttctacacttcctactcctgacgagtcctaacagttgcctagctataagtgtaacctagctctctctccatggatccttggcaatggcagactccacgaagaaaaaagaaaagctggccgggcgccggagctcagtcgtgccagcagaggagcatgacgatgcaccgccggatgatgtacagcctggacctctgctctttcagggctctggccaccttccccttctgcttgctcgggctcatgg

SEQ ID NO: 2220 - DNA, 241 bp, Zea mays
tgcgtcgcacacagtttatggtacaagcagcatacttttttaaccagatcttcaagattggattgcgtgtatttgagatctagcatagattaataaaataaaactaataatcatgcaaaagaattgctatgcctatctccaggtttccctcctccatgtcgatgccttcattcaccagacccatgctgaacaacctgcaaagggcaacagccagccacgccatcagaaccaagggaaagga

SEQ ID NO: 2221 - DNA, 1083 bp, Zea mays
ggtgtccagagccatgggaggcatcaagtctgctgaggaggtgcgctgccactatgaagatcttgactatgacgtcaagatgattgaatcaggccacgtgccgtaccccaagtacaagacacatggattctggacctgaggtaatgtctctgacacttcgaaagcaaactggaaacaaataacataagagctgcgttctgtattgataagatttttgttaactagtacatgctagttggtgatagtaacaggaagcaggcctcgagcaaagcataattcagtcaccataccatatttttatgagtagttcaacatgcatggctatgtcattgacggctcaagtattcagtattcacacactcgagcatctgattattttatgttctttagctgttccatgcataagtgatctcatcaacaatgtataggccaacctgcagagtgcagacatcctttcctttcgtactcagaaaaagaatctgggtctaattacttggtgtttgtccactaattatgtgggctccaattctagtactacgacaaaaatctcctactcccaatagaaaagtttggaccttacagtctattccctcgtgcatccagcttgcatccgacatgcagttctcatattacaccaaaagacaacttatgccaaaagggcatctccatggccttttttagcagtgtgagtaggcaagctttgggtagttctttgcttcctttattttcctttccttttattttattttcaagtaggtgatttctggtaagcagggcttactacagctgtagaagcagctgcaaccgtatccgtataaacagatatcacatatggtacaaaacagaattaatgtttacaattccgagaaacttatggtgtgcagattaacttttgctttcaggttgaaatgttggagggctcaaggaggcagaaaacaaagctctatgaatctaagatggacctaggttctagaaggaagcaaagaaatccagccatggttggaaaataaaatgatgaaacagtgtgcatatgtatagtataggttatgagcaagtttatgtttacctgtggttgtaggatct

SEQ ID NO: 2222 - DNA, 490 bp, Zea mays
tcttttttttctgtccggccatggatttcctcggcaccattcctttgattcgagtgggggggttcggcctcaagccagcatgagtcagtgacctccctgctcggccatggctgcgccatgagcatctagtgcccctccccctcgacctccctgcttggcaagtgtctagccgacgcccaactcggcctcgtcgtcggccttgcccagcagcgacagtccgccccggcactcaccagtgccaagatccactgcgccctctccttccttgaagccgtggtgcttggtggcctcgccttggcgctcgacacccccaatggctgagcagacccctcgctccctcaggtcagcgccctccctgactcttctccatggtgtgctcagctctcccatccgtggacagtaccaccccctccctccacttcggttgaagcataaacaactcccctgctcctcctcgccggtacgccattaagcctgcagcagcagcctc

SEQ ID NO: 2223 - DNA, 589 bp, Zea mays
cgctgcaacggtcgcctagtaagacaggtttgtcggcagttcgctccgcctgagcttacaatttgcccatttggggaaagtggcaactggtgtctaatctaaaccttttgcgtttaacagtacaaggagtcagatctgtacaggcaactatcatacttttgttatgtacttgatgcaacccggtgtcttgaaaaggttacgcatcaatctgaccatgtacttttttaccttttcttataatccaacttatgtcatagctgacagttaactgcttttgtatgtagctggaccagaaggcaaggctccccttcgagagagagtttgtagcagtaggccaaacaattaaattggcactgctagagatccagaaaatccgagacagatgtgcatttggatgggttcagctaaaggaccttgccgtatcaatatgatgtttttcttgtgtgaaagggctcaattagataagtttgaattaaccgtgcaagaaattcatctctctgtaggttattctagatctcgttggtaaaaggaacaggacacggcaaacggtgtatcgaaacaccagccgtctttggtatttccctgcgtg

SEQ ID NO: 2224 - DNA, 401 bp, Zea mays
gacgcgcgcacgtcgccagcgggcttgtgcgccgccacctgtggtgctaagctgtcacggcatatgacagcgacaacggggcaagcaagtggcggagatccacctttcgcgcaaccgtaaccgcccctccccgacacctacgacgttgccaaggaggccgtgcacgcccacgacggcgccgtgacccaactccgtgggggcctcgacagacccaattcccctgagctcagcggccgacgccaagctccacaccaactgcagctgcacagcggccgacgccaactgcagctgcacagacgtcgtcacgccgctgccgcgaatccagaaccaccgccacgccacggccttgacggccacagccaccccgagctccttccccacagtgagcccacacaccaaga

SEQ ID NO: 2225 - DNA, 398 bp, Zea mays
agcgcaccgtccctgcaaagcggtgagcgcccctgaaccggctaactgcccctgaaccgagcatgtgtttccatgctgtcagctgcgaggagtagtaatcgaccaagggtagtccacgaatagttgcatcgagaataaacattagtctcttgattgatgttaccacgacacgaatcataggagaataaacattagtcttcgctcagctgactcactatacgattgcagactgactgattggccaatcaatcagagcaatcggttctggccggcatggcctgcaggcttggcggaagcgctagctagccttctctggttcgagttggcttatgcgagagcggacaaccgtagagagcggacaacgggagtggtctgaatatttttgtttggtcacaaga

SEQ ID NO: 2226 - DNA, 497 bp, Zea mays
tgtgcttgctttacccattcggtggtgaggcgttggtggcgcccgcggccgcggccacgctcgatagggcgtcggccggtgacgagctcgacgaggaggacgccgaaggagtagacgtcgctgcggtcggtgagctggcttgtgcgcaggtactcagggtccacgtatccggccgttccctttactagcgttgacacgtgggtcgcttcagggttttcgggggctaggcgcgcgaagccaaaatcggcaacctttgctcgcaggtgctctgttaggagaatgttggacgacttaatgtctcggtggatgattggatgatctgcttcccatcgtaggaaaatatttgtcagacataaggatgctgaaggtttggtatccgcagtagatgtcaatacatagacatgttggtggctgtcatacaaaattctgatcatggaactgagatggtgattttcatgatggttgtctcatctagggaactgatactgaaatgtacc

SEQ ID NO: 2227 - DNA, 303 bp, Zea mays
cctcaacatcggatttcagaacctgcaacaagacattgacgccatgatgagatcttctcaaggacaaacggctcagtttatccttacaaaaaataaagtgtttgtaaaacagagaaattgcttcatttcttggtgaactttcatccagaaaattattgatgtggctaggttgctggtagaataaacaaaatacctcatgcctcagtttcatcttggcatgagctgtcgatagacgaattatggtttccagtgtccttgctgtaattggaagtgtacctccaccggactgtaaaatacgcaggt

SEQ ID NO: 2228 - DNA, 424 bp, Zea mays
  misc_feature (415)..(419): n is a, c, g, or t
tgtctgtgaggaaagtgatgcttttgtggctaacaacattgggaacatggccaaaattctggctgggcaaaggtaatgcatcttttgtaactgttcttatgcttaactgctgttaacttgttaactcaaccccccctctcctgatcatctatctctgcaggagatattttggacacaagagaacaatccggccaaatgctaaacagctctatcccttattcatgaagaggggaaatatgtcatgggatgcatttgcctcacaggtgcgaacaatccagaaaggatatatgggagagcccatggaaatcacaccaggaagaggcgaatttcatgcaaaccctgccgcctgtatatgtgaaaagaccagcagaaactcagcaatagtcaagtccatttctggaaataacctggaacnnnnnactga

SEQ ID NO: 2229 - DNA, 208 bp, Zea mays
gggtgcccctttactgggcttgcccctgaatgtgatgttgcaaatttcagatgcataagtcagaaactgttgtccttgtgcgaacttttctgtataaattgaatttaccgctctcagttagcatgcacattcaaatccactgttccttttcaaccacatagtgaaccaaaacactctcatcactgagcgatatatgattctatccata

SEQ ID NO: 2230 - DNA, 463 bp, Zea mays
tggccatcgatccccgagacaccgacactgtagcgtcgacagtcgccacgctcccacgggtctgccacccagccatgagcgacgtcgcgttcttcttcaggtcggccttggtccagatcgacgccggggtcaccaccgtgctgttgagcacgtcgacgaggatggtgttgtaccacactgccgcgcgctggctggtgttgttggcggcgagggtgaaggtgagattcgcacctccattgcccaccaacaggtggctcctaggattggttacggagaagaaaatgcgtgcagggctcagcaggacggagaagacggtgacgacgaccgccacggcgaggatcgccatcagagctgccaggatgtagtgtttgagattcagggccttcaggccagtccgcggcggagccatgcgtatatgggtgtggcagcagcagcagctctagccagagcgtatggtggttca

SEQ ID NO: 2231 - DNA, 355 bp, Zea mays
tcctcctccgatatctcgtctcccatcctacggcggagccctcggggacaaccacgagtgcctaagatcccgtcctctgcgttgaccatcgagggatcgccatggcgttgagggcgtcccccgtgtcgcatcgcatggcgccgaccgccgagggccgaggcagcgccactgccgctgttcgcgcggaggaggatggcccgtggggtgtaagtggccatggcgtccaccaccatcaacaggtgagcacagtggatccctcgcctctcgctgtcttcctgacctacagttcgaggcaagtcgcggcgccgtcgaccccttcgcgggtgccagagttacttggacttggattatgcct

SEQ ID NO: 2232 - DNA, 500 bp, Zea mays
  misc_feature (492)..(495): n is a, c, g, or t
agatagagagagctcagagaggcaaataagagcgcgcgcgagagagagctgcggattaattatcaaaacccggccgcttccatggagagagttgcatcaagctgctgcgtcagcctcctagcacaaaggtcagttgccacaccatgaagcttcaatttaatttaatttaatttgtttgtttgtttcctacacacatgatgctccctgcagcaggagggcctacactatggccgcggccatggctaagaagggagccgccgcacggagggtcgacgagaagaaggcggcggccgcgctgaccaagcgcgtgatgggcaagaaggaagtgaacacggctgccgctgcggcagctgaggagaaggcgtgggtgccggaccctgtcaccggctactatcgcccagcaggtagcgccaaggaggttgacgcggcggagctacgcgccaagctgctgacggaggctgcggccaactgattaatcaagcagtcactttnnnnaccta

SEQ ID NO: 2233 - DNA, 443 bp, Zea mays
cacttggtgggtgcgttggcttaccatctccccaagtgggagagtggacgtcataatttgtggtagagggggtacgcgttcgcgcggcccctgccaattctaagtaattttgaagttttttcttgatctagatcagggtttctgatccataaattcgaaactttggtacaaatttcatgtaattctgaaatttttttttacatatctgggttcctgatctatgaagtctggctgccttcgcctgctcggcccctgccagtaggggccaattcgtgtaataatgaagttgctgtggagtttgtttgtttcttgggctagatctgggttcttatccatgtagtctaaactttgtttcataagctgtcacgctgcagtctggtccacgtcacaagaagcgagagcaacatagaccgtcgagggaaactattggtgcaccgtaattc

SEQ ID NO: 2234 - DNA, 402 bp, Zea mays
tttttggtcttttctgtttttctggctatttgtttggttttctgatggatcgattgctctccgatgatgattaaaaattactttcgttcttctgaagttcgcaatgtggaagaacaatttggagacctgaactgaggggagtttttctcggtctattcctggttttcttgtatattttattttttctttcttgctggtttatccggatgaatcagcgctcttcggaaatccctgtgaagacctgtgatgttaaagtagtggcctgatttacatctttgatgagcagtattattatcacgcagagggatctgagtctgatttattcttcttcagtttatttttaatttttatttcctctgttattttttttcttttttgtgccatcacccgatgaatgtacat

SEQ ID NO: 2235 - DNA, 378 bp, Zea mays
aggagaacgtggatgaaggtgcacgagatgcgtctgagatcttccggtacatagaccatgtccgaacatatcctaccataatgtttggaggaattgagggctctcaagtctgcactgtggcctttcagcgggtgtgactgaaagctgaggcacgcatagttcttggcctaacgtgtcacgttgggtccagaagaaatggataaaaaaattttgtgcttcgcctgtgggactgttcctaccgtattaaggaacagtccaaactgtgtcttcttctgttgttagcgtattaaggaacagtccaaactgtgtcttctgttgttagctcatctatccaggatggtcgtgtaattttagatggaccagactatgagacgaatc

SEQ ID NO: 2236 - DNA, 766 bp, Zea mays
  misc_feature (708)..(709): n is a, c, g, or t
  misc_feature (728)..(728): n is a, c, g, or t
  misc_feature (741)..(743): n is a, c, g, or t
  misc_feature (753)..(753): n is a, c, g, or t
  misc_feature (758)..(760): n is a, c, g, or t
catgtaacctgtgcggtaagatttgcaacatcgtttcccaattttgcctggtctgtaaccctagcttcactgtctcctgtccgtggctccatggatgcggcggctgagctttgtgcgtgtgctctgaagtgctccgctgccgttgatgcagctcctgacaccgtaagtgcttcgtttacggcggcggttgtagctgatgacttctgtgccacatattctcgaggtgacgaagttgtttctccatatgatgttcttcaaactgctgttgcgacggaggaaaagctaatggtaagtttggttggagagtcaaatagaacagagtgactctattccagtatttgagaatgaagtcgttctatttcacgtttggcaaaaagaacagagttgttccattttttgtttggttgaagagtaaaaaatagagcggagctgttccattctttgtttgattcgagagccatatgggtgtagaggggaggagaggaatgagagcgctcacgttcaggagagcgctcgcatccgatcgtttttatggagcgggagcgttacaactatttacagtaaatttccatatggagattcaggagtcgctccactcttattttgttggaaaccaaacatctagaaaatttaaatggagtcattctattctccccgctcctcaaccaaacgcaccctaagtgtgcattcaatcacgcttgtgccgcnngtcgtgtgtggtgaggagncgttggcatcccnnnagtaaggttngcatnnngctact

SEQ ID NO: 2237 - DNA, 230 bp, Zea mays
cgtctctcccttccccgtcccccatcagcgtctagcagcccagccgacgaccgaaggcactttcccactcttgcgtcttgcctcgcgcgcctcatcggctccttttaatcactcttaggttcatgtaacagttaattagctctaggtaaccgtcagccgttcactagctacgtactactactacttctgcaagtacaaccccctcgttcccatgttaaccctccttgcct

SEQ ID NO: 2238 - DNA, 359 bp, Zea mays
  misc_feature (300)..(301): n is a, c, g, or t
  misc_feature (325)..(330): n is a, c, g, or t
  misc_feature (338)..(338): n is a, c, g, or t
tcccttttgctccttcggaatcagaacctgatcccggggtcacaccaggctggcggcactgcgagcctgctcgattcgattagggtgggttactggtgagggcgtgaggcagtggcaacctggtcctggatggcatggccgaccggcgtggtgggcgactcggtgtccaggatccccggcgagctctggctgtggctggacgtggagcctgctggtgctggctgctgtggctggacgtggagccctggctgctggctgcctggctgtggcagtgcggctggacgtggagctggatccagnnatacgacgcctaggcttattccgnnnnnnactttgcnaccctcctcaagcgacaccaa

SEQ ID NO: 2239 - DNA, 336 bp, Zea mays
ctgtagaagatggtggagcgggagtgccagaaggagctccacagcgtggttgacgacctggaggaagctggccgataagaggtaatgttctggtgctctgcgtagcagtgctagaagttttcttgtgatcgtccatttgcaatcaaacaaaggtcgtgaggatgcaaggccttgaataacatcactagcaccaggttccctagacattcaaagagatggtggcttgataacagtgacaggtatttgtgaagggtcgtggaatggaaatggatcatgaaaaaataaaatgtgtatgcctctcaaagcaatgttgtatcatggatcacctgtcatact

SEQ ID NO: 2240 - DNA, 389 bp, Zea mays
attcatgcacacataataagtggtaatcaatgaatttgatatattctttattgcggcaaattaaaattatatatacatgtataatattgattctaacaatattgttggtaatttgaatgatctttattaggggaaactgaagaggttagcatcacagggagcccgacagtgatggtcatgatgggggcaaaccgaaagataattgaagataataaaaatttattgtgctatctaagggctctagagtactgctgtgcgaggaccagacaatgctacgatgacataaagaagtgcttggagcattgccgtggttgaaaggtgtaataaaggatatgctttctttggatcttagttggtgatcagaaaaatgttctaccaattcatgcatg

SEQ ID NO: 2241 - DNA, 475 bp, Zea mays
cagtcgtcctcctagcctgctggacgctagttctctaccaaccagtgcttggccgtttaccgtgtaacaatgatcagaagagagagatcctgcgcgagtgtgatccactgaactcaacacctgactatactccatcccggcacggtgcgtgctgcgtggcggtgagaaaggtgccaggaaccaacatgctttgcattgcctccatactctcacttgctgacaaggccaaatacagtgtaaggaagattctaggatttagagatgcatgcgccccttcacatccacaccatcaggtagttaatactcgttctatcacttgacagtccttagactacagtggagtgtccttgtaataagctaacaagtattaatcttgttatgtgaggcaggtcatggcctaaaagagcgtagctgccagcctgccatcgcttatggaatcatcgtccaaacatgatgttgaaatgagatgtatctc

SEQ ID NO: 2242 - DNA, 387 bp, Zea mays
tgagacgtcactagcagcaagcacgccaccgcgccgagagagacggccgggccgtgaccgggctggactgtccactggttttcaatttcatgcgcatgcagcgacacctcccgcccactcgccctcgcccagtgcgctgcagcagccgaattcctgtggaaaacctcgcccgcttcaggtagcggccgtccaagatggagacggtgacctcctcccgtcggcgcggtacagccagggtcaggtaccttgcaggacgcttcgtttgtgcgtggttattatccgttcacgccccctcaacttggagcgtgcgccgccggtcaccgcagtttcctcctgcgcatattctggcactagctgtatttgactctgggtctgggatgtatatat

SEQ ID NO: 2243 - DNA, 777 bp, Zea mays
atacagcagcatgtactagctagtacaggtaccgtagccctcatgcatgctcttctctctatgcatggctatatatgtgcagcctgcgtgatcatcgactgcggcctgggcgagtgcaggaagggccagggcttcagctacacctgtgagtgccagccgggatacgtcaacttcctcgaccaaacctacctcccctgcgtcaagaactgtatgtggccgatacatctgctcgccatttgagctatactactttttaatttgccacgccgcgtacgtcgtgtatattcctaaaccttgattaataataataataaaaatactgctctcaggttccttcggctcggactgctcgaagcaggggatcgccccgccgccggcgccgccgccttccacagcgtctccacccgcacacggtaatcacacgattcgtcgtcggccccaatgcaaacggcaatttttcatttcgtcgcgcaccagctcgtaatcctaacacacacagttttcacgagttctgtgtgccattcatcgtcattaatttaccagttaccacatatatacacacatgacgacccaacacaaagtttcttaataattggatttacgtacgtactgatcaattgatcatctgtactgcgtgtgtgtgtgcaggttctgtttcgtcgtggcgcctactgcagctgctgctcccgcacgccatcctcctcctcctcctcctctaggtcgtgtagctacatacaacgacgcgcgagggcggccgatcgagcgcactgtacatgt

SEQ ID NO: 2244 - DNA, 397 bp, Zea mays
aaggtggcgacgccgcaggtggccgtcctcctgctgctcctcatcgtcgttgcgcgtacgtcgccatcactatagctacaccactaacatatatgtacacacgcacacatcatcatgaatacaataatatgcgtacgtactatatgtgtgcatgcatgcagaggaggcggcgccgttggcggaggcgcgcgtgtgccggcgccggagcgcgggcttcaagggggtctgcatgtccgaccacaactgcgcgcaggtgtgcttgcaggagggctacggcggcggcaactgcgacggcatcatgcgccagtgcaagtgcatcagggagtgctagctagctagcagctataccggcctttaattaaattaataaggatcgacgtcgcggccggtcgctaaa

SEQ ID NO: 2245 - DNA, 395 bp, Zea mays
ctctcttcgttcccgtcgtagcgtccctcttccacctcttctctccccgcttccttgtcaaaatcgattcatcacccattgctttcgtccttactgcagtgtccatttttggttgtttggtgaaatttgtcgctatcttcgtcgcctctagttcgtcgtccatttcttaaagttcaaataggcctgctttgtccccttttttctcccgtcccgaggtacgcgattgcagcaaatccggcttcctccgcttcagatctccttcaatcgtcgtcttccacttcgcgtttccctctccgtactcatatggctttgtctgcatgaatgctttactggtcgcgaagccctttgttttctctagtttgcagttcgcatagctgcctccttgggatctaagg

SEQ ID NO: 2246 - DNA, 424 bp, Zea mays
  misc_feature (343)..(346): n is a, c, g, or t
  misc_feature (354)..(363): n is a, c, g, or t
  misc_feature (374)..(380): n is a, c, g, or t
  misc_feature (384)..(398): n is a, c, g, or t
tagcactgacacaacaggacctgcaggggaagcgggtgagtggcagcggctgcacgaggtgccggtccggcacctccaccggtacaagaccatcgcgcacgtcggcggcgtgaggagcccgttgtcggacccggactacagcgacacggacgacaccgagccgctgtcgttgcagactaggcacctgataccgccggcgaagcagcggagcctcgacaccgagcgcgcggaggtgcgcgtgaacgtcgtagagacagcggcggcgccaagcgacgtcctccaagacagcttctcgttcccaaggctgcttcctcctcgccatgtgccggacaagtaaagtggnnnncagtctannnnnnnnnnattgattttannnnnnngttnnnnnnnnnnnnnnngaaaaaaatagatgaaacattttttt

SEQ ID NO: 2247 - DNA, 482 bp, Zea mays
ccggtaccaactctaaaaggtattaaattctttgtgcgtatatatggtttgctttagtccttattacttgtaattttgaaatgatacatgatttgttttaattctattttattatttaacttctacctgacaataaatctatattctttagttctacaatgagtatgtcattacgagatcatattagaaagaggagggaagaagaagatgatgacatgatgttgtttattttccctgccttatatctgatgggttcaactagaagtgggggacaaaagaagaaacgccatacatcagatgagacaactccgtatgtgtattgtcaagtattgggaagacaactccgtaggtgtgaccattgttattactgtatttgcttatgtagctgattacttatatatctgtttcttggcgagtatgcgtgaacaattgcaagtctttttgttattactgtatgtattaaattgatttgaacagattga

SEQ ID NO: 2248 - DNA, 396 bp, Zea mays
tgctctgggcgtcccgcgccgccgcctacctcaggatctccaccttccccagggccttctccaccggtacgcccgccaccccccatcctctgtctccggcgccctggttcctcggatcacggctcctcgcggttggtacggcgccaccttgtgtcgtttcgcgcgcgtataaatcccgactcgcggttggtactgttcctgatttgggccgtggctctgcgctccatcagacggcgcatacgttcagggatggggggtttacaacggggtttagccgccgccgctccttattaacagcgtgtgtgtgaaagagaagaaaaaaaaatcttgtatttacagtgctaatgtgtttggaagatcgatttccccagatttatttgtgttagattagatgtg

SEQ ID NO: 2249 - DNA, 614 bp, Zea mays
acactcccatgtccagaccatgcatgccacctgggcccagccccagctctctgcttctctcacgtaggtgcagcaccgctgcatctctctccctcacgctgctctcacttgagtgccggcagcctgccctctgcggatctgtggctctgctccttccctctctcttgctgctccctcagatggatctctgttgtgttcccctcctggatcagccgccaccgctgcagatgatccaggcggtgctgcgcgctgtccccccacacatggtttggtggggatgagaggggaggtggctcaattgtcttcctggttggttccataccgttttcctctgtttcaactccgatctttttagatctctcactacttttggctaggtgacgggacaccttactccatgtgagtgcctcatcacataggcgtctgatgcctttgaaacactgagctgctgtacttgaacactaacagggtatcctacctacccttaggagtgtttgtttgggattataatctgcccagattatataatccaacaacttttgaactaagggtctgttgtttgtcttctagattatataagttggattatagtggaaggataagatggtaaaata

SEQ ID NO: 2250 - DNA, 302 bp, Zea mays
tgcatgctactcctttttctttgcatgcgtgctgcatgctacttttctctatctttttttttaatttctctcacgccgctgttttactctccctctatgtttctgttttggccggcgacgttttttttaatagcaacacaagaaaactaagacagcagagcagaccgctggaaaaaaaggtcggtctcttgaccgtcttctacatttgaactcggatctgattattcgagcttttctgtgatgttattttagtcctgaggccctatggatgcgtctatagtgctctgcgcacttgatccgat

SEQ ID NO: 2251 - DNA, 302 bp, Zea mays
  misc_feature (120)..(128): n is a, c, g, or t
  misc_feature (144)..(144): n is a, c, g, or t
  misc_feature (179)..(179): n is a, c, g, or t
tgcatgctactcctttttctttgcatgcgtgctgcatgctacttttctctatctttttttttaatttctctcacgccgctgttttactctccctctatgtttctgttttggccggcgacnnnnnnnnnaatagcaacacaaganaactaagacagcagagcagaccgctggaaaaaaangtcggtctcttgaccgtcttctacatttgaactcggatctgattattcgagcttttctgtgatgttattttagtcctgaggccctatggatgcgtctatagtgctctgcgcacttgatccgat

SEQ ID NO: 2252 - DNA, 609 bp, Zea mays
  misc_feature (235)..(238): n is a, c, g, or t
gtgtacaacttacatgaaatgtttagtaacaatttgtgggaaatctagcaaactgatgctacaacaacctcagcaaacaattagtaaacaaagacgagtgtcatttctcttccatcaatgccaaacaggacttactggatatgcatccttatcatgcatgttcaggatagatctgttgttggactcacagtgtttcttcagttcatctccacaattccatcgtcgttacgcaacnnnnacacatgcaattgccaaaactcatttggtcaattgtttgttctaactgtttgagtaacgatggaattgtggagatgaactgaagaaacactgtgagtccaacaacagatctatcctgaacatgcatgataaggatgcatatccagtaagtcctgtttggcattgatggaagagaaatgacactcgtctttgtttactaattgtttgctgaggttgttgtagcatcagtttgctagatttcccacaaattgttactaaacatttcatgtaagttgtacacaccatgacttaattctctgtctgtttttgccaaaaccagttgtaatattagtggtctcaccggtcatccaagcagcaaattacattaaatgt

SEQ ID NO: 2253 - DNA, 415 bp, Zea mays
tagctcaacgtcgtggctgcagcctgacaattgcggaggttctggagcgaaagccaggattaaccatctgctgcaacgcctgcgacatgggctgcaggaacaagtgccatccagacattcgttttcttcagtagatgtgctgcaaaggctgcaacatgggctgcaggaaccagtgtcatccagagtccagacatttgtttccttaagtagatatgcaggattaagggtctgtttgtttcagtttatagatttatatgagattaaaggatctggattatataatctagattagattatttgggtgtagctgtttggcaacctagtttattgaaaaattcaattattgattttagtcatatgttgcgtggtgggagcaagaaaaaaatagatgaaacatttttttaggtaaggagtg

SEQ ID NO: 2254 - DNA, 451 bp, Zea mays
cgtgctgcatgaaggtggtgttgtcgcaaaggcgctgtcaaggaacgcggaggcctgggacagggcggcggtcatggctcattgcaggcgcgtcgcgggatacgtgcataaggtgatcgtggaaatgtctaaaggggaaggagttgttttgctaaacagagtttgtaaaaaaaaggtgtagcaagtcctataaagaagttacttccgtagaggagccggagatggagcctttttatgaggagctggagctctgcgaaatagacccttagtttaggacactgagtccttgttcgtttgtatcagattggagggtcgaaactatttctagccggattgtttctctaatttatataaactttgattagctggaacgattttaggtgtaatctgatgtaaacgaacaaggtctaagacaaatcagtgttggagatgcttatagcaagctacatgg

SEQ ID NO: 2255 - DNA, 567 bp, Zea mays
cctttgctccttgtgtcattccgtaagtgtatacaaattgttttgtactccatccgttcttttttatttgttagtgtagttcaaaaataaactagcgagccataaatatttgagactagaggtaggtaggcagtacaagtttgcaacagaagttagatttatatgagacaagctagtaaacttgtagcaagtgttacttcaatggagtatcgacgaatatatatacgtctatatgtactagcgattgcgattgctattgctatcagtacgatgatttgtttctgtggttccaggaatggatgcgactgcaaagctttgcagtacgacaatggagagactcatttgcggcggagcaagtcgaggcgacgtgaacagggcatgcgatgaaacgtgcagatccaagggctacacgggtggcggcttttgcaacatgaaaatacaacgctgtgtttgtcgcaagccgtgtgtccaggaggagcaaacagaggcgcgcgccagagacgaagcagccgacgctggagatatgatgagccagacgatggcagattgagtgatgcgcatgacaga

SEQ ID NO: 2256 - DNA, 270 bp, Zea mays
gtttgcacacaagacactgcggattccactcccagggaggcaccctccgtcgtcttaccagcagaatggttcatatgagagtgacgacaggtagctagactgaaattgtactgtacatcagcatgatgctacataaccatgctaccagtgtgtctcatgttgtgtgtttctgatcaagcattttttttgtgtgaagtgataaccactagttatttaagagtcaatagaaagttcaatcaggatatgcatgtcaaggtcaaggtcaggcta

SEQ ID NO: 2257 - DNA, 364 bp, Zea mays
ttcatcttcctccccaccctccttccctggtgcaggcgcagggagcagttccctggccgagctccattccagcagggacgcccaggtcccgacggcctctgcggcgagctccttcctccaagctggacgccaggcgagctccccttccggtcgccgctcctccctgcgaacctccccaacagggagcctttccccctgcgcgcaggatctcccaggcccgatctcggcgtgctccatgtccatggcgctgcagcagcttgggtttcacacgtggacgcccctctgcagctcgcccctctctgtccatggccgaaatcccctgtagaagctccccacggcgcccagaaattccgacagcaacata

SEQ ID NO: 2258 - DNA, 262 bp, Zea mays
aatattcttcatcagcatttttgtgcaaacatggaacaccggttgggtgcttgacatccttaacgcgctttctggtgcaacagctactccctaggaacttaagagcttgatcagcgggaacggcaggtccctaggccacattttttttggatgacgcaagggaagtagcttgaccgatgcgcacaccgtgtttttcctagcaggcttgtactttggggctatttatctgtgcccggacagggatgatgcttccattatacag

SEQ ID NO: 2259 - DNA, 331 bp, Zea mays
ctgctgcccttctccctggccggcgccctctcccatggccgccccctccctcagcttcgtcttcagccgccgccgaaccagggtgagctccccatgctcgctgccactcccatcccctccccctctctgctgatggtcgcacgccctagcatccgctcgcccctgcgcgcactcctcccccatggcgagctcgccctcaactccctaccatggtgctcgcccaggctcgccggcgtccatggccacagttccctagacgctgccagctctggctcgccggtctccaggctcgtcggagatggagtattacctccaagacctacaacctagt

SEQ ID NO: 2260 - DNA, 491 bp, Zea mays
gcgtcaatgcgaaaagtgcattggagttggtcgtaaattccctacgacacaactatgttgcaatgctataaaaagagctgatatggcttgcgtttgtcgtagcataacactagaagagcagctcacaataagcgtcatgaaggttgtggatgttgcaaaggaatgtggcaacccggtgccacctgggaataaatgtggaagtgagtacctaacactaatcttttgtttatttaaattactctactattatgttgtttacatcaaataagtattcaaaagcaagaaaccaagacaaactatattttgagcatatgtaacttggacaaactatataatttgatgaacttgtttatcagcttggactgttccaccacaactgctgggatgggtgcatccgtaagggttcaacaaagcgagcaacaaagggcgcatggataggagttcaacaatgaaagcaatcataggaaaatcttgagataaatgaatgaatg

SEQ ID NO: 2261 - DNA, 419 bp, Zea mays
gggcgacaggccgacagttctttgctcacgttggtggacgacgcggggctctgctctgttccgcggcgttcttcgcgcacatattcccctgaggagttggccttgggccttggcggattcggcgacggagcgccaatcctgtttgtggggtccaaccgctaagacgtgtaacacatgcctgcttctgaaggtctggtccgaaagacagctgtccaagcagcaggctgggttcatctcctgctgccgatttcggtctccatcgatcgattccttactccgaggtggtgtctacagattgttggagattcttccatgcagtagatggaaaaccaacccagtttttttcttttcttttcttttctttttagtcttcacgacattctcgtcgagctttcgcaggatttgtaatctaatcacct

SEQ ID NO: 2262 - DNA, 553 bp, Zea mays
  misc_feature (356)..(547): n is a, c, g, or t
gctgccccgtctcgacggaggggtactcgccccccgaggaggtgcgtgtctccgagctctagctccggccgtctggttgtctagttggccgcaagattgatcatctctcggggagagcgaagccgaatcgggcagttcggcgtacggttctggcggatctcacacttgcgcgcgcgttccggtgctcatgtcgagaaatccatgtgatgttcagacttgttgatcgatgctgtattgctgtttccatcccagaagattctccttttgtttacttcactgattagcgtggattctcccggggagccatgggcagataatttgttttcgaagtttttacgggatggttagaggcgtcnnnnnnnnnnnnnnnnnnnnnnnnnnnnnnnnnnnnnnnnnnnnnnnnnnnnnnnnnnnnnnnnnnnnnnnnnnnnnnnnnnnnnnnnnnnnnnnnnnnnnnnnnnnnnnnnnnnnnnnnnnnnnnnnnnnnnnnnnnnnnnnnnnnnnnnnnnnnnnnnnnnnnnnnnnnnnnnnnnnnnnnnnnnnnnnnagtgat

SEQ ID NO: 2263 - DNA, 470 bp, Zea mays
  misc_feature (389)..(390): n is a, c, g, or t
  misc_feature (400)..(402): n is a, c, g, or t
  misc_feature (411)..(414): n is a, c, g, or t
  misc_feature (451)..(453): n is a, c, g, or t
  misc_feature (460)..(461): n is a, c, g, or t
ctcgaggtcgctctcacacccagtgggcacagtgggtgcgttttggacgtcgtccaccatcccacaggccgttctcgtctcggccatggctgctggagcctgtggagagggagaaaagctgtgcagatgggagaaagaggaagctgcggcgagacgagacagatgacgacagacactcctgagtcctgcttgtagtagtagagcaccaacaacgggctattgcatagctttttcataccatcaatgggcaggtctcctaatctagaagtgaatttactttctgccaattcttccattatctgctattgcatagctttttcattactccacttcattctagctaaggggcagtgaaaaattatcttagtggcatggcatttagaagtggnntccccagagnnncaatgttgnnnncgttctccgacttcccatcccccaaggtgtcggacannnctggtcnnaccctataa

SEQ ID NO: 2264 - DNA, 307 bp, Zea mays
ggaactccatctgttcaacaatcagagagctcagggtcagaaccatacaggttcagaacattgactggtttgtttgatgcaactgaacaagtgcatcactttgagtatagtggagtgtgcatgctggcagctgatgaacctgcatgtgtggaacaggctctttcacaggactgctggaaaagagctatggaggttgaactgaagttaattcaagaaaatcagacctgggagattgctgatctgccaagggatcactaaggctataggactcaaatgggttttcaaagtaaagagggatccaacatta

SEQ ID NO: 2265 - DNA, 317 bp, Zea mays
ttctcaagtggccagataggctgtctaaaccttctgctagggcatcagttatcaacaatggagcaaacttgtttgaagtagatagtcagaagtgggttaggagagtgtcatattataagaaatcgcttggtgtgaagcttgggagcacaaacatacgcaatgtcatggacatgaatgcattctttggaggattcgcagccgctataatatctgatcctgtatgggttatgaatgttgttcctggtcagaagccattgacacttggagttatttatgataggggccttataggggtttatcatgactggtgtgaacca

SEQ ID NO: 2266 - DNA, 1426 bp, Zea mays
  misc_feature (653)..(653): n is a, c, g, or t
ctctctccgatcccgacccaccgcctgcaactcttcttctctcctacgtgttcgtcagcccgctaaggtaacatcctaagaagaatcgcctcggcctatcattcgattcatcaatccatgccgttttttccccgtccgacgtagagtcgggcagctgtgtgcggcgtggctaacgtggcatggagccgcagttgcctttgcttgtttgaaagactaggattgcctttcctgcgtgggcgcacactagctgttcgccgaaattcctgtggagtgagtagtgatagtgatagagcaccatggcaggggtgagtccttctttctaggatttttttagaaaagtaggttgctcttgctttatttgtttgcaaataaagcattcaaattattacagcaaacgagacttttagcgtatttctaagcgagtctgcgccagtcaacaccaacatctcacaaaaggagtacagatgtgttttgattggattgggtcagacgtacagatagcctgtgcctattatattgggttatacacattaatatcttgtattcttgtgtgaggctgtgagccgtaagggcaaatgcctggaacaggatgggcatgtggtagcattagcttacactccttaaagcctgatgactttgtttcattactttgnagatttcaagaatccgcgcacgcgctgctgctactgtttctagtttgatctggacattctgtgctcacctgggcacattatggtgctgctgttcgttcataacatatggatcgacagattgcagttccgttaacgagttttgttctgtatcttgatgttaaattactagtgtgttggaatttcatagctctggtctcttgtttccgtgttttaagtttaagtcgatgttttaccatctttgagtgggctgaaagcttccttatagagttgcagtttatcctgacactctcccaaacttacttctgatgagatgtgcgcaatggttgctaagcatgggttttccacggctccctttcaccagacttcttacatgaattgttgtccagtgttaagatggcttcaagtgatggtcagacagaagctgcggccccatctgtccccaaaaaccctgctatggcatcatgccggaagaagaaaacagatgatgctaccttcctcgaagatctgaaagaccacatcgatgagttcatccatgcctccatggatgagcacaagacctgctttaagaagacgatccagaaggtcagttgcactacttcactgaaatttcttttatcgctttggtctttcaacggttgtcatgcatttggtgctcaaggcttgtgttatccatggattgttgcgcagatgtttgggatgtcgaaggctgttgcagagagatccgcggcagaagcgaaggaagctggagttgaaagtgcttgccactcagacca

SEQ ID NO: 2267 - DNA, 330 bp, Zea mays
gacggtaatattgatggtctggaaaggtcacggttgggacctattgtccatgctaaatgtcgatctgggcccagcaatacttagggtgggcatggctggtgagtatctatctatttccttgtgctataacaaacatctatggactttaaggtggacataatgttttttagagctagtttgggaacctcattttcccaagggaaattgtatcttgaggttaaccccactgtaaatagaggatagtctccttgctagtatttggctgtatgcaacatgtttttggctacgattatatatgttatctgactaaataaaaatgctggatgtgag

SEQ ID NO: 2268 - DNA, 342 bp, Zea mays
aaaaaacaactgtagcatacaatcttatacagtagtagagatatgcttcaatcattttgggtaatcctcagccagacaagtgtatattaatattagccctaactatatgtatccacccaggactgggctggctgctctggccattccgtcccatcccatccagaaaggcacatcataggcacaaatgatccaaaactcaacaaatttgcagaactaatttgcagaagaaaaaactatgtcaccagcaaagctgataataatgactcgaatgttgtgcagatccacctgcgtcccgccttgttctgttctgtgctgccgcttgtcgctgcgtcattgactaag

SEQ ID NO: 2269 - DNA, 1097 bp, Zea mays
  misc_feature (969)..(971): n is a, c, g, or t
  misc_feature (1063)..(1066): n is a, c, g, or t
gaaatacaatcctccatctgatctctgtaaggatctccagcatcctgaacataggtaagtggcacaccatgtgcactgaagaatatcattacctgtcatttattttcacaacaataaaaagtattgtcagaataaaattacagcacattttttcatgattatctataaactaactgcaatgcttctttcagaaaaaacaatatctcatgctactcagaaattaacgtggatgtcagataacatcttaaactattaatttcgtgctaatatgttagtaacagtaagaaacagtgtcacaaaagtatttttttatacatctgataataacatttgcattttagctactcttaacaaatttgtgtatattactggtcaagtttgtccagaggaaggtacctataacaatgtcaaatcacagttccaataacttctattagaaagaaattgtatagctagtggatagctctggtgaaatctggaatgtgtagatgaaacaagtaatcctctgcctatcacattctaactgtagaataaaggtggaggtagaattaggaatacagaacctcttcaggattggaaaaggcagatagctctttttcaattaggtcagccattgatttcacatagccatcacgttggtaccatgattcgataatggagattggcaagccagaaaaatatgaatcttccctgcatggaaacttacgcattaatatttcaagttcttgtagcatcgaagatgataagatctcatatgctatcaatcgcttctttgcccactttgtgaccaacatgatgactcaatcaatcacttgttggtgggctgctcctttgcacgtcttttctggttcgaattgttcaggccttttggactgcagggcttcattccaggacaggatattgacgattttgatctctggtggtgttccaatagtgctcggctagatgggctgagtcagaagggctttnnntctttggtcgctctgggtgcttggatgttgtggaagcatagaaatggtgtggtctttaatggttcctccccaagcctggtggtggccgttcnnnnggccagggaggaagctcttctgtggtccttg

SEQ ID NO: 2270 - DNA, 744 bp, Zea mays
  misc_feature (637)..(639): n is a, c, g, or t
  misc_feature (693)..(698): n is a, c, g, or t
  misc_feature (715)..(740): n is a, c, g, or t
tccgcctgtagtttgggtcagtccgccgtctccactgcttcgaacccatacccatcctcgcatcgcattgatccgggcgtagaacggctcttggaatatgtcgactctgcgacgtttgcttcgattttcaagaaccactcaaacttgatcaatggcttctccttgctaccgaagaggctgttagttactgaatcttgatacaattttttttggcacatcgtgggctataaaattactacatggtcttagggatcatgggttctgggttcttgaattctttatcatttgcatttccttcgtcttatactcttatcagcggatagttcttgatgagattagacttactcgtcttcccatttcgtactagctatcctcaacctgtcttggaattaatattgctaatcagttcaagaaactacaggcggaggttcaggaaactaattcctcaacctgtcttggaattaatattgctaatcagtgtagcctgcttgttttgctaatcagtgtattctatgtctgaacattttgttctgatcgtaacgagtattcagagttgccagtgtagtctgcttgttttggtttcctgaacactagtggtctgttccacggcaacagcctccagcggtgcccatcggtnnnccgatccgccgccagcgccgccgggtcgtccaggcgcaaccggtgcttcggcgnnnnnnccactatgtgcgggcannnnnnnnnnnnnnnnnnnnnnnnnntgtc

SEQ ID NO: 2271 - DNA, 725 bp, Zea mays
  misc_feature (647)..(654): n is a, c, g, or t
  misc_feature (692)..(697): n is a, c, g, or t
  misc_feature (703)..(712): n is a, c, g, or t
  misc_feature (716)..(722): n is a, c, g, or t
ggcaaggctacacttctgaccccagaagtcctcaagtaattgctaccagctctcggttatccctcacttgctttgctttgttagttatgtcatttaatcctcaagtaattgcaaagtccacactctgtcaaatgattcagtggctgctggcaaccgtttgaccttctctgtggtatgcttagtttgactctgaggtttgggacctagcaaaactagattgagatatgaatccaatccatgcacctttctaatagaattgcaatggtcgacactcgacacacatactgtttgattcgttgggtaagtaagattgcgaatgaatttaatccctctacttctctttgcagggaaatgcagctggagcaggagagaatagaagctgaaaagaagcgggtaggaaaaaaatatttcactcagtgataaatgtagttgcaatttaacctcagcgacctttttctttgtctggagagtaaacttcaattgcagtttatccttactgtccttatgaaaagaaaatatagtgcctttatgtcctccgtaatttaagtcctaagcatgatatgttcatgaaattctatgaatgcatttttatcagtttttgttgataattatggtcttaagaatttctctatttacacaggtaaaannnnnnnngcaacaacttgctcgagtttttgaaaccattggcgctnnnnnnctcccnnnnnnnnnnggannnnnnnaac

SEQ ID NO: 2272 - DNA, 355 bp, Zea mays
cggccgcctggtcgtcccccaccatgatgatcgactccgccggcgcccagcgccagcaggtcgtcgattcgtcgtccctcttcaactctcgttgatcgatgacgccgtgcgccctgcaccagctacttcgttgctagctgcatcgagagctgccagtgtacgtggcgaagcgagtcgatgcgcgggcccactggttcgtgagttacttacacatcaagtctcaagacgtaccagatggtggttactcgtgggttttatatttggataatgtttcatatttgtaaaatatatatactatagtagtggtgtcttaaacatatatactttgatagctatatagtcttttgggtttgct

SEQ ID NO: 2273 - DNA, 397 bp, Zea mays
acgaggccgatagtccaacacgcgtcatatttgggtgttataattgcacagacctgattgcctgaagacgaggcccatggtcgatcatacgggcgcgttgcagacaacaggaaaacttgccacgtggattatatggcggcaaatcaaggaaaacggcaggtgggcaacgctgggcacctgtaacaagcagaatgttaggcgcagtggtttagttgacgaagctgacatagacccatatataagctctcatcagattgtttggatcacacaaggctcccaacgttgcagcgcttcatcagattattctaaattctagccacatgctgattctttctgttaagcctatataaggatgcctaatccaagtagctcctttgttcatttttgtttgggtgta

SEQ ID NO: 2274 - DNA, 272 bp, Zea mays
tgtgcattgtacatgcatggctacaccactgagatgctgattgtccctgctagctggttgcaaagaaggaaaaattttggttttctcaccggaggatggatcgacctctgacccccaccccccacctgtccatcataatgtgcgattttctactattcttttttttccttaaaaatgtgatatatgtatattttttcctttttctttttcttttttactcaagagggtttaggtgaatacatacataataacccccttgaagtgtttctcag

SEQ ID NO: 2275 - DNA, 370 bp, Zea mays
ccgggctcgctaaatttccgcaccaccgcgaacgagagaaaaagggccaggtccggtcactggatgccgccgctgccaccgctccctccctagcccctgacaacgatctccaggcattcgcttccgcagtccgcaccaccgccatttcacgcacaccgccgctgggtgcgcggacgcgtggtcactcccacagtccaaactccacagtccccgcatctgccgctattgctgtgctcggctcggcacactcagactcggagtgagagcgaccaagaagaggggatgatggagaagtgacacggcgccggaggttgcaccctgctccgcctcctcggcgccacagccgccttagcggttcgacttagtgcta

SEQ ID NO: 2276 - DNA, 340 bp, Zea mays
tactgtgtagctactagcgtactctacgctgcagctgggcaagaatcgacgatcgacgccacacgacgacgacgacgatggcttatttccttgccagtaataagtgcgtgctgctgtccctcttctccgtcgtcgtgctcctctgtctcggcggcggcgcctccgccatgggcagcctgcccccgccaccgccgatggtgaacttcagcatcggcgtgcagggcgtggtgtggtgcaacacgtgcaggtaccgcggctacttcgcgcccatggacgcgtccccgctcccaggtatatattatatatatacgacagccagtagcagctagccccagtcgtc

SEQ ID NO: 2277 - DNA, 354 bp, Zea mays
ccttggtaccgagtggagaaaatggatccagtacgttctggattcttcaaagaactgcggtcctcgtcaatggcagcccgggtccctggattccatgcaaaagagggcagaggtagcaggatgactctttctcccccgtatccttcctttctcgtcaacggtgcagtgcagttgatttttcgtatgtttcaaatggaagcagcaccattcaaacaaagaaagaaagaaagaaagaaagaaagaaagaaagaaagaaagaaagaaaaacggaagcacgtggactgaagactgtgaaacaagcgccaccaaactttcgaggaagcgcgggtgcggaaagtgcgtcttcgttatgtc

SEQ ID NO: 2278 - DNA, 381 bp, Zea mays
gtcccaacggcattctccactactacggcatcctcctccactattacgcctggaccatcttcgatgggcgcaacggtatactcctccacttcctcaccgtccatccagaggtcaccaggtggccatcgcctccgctgccactgcggccgccacacgtgtggcaacgtgccacgcgccaacgccgatgctcaccgcatgccacgacgaggtcatctggtcagcgacgaaacccccctatacaccagtcacgcgggtaaggtgttcgtcgatatgaataagtcagtatcactgccttgcgtatgtaactacttgaatggactggagcaggggtaagaaatgttggcaacgtatagagcaccgtgtcagctcctgaatacattt

SEQ ID NO: 2279 - DNA, 930 bp, Zea mays
  misc_feature (848)..(852): n is a, c, g, or t
  misc_feature (887)..(892): n is a, c, g, or t
  misc_feature (894)..(908): n is a, c, g, or t
  misc_feature (912)..(918): n is a, c, g, or t
tcaagtactaatggtctaaagtctttatcacatgcccacttcggtttcgttgacatctttggacgaatactcaagtacctccccctcaatcttctcaaggaaacggtgcatgaccactaaactctcgtcatctgcacgccatggaacagccatacattgtggaattagtttggctgactgccgttcgtatatatcgaggcgaaaagaaagaaaaaatatgtttgttgctagatgacccagggttttggttcaaggtacgtagtttctcgtttggctgaagaagggggtctcaaacgcgggattagaccgaagaagaggagcttaccgagcctcggaactgtgtggccctttgggtgacggattacgaatgggtccacgcatgattctatcagcttttcaccatggactttcaggaagtcgttttcacctgcatcaaccaaatttggaaacgtgttcagacttgagtggtgcctcgtagtcagctatacaccggttcgcctatttaaataaaaggtaccaagacaaataacgaacagaaatgactagagaattggaccatgtgcatcttataataaacctaatcgaagcattctagaacagtagacatgatggagggcgaaagcgtacattattttccatgcggaaatcaaagttggcatatattcaattgggttttttttaatggtggacacaggtttcttgaacctttcttgacagcattatgcagcacattgccgaaagcaagccctgtctctttcaattaacaagagaagccggcaggcaagagcaacgaatacggagacgacgtgagtacgccataacgtttccaccaacgcaacgcttgaacnnnnncggacaaacaaacttggcatgacaatggaatgatnnnnnncnnnnnnnnnnnnnnnacgnnnnnnngaagtgaagcga

SEQ ID NO: 2280 - DNA, 365 bp, Zea mays
ggtagccatgcctcctaagattcaagttatggagcaccccattcacaacgacgtcattcggtttgcggacctatttatgatggtagccataactcagttatctcaagttacaactatttgcctcgatgtgtgtaacaccctgaatttgggggtataagatttctcttctaatatccaccaaattcatgtgttaccgtctcctttctttgctttccttctctttttttctaaataaagatgagttattttgttatattggtgtaagcctagtgaagtgagccctagaggcactttggttgttgcattcatgacattgcatagtgtttctatatgaaaaggtgtttgaaacatgttaatatgtctcg

SEQ ID NO: 2281 - DNA, 369 bp, Zea mays
tggagggaaagaagcctatcctaaagataaggaaggttatctcgggattacaatcaatcctaaaccaagcatatcaggagttgcataatatactctaatacccccccccagtcatagcgttagcaacacgaacggacagactggagaacaatggagatatccccccatagtcggaacgccggtgcgaatgctgcaactgcagtagcccatgcataggatagccctttgtgccgattatgtcgagatagccgagtgcaaggaagtcaagccattgtcgaggtgccaacagagaagacatccacgacggttgtggtgcgatatgacgggattgccgtcgcaactcacggttgtcagagcggagtacacgaa

SEQ ID NO: 2282 - DNA, 393 bp, Zea mays
acgatgctgggcgcggccgctgccgcggaggaggaggaggaggaggccatcgccgccggcgcgggcatggctgtggtgaagcgctcgagcaacccttacctggacttccgcagctccatggtggagatggtggtggagcggcgcatcgccagcgtggggaagatggaggagctcctgggctcgtacctctcgctcaactcgccgcgccaccacccggccatcctcgctgccttcgaggacgtctgggaggccgtcttcggcgaggagtgagagtgactgggagcgtcaagcgtgatctctttcagagtactgtttcaaaacttctacgtacatgccaatgtataaattggcaacattttgccacgccgagatgctgtggtgctcatcgtatgt

SEQ ID NO: 2283 - DNA, 384 bp, Zea mays
  misc_feature (19)..(23): n is a, c, g, or t
gcacagaagaaagtgaagnnnnntgtatctaccggccgtgctgctaatactcatgtttctagttccaggcctcgctctgtttttatcccccaagcacattggcccagccagccaattgttgatcggtttgcgcatatacctgagcacctgatcagcccttctgcttttagttatgggttgccacaaccacttatgcatccagcctatcctcatcctcattctcatcagggattggtaggtcaaggacagggtaatttccttcatttcaatcctggtattgagctgcagcatcaaggccaggctttcttcggtcctccagctgtctaccaccccatggtgaatgggtttcacccattcggtatcaatggtgctcagcaagtgcag

SEQ ID NO: 2284 - DNA, 369 bp, Zea mays
tctattgttgtatatcatctaggtgatgattcaggtgacacagtgtaggcataactggtgacgtgatcagtttcatatgtatcctgtcaaggtcaggggtgcaaaggtttttgatgttactattaatactgcttctcattcttttgctatctctctctctctcttttttggcgttgctagctgttctgttatctagattatcctgtaatgacgatgctgatcatgtagatcttgtttccatcaccaaggttgtctgcactctgcagtccatgggtacattgttcccactactagatgccacttgcaatccgaagttgttgggatgtaatatgtaatacttctttgggcactttaatttgtgaaagcaga

SEQ ID NO: 2285 - DNA, 749 bp, Zea mays
  misc_feature (680)..(700): n is a, c, g, or t
  misc_feature (709)..(711): n is a, c, g, or t
  misc_feature (713)..(715): n is a, c, g, or t
  misc_feature (719)..(742): n is a, c, g, or t
aacgtgacagctggagcagatggtaatgatctctgcccttcttctcctgatctgttttacatgtccatgtagtagatggtcgctagtacttgggctaaggaagctgtgttacttctgtgatcctttagccgtagtccataattccattcacatgctgtgtatatgataatgtactatcttgtcactgagtttgtttctttgctgtcaggtgttgctaatatcaatgtcaccgacagccaggtaataagacatctagacccgtatgattcctatatcaccctagccttctccttaacactgctaatgattttttttcagatcccactgactgggccaaactcaatcattggcagagctgttgttgttcacgctgatcctgatgatcttggaaagggtaatgatgttatttactgtcaacacttgtgccttttatgtgttgaatggtggtgtttttcctctgttctgagctaagtttttcacattggttctgagttcagatagtcctataatcactatatatacctgtttatggagcacttgaataaaatccatgtgagagtgtgactaattatatcagattattaaatggtggagagagttttggtaaggctatggcgatatgcttgtactgtcgcataaatccctaaaaaataatccagttttttatgccatttttatgnnnnnnnnnnnnnnnnnnnnnctttaaatnnncnnnactnnnnnnnnnnnnnnnnnnnnnnnnctgatct

SEQ ID NO: 2286 - DNA, 495 bp, Zea mays
gcgctctggtgatggcgatggggttataaggttagggtccgccagatttggtgaccgagttagagctccaaatctggccggatcttgtacaggagttgtttgtcgttcgttgttggcggcggcacatcacagaaggacgatggacgggttggtgtatgcgtggcggaggagctggtgcccggtcacgcctcgccggcaacgggtacagcccctgaaccggagagtcttggggtgcgtccccggccgatgttcttccttggtacgtttcttttgcagctcgttaaagcctttgggcgatgaagcttccccggtttttggtttgctttccttccgttgctacctcaggcgaaggtatcgacgttcgcagcgaaggatgacgacgaacggcgcctggcggcacaaaagttccaaagggccttgttataatttttctttttgtatggacttttgtgtacacctttcccttttgtacacctcgagaaggtgttgtggtct

SEQ ID NO: 2287 - DNA, 344 bp, Zea mays
agatggtgcgtctaggtatcgccgtgccgcgcatgctcgccaatggctatacttccatgagcagcatcggcccttgtagtggccagttttccagtatactagctagtagatggatgcgcatcaaggagccaacccaggaccacgaccaggaggcaaacaataatgtttggcaaagaaaaagttagggcatgatgcgatgctagcactagtattatgtggaataaagcactagtagatagtaatgtttttatatataactgcggcgatgtgaacagtaataataatatatgcgtgtgggaaccatatatagtgcttctatgtatatggttacattgctgctgata

SEQ ID NO: 2288 - DNA, 498 bp, Zea mays
tgccgagctgctggtgatgctttaatgatcgatgtcaaggagttgtagtgacgcaacaggagatgatagagtgctgtcggatggatggagtgaaactgcctgctgccgaggtggccgacggagagcatgctgagttgaaaaggggtgttggccacgctccacgataagtatgttatgttgcccccctgtcattatttatttatttgtttatttcaatttaaatttgcatgcagttaggctggtaacgtgaacagtctctaatcacatgattgctgttccctgtggaaggaatacatgggtcaccacattgtgttatgctgccttggggcacgtagtttatcaacaacatatcttatgttttttttgtagaaaaaatcattcccgtatgcccttgactaggaaaacatatgtcggcccatcatctcagaaaattctcatcctggaagtgatgtcctaaggattgagattcagattctcatcctgtcggagcatcgccaa

SEQ ID NO: 2289 - DNA, 1512 bp, Zea mays
  misc_feature (364)..(367): n is a, c, g, or t
  misc_feature (484)..(486): n is a, c, g, or t
  misc_feature (579)..(581): n is a, c, g, or t
  misc_feature (586)..(587): n is a, c, g, or t
  misc_feature (607)..(607): n is a, c, g, or t
  misc_feature (610)..(614): n is a, c, g, or t
  misc_feature (627)..(630): n is a, c, g, or t
  misc_feature (647)..(648): n is a, c, g, or t
  misc_feature (660)..(664): n is a, c, g, or t
  misc_feature (672)..(673): n is a, c, g, or t
  misc_feature (675)..(676): n is a, c, g, or t
  misc_feature (684)..(684): n is a, c, g, or t
  misc_feature (688)..(688): n is a, c, g, or t
  misc_feature (691)..(692): n is a, c, g, or t
  misc_feature (695)..(698): n is a, c, g, or t
  misc_feature (708)..(711): n is a, c, g, or t
  misc_feature (719)..(721): n is a, c, g, or t
  misc_feature (725)..(729): n is a, c, g, or t
  misc_feature (731)..(736): n is a, c, g, or t
  misc_feature (738)..(741): n is a, c, g, or t
  misc_feature (745)..(746): n is a, c, g, or t
  misc_feature (749)..(763): n is a, c, g, or t
  misc_feature (766)..(766): n is a, c, g, or t
  misc_feature (769)..(770): n is a, c, g, or t
  misc_feature (773)..(776): n is a, c, g, or t
  misc_feature (779)..(784): n is a, c, g, or t
  misc_feature (787)..(789): n is a, c, g, or t
  misc_feature (792)..(793): n is a, c, g, or t
  misc_feature (795)..(796): n is a, c, g, or t
  misc_feature (798)..(798): n is a, c, g, or t
  misc_feature (800)..(804): n is a, c, g, or t
  misc_feature (807)..(818): n is a, c, g, or t
  misc_feature (823)..(828): n is a, c, g, or t
  misc_feature (831)..(834): n is a, c, g, or t
  misc_feature (836)..(847): n is a, c, g, or t
  misc_feature (859)..(866): n is a, c, g, or t
  misc_feature (868)..(868): n is a, c, g, or t
  misc_feature (871)..(873): n is a, c, g, or t
  misc_feature (877)..(877): n is a, c, g, or t
  misc_feature (879)..(886): n is a, c, g, or t
  misc_feature (888)..(888): n is a, c, g, or t
  misc_feature (891)..(895): n is a, c, g, or t
  misc_feature (897)..(901): n is a, c, g, or t
  misc_feature (904)..(918): n is a, c, g, or t
  misc_feature (920)..(927): n is a, c, g, or t
  misc_feature (929)..(931): n is a, c, g, or t
  misc_feature (934)..(942): n is a, c, g, or t
  misc_feature (952)..(956): n is a, c, g, or t
  misc_feature (959)..(962): n is a, c, g, or t
  misc_feature (965)..(976): n is a, c, g, or t
  misc_feature (978)..(983): n is a, c, g, or t
  misc_feature (985)..(985): n is a, c, g, or t
  misc_feature (987)..(994): n is a, c, g, or t
  misc_feature (1007)..(1009): n is a, c, g, or t
  misc_feature (1011)..(1013): n is a, c, g, or t
  misc_feature (1015)..(1020): n is a, c, g, or t
  misc_feature (1022)..(1024): n is a, c, g, or t
  misc_feature (1026)..(1037): n is a, c, g, or t
  misc_feature (1040)..(1040): n is a, c, g, or t
  misc_feature (1042)..(1047): n is a, c, g, or t
  misc_feature (1050)..(1055): n is a, c, g, or t
  misc_feature (1064)..(1068): n is a, c, g, or t
  misc_feature (1070)..(1083): n is a, c, g, or t
  misc_feature (1088)..(1094): n is a, c, g, or t
  misc_feature (1097)..(1098): n is a, c, g, or t
  misc_feature (1100)..(1104): n is a, c, g, or t
  misc_feature (1106)..(1108): n is a, c, g, or t
  misc_feature (1112)..(1119): n is a, c, g, or t
  misc_feature (1121)..(1122): n is a, c, g, or t
  misc_feature (1139)..(1140): n is a, c, g, or t
  misc_feature (1142)..(1143): n is a, c, g, or t
  misc_feature (1146)..(1152): n is a, c, g, or t
  misc_feature (1154)..(1155): n is a, c, g, or t
  misc_feature (1160)..(1160): n is a, c, g, or t
  misc_feature (1163)..(1163): n is a, c, g, or t
  misc_feature (1166)..(1167): n is a, c, g, or t
  misc_feature (1169)..(1191): n is a, c, g, or t
  misc_feature (1194)..(1196): n is a, c, g, or t
  misc_feature (1198)..(1199): n is a, c, g, or t
  misc_feature (1202)..(1204): n is a, c, g, or t
  misc_feature (1206)..(1206): n is a, c, g, or t
  misc_feature (1209)..(1214): n is a, c, g, or t
  misc_feature (1216)..(1217): n is a, c, g, or t
  misc_feature (1225)..(1227): n is a, c, g, or t
  misc_feature (1231)..(1237): n is a, c, g, or t
  misc_feature (1243)..(1245): n is a, c, g, or t
  misc_feature (1247)..(1284): n is a, c, g, or t
  misc_feature (1286)..(1286): n is a, c, g, or t
  misc_feature (1290)..(1299): n is a, c, g, or t
  misc_feature (1303)..(1310): n is a, c, g, or t
  misc_feature (1317)..(1321): n is a, c, g, or t
  misc_feature (1323)..(1326): n is a, c, g, or t
  misc_feature (1328)..(1336): n is a, c, g, or t
  misc_feature (1339)..(1339): n is a, c, g, or t
  misc_feature (1341)..(1346): n is a, c, g, or t
  misc_feature (1350)..(1351): n is a, c, g, or t
  misc_feature (1353)..(1353): n is a, c, g, or t
  misc_feature (1356)..(1356): n is a, c, g, or t
  misc_feature (1363)..(1364): n is a, c, g, or t
  misc_feature (1372)..(1375): n is a, c, g, or t
  misc_feature (1378)..(1394): n is a, c, g, or t
  misc_feature (1396)..(1403): n is a, c, g, or t
  misc_feature (1406)..(1421): n is a, c, g, or t
  misc_feature (1424)..(1431): n is a, c, g, or t
  misc_feature (1433)..(1434): n is a, c, g, or t
  misc_feature (1436)..(1437): n is a, c, g, or t
  misc_feature (1441)..(1445): n is a, c, g, or t
  misc_feature (1447)..(1447): n is a, c, g, or t
  misc_feature (1449)..(1460): n is a, c, g, or t
  misc_feature (1466)..(1477): n is a, c, g, or t
  misc_feature (1480)..(1495): n is a, c, g, or t
  misc_feature (1497)..(1503): n is a, c, g, or t
gattggcatcacaacgccatttgagaggtgtatggaggggaggtgcgttgcaatttggtcaacaagaacatgtaggagaaaaaaacagattttagaaaaatcagatagtctttcttcctgaagttggtacttaacatttttttgttaagttatatgtcaagtaaagtcaatgaaattttagaatttaaacagattctaacacgatgacattgcgtagataatgatgacactggcctgagatggattttcagtttgtcaccattagaaaatgtaaagcctaatggtgaaatatggcacttcttcaggcacacaatcaaagaaaggaaaaaagggataaaaaagagactgtgatgggaaatttgcnnnncttgtttctgtttcttgttcttagttttgttcacagtttttttttagaaaaaacccgggccttttcgttttactttatttgattagatgcgtattgcttttttcatgtgggtatatnnntgtttttttatttgaatgaatcgatttcgattgacatggatctcaatagacctcgtagttcatcctctcttcttttctctcgaaggataagtnnnatacnnaatccagtctcccattacgntannnnntccttaactaccnnnntttctgagcatactcgnnattctgcttctnnnnntttctagnncnncattcccnaacngcnntcnnnnaaaaacaaannnngcaacttnnncagnnnnngnnnnnncnnnnattnnacnnnnnnnnnnnnnnnaanctnnctnnnnttnnnnnnctnnngtnnanngngnnnnnctnnnnnnnnnnnnccccnnnnnnccnnnntnnnnnnnnnnnncctcctgaaccnnnnnnnncntcnnntatntnnnnnnnncntannnnntnnnnntcnnnnnnnnnnnnnnntnnnnnnnncnnnccnnnnnnnnnctcacccctnnnnnctnnnntcnnnnnnnnnnnncnnnnnncncnnnnnnnncttcccccctccnnntnnncnnnnnntnnncnnnnnnnnnnnnccntnnnnnnccnnnnnnctccttccnnnnnannnnnnnnnnnnnnctttnnnnnnnccnntnnnnncnnnccannnnnnnntnnctttctcctcctccctnntnnctnnnnnnncnnccttnctnccnncnnnnnnnnnnnnnnnnnnnnnnnctnnncnncgnnntnccnnnnnnannttcctctnnncttnnnnnnntccccnnncnnnnnnnnnnnnnnnnnnnnnnnnnnnnnnnnnnnnnncngcannnnnnnnnnctcnnnnnnnnccacccnnnnncnnnntnnnnnnnnnccngnnnnnnctcnnanccnaccaccnnctctccannnnccnnnnnnnnnnnnnnnnncnnnnnnnnttnnnnnnnnnnnnnnnntcnnnnnnnncnncnntttnnnnncncnnnnnnnnnnnntcttcnnnnnnnnnnnnccnnnnnnnnnnnnnnnncnnnnnnntacccctat

SEQ ID NO: 2290 - DNA, 416 bp, Zea mays
cttgaaggtttgcctaaaattcatgaaagtgggagtgggttctatcatcatagaacaattcaacatcagaaagctcaggtgaccccagcggcagccatttctacgataaacagtgggataggtcgaaatatgtgcagtactctgaacatgtctaattcatatgggctttctcataagtctggaccagctgatgttaccttagatttacaacttaaaccaccaactagacctgagctagggataaactggaaaggacttgctcctgctccagaactgagtctctctctatttggtaagcctatggacgagcctaagtttcctagcacccccaatgccttatttcattctggaactgctggaagttccaaaaaggtcagtggggaggctgctgctacacttgggtcagataaggcacc

SEQ ID NO: 2291 - DNA, 1372 bp, Zea mays
  misc_feature (728)..(729): n is a, c, g, or t
tcaggtttatgggtgggttgcccgagctgaggactacgatgcaacgactgtggtaggaagattcttgagaaagcacactgtcctgcaaacaatagacgaggtttccaagactgaattagagaaatcaggggagatggtggcgatactggcatcccagatcgaggaaaagaaccgatacttgcaggatttggagacaaagaagaatgcgacagaactctccatctcaaggcttgaggaggacaacaggaaacttcatgaggcatacaatgaaggtaatctgtgcaaattgcctcccttttcctttggttctacttatggtatagagttttcctgcatgcttgacatgtatgtctagagcatattcacatatgttctctgtcttgtactttacatttttatatttttcatggaagtcctgaaactatttgtttggcttttgttccctctttttatattgtacatggattatttggagaaaaagaaattatgactttgttagacgaatgcaggacttattgagataacattatgatgcatgaagttattccttgtcttatatgctttagcattatatttatcagtaagacaaaacaaaagacttacctgatgatagatagatactagacgctgcaatgaaggaaaataggtaatagaccaactctgaaacttcatattgatgcaaagttcgtactgaaactgaaagtaaataaatcccttatgacctagtnncctcatctaaagttctaaacatttaaacaagcaaactcacagttactagagagtagagacctagagcagaagatcgtcgtccaactgaaaggcatcagcagggacagcagcagctccccctccaactatttcacattcatcttggtccatatttgttgctgtttctggtggtggtggttcagctggttcagtagcatcttcatattgattactgtcatcttcttcaccaagacctcgagttgctgtgtttctggaaagtttccttttcctaacatacgttctttaaggctgagaagatgaaccagcacctacagcagtagacctagaaaattttctgccccggacttgcacctaatttggtctggtcgaattgctccctaatcggacgatttaatcgctctagttggacgactagaggacctgatcgaggcctcctcctagtcgaggacctgctggcgtctggcgaccagaccgaataactgagattagttggacgacttgaaaacagagtttttgagtgcttgaatttcttggctttacaaaatcgacaaaacaaattatttcggttggaagtcatttatcttgtaagttttatatcctcttcatttatcttataagttttatattctctcttcagaaatgc

SEQ ID NO: 2292 - DNA, 718 bp, Zea mays
tgatggtgctgtccttgtgaatggaaacaatagtgaggaacagtggggtatgaaaaatgaagaaccatcagcataaaagctgtagttgagcaagtgtacagtcctaaataccttatttttcctggtcttacctcccagtgcacgatattaggaaagctgggtgatatccttaagttgcccttgtctttagcggtatggcagttcagggagttttgaccaacctaggattcataaattttattaaaagcttagtgaaacgttttttaaaagtatcccttagattttttttgtttaaaacgttcctgttcctgttactggtgcctgctctcttgctaccgttcccatattttgttatgttcaatctatatatgcagatatggtaaatggtcaaatcgttaggcaatctacattgagacattcttctgaacagtatggattgcagtataaattattgttttgacatttttttttatttctaccagttttctcagtatttgtgtttgatgtacacagtttcactagaatgtttctaatggttgtcttttctttgcagtgctgactcctgagcaatagtggatcaacgggacagcaactttgcaagtggttaagtttgtaaaggtgaaatgctattccaagtaattaatactcatataccatagaacattttctgtcatactaaagctataatacaagtaaccaatcctattgtaggttgctg

SEQ ID NO: 2293 - DNA, 483 bp, Zea mays
gactgccctttcttttcgctttgcttcctggatccaactgccgccgccgcatctgtcttcgttgattcggtgttcttcgatcggatgcctttatctgcctaggtacgtgcgccgattcttgcgtcgggggattcaattctcggatgggtggagggggattcgtcattcgtgttactgagctatgagtgggtggatgggttcgtgaggtgcttaccagatctcagcttctcgatctgtccttcgcgatttgtcgcccaattcgtttacctcctcctatttctgctcgcagatcggagcaagagcaaagcgcggggtgtaaatcctgagaggaggaagagaaggaggagaggagatcgagaccggctccccccgtcttgcttgtgcttgtcgcgtacggttcttgtaagaacccgcagctgccgcgtccggttctttcaagaacccgcggcggggatggatctgtacgacaagcgagaggacata

SEQ ID NO: 2294 - DNA, 701 bp, Zea mays
cgtgtcaaacagattattgaattgaaaaataaggtaatttgttctctgctttgtgcccagagtctaattttgccatatgctgcattatagtgggtaaacttcttatgtttccttgcatgcaggtttgtgctggaggcgataaaaactttgtggtgatcaatcagaagggcattgaccctccatctctggatctccttgctagagcgggggtaatctattctctacttcttggtggttacatgacccaaattcattttcaaccctgaatggattaaggttttcattttagaacttgtatcttatgaagttaacagttgaagtaggcattgactgattaaaccatgctctgaaagactgaaacaataatttatgctcagattattgctcttcgaagagcaaagaggagaaatatggagaggcttgtgctagcatgtggtggtgaagctgtcaattcagttgatgagttgactgaagattgtctaggctgggctggtcttgtctatgagcatgttcttggagaagaaaagtacacatttgtggagaatgtgaaaaatcctcgctcttgtactatactgattaaaggttggttttttcttgagaaacaacatctcatttctgatacactaattgagctgtgaattgaatatcgtttgacatattcaggacctaatgaccataccattgcacaaatcaaggatgct

SEQ ID NO: 2295 - DNA, 423 bp, Zea mays
  misc_feature (360)..(364): n is a, c, g, or t
  misc_feature (385)..(388): n is a, c, g, or t
  misc_feature (393)..(399): n is a, c, g, or t
cggctgctgggagcgcttccgtgctcatgctgttctgtgatacggcgctatcctcgccgagcttattcctcgacttccaacctattcaccaccgctgtcagaacccttcttgtgacaaaaagttaagcgagcgtcttcttgaccttgcaagactttttgtccggagataatctcctacgaattaccctcttgcatcttgcgactacctctcctcgtctcgcgcctgtcgatccttccatccctctcgtccccgtctatccctcttgagcttggaacactctcgatcgcagctagtagtagctagctatatattattgttttcctttcacctactttcgcatgaactactctgctatttgnnnnngctggaagttccaaaaaggtnnnnggggnnnnnnntgctacacttgggtcagataaggc

SEQ ID NO: 2296 - DNA, 331 bp, Zea mays
tgatgctgacgacgacgacgacgagaccgaaagcatggccagcgtttctgaagacgctagctaatgtttctgatcatggaggtttagccaattggggcgggcgaagtgtggttaccttgcctcacataatgaccttgttggctagaaatttgccttggatcgagccacctcatcataacatgcttctgttgtcagctgtaattaagcttcttcttcttctttttttggtgtggcggtttaccttgaaggacttgatgtatgccagtacaacaaattcagccaaatgtggccgtgtatctaacatatccttgtaataaaattgctccctcct

SEQ ID NO: 2297 - DNA, 388 bp, Zea mays
tctttctttcacctcatcttctccctggccagcatgtactcggcaatgctcttgactggctggtcaacttcggttggtgagagcggaaagcttgtggatgttgggtggccatctgtctgggtcaggattgcaacccagtgggcgacggcaggtctgttcatatggtcgcttgttgcacccgtcctctttcccgacagggaattctaagttcaaccacggtaagcctggagcatcaaacgtgtctactgtggtagctaatatatcctatcaagtatgttgcctttaaaacatgctccgagcatggatggcaaaaagtcggtgtttgtccactgttatcaagtttgtctacttaataacatgtgactttaggcattgtgccactatctta

SEQ ID NO: 2298 - DNA, 235 bp, Zea mays
ttcccggccttgacggcgtgggcggagcgcttcttggcggtggacgccgtgaaggaggtgatgccggacgctggaaggctgttggagcactacaaggggtttctggctaaacgggctccacctgctggttactgatcgctgtaactgtaagcctgtaacagcaagctcagtgttcgtgtacttttccgtgcgttaacaggtgtgtactggagtccaagaaaggctttgattctgt

SEQ ID NO: 2299 - DNA, 367 bp, Zea mays
cccggagtactgcttcaccaacgacaacaacggtgggcttgggctggccgacgagaccaccaccaccatcgctggcggcagcagcttcgtccccaggagcgtgctgtgagtgtgaggtccccacgagcggcagcagcttcagtatttggagaaatacgatcgatatgtgcacagcgtacgcgcagtaatgtatgtaatcttttgcctgtctgttgtttatctctgagcgaaacgtgtggcttttgtggtgtccacgagctctgcggactgcgtgacactattgaggaagagacggaaacaaaagcaaaaaagcaaaaaaagaaaagaaagacatcggcatgcacaaatagcatgacgagacgactgt

SEQ ID NO: 2300 - DNA, 983 bp, Zea mays
  misc_feature (974)..(977): n is a, c, g, or t
ggtctgattttctcagcagctgaatgtaccatagagaaggtagattattcagttttttccactcatggatgtttcggcatgttctcttcctatttaaactttgtattcgcatgttctggcaggttcgggcaaagcatgacactaccaatacagcggtagctggctgtgtcactggaggagctttagctgtaaaaggtaattagtttgctgtgtcatctatgaattcctgagacaattttcctaacttttaattatcaaatttttcttaactaaaacggtaaaatctcacggtgcaatcaatgccgttgcctttgtgtatggactgtggggaccggtatatttgacctcaagcagctttcttccagctatttgtgtctctggtcttcttcctatatctcaagaattatataggtgaaattaataagctgttctaaattaactgtaaatctgcatttctgataatatttttgttcctttcgtgtgtatgacataaacgttttctatcccttcctgcttcggtagctagctaagaataacgagacatttcgtatattgctgtcctgatgtatctatatttgaaaatgttcctaagggcttggttggataccataaattgagactagtgtctagaaagtgcttcccatttcgttattagattactttccaattcctctcaattcttgggaaccatacaaggcctaaggggattttgtatttttacaggtggccctaaagctacatgctttggatgtgtggggtttgctgcgttctcagtggcaattgaaaagttctttgatcggcatacttgaaatgggtgttgtgaatttgaacgctttttggccatgttcgtttgatcccaaaaccatagggattgaggtggattgaaagagattgaagaggattttgacttgtaggggatttgatcccctcaatccctatggatcagcacaaaacgaacagagccttagctgagnnnnagcagc

SEQ ID NO: 2301 - DNA, 732 bp, Zea mays
  misc_feature (724)..(728): n is a, c, g, or t
catacggaggtacatgcattcccaggcattgttggactcttcccttgtgcacattatacttttgtaccttgctggttgccacacgttgatattgattgactgacgcttgttatttctttcacagtgcaggcttgatactagcttcttggtttctttcattggggtaaaatctattttttttactattttcacgtttcctgtgcttcccatttatcatggtgacttgtggccatctgtttattccttttgtgctactacccgtaggattgagaatgctgaggttctgtgcctgggaatcgtctcagtggcagtgtttatgcttgttttgccgttatttaaagctactggtaatatcctactgcaaatcgcacctagcaatgtgccaccttcagcctttacaaagtgctcgagacaggtaaacaaggcctcaggtagtcgttcatttggttcaaaaagaaaatgcacttaagacgcatgagcaagtgatagatattctccagattgctgcttgtgaagatgtctccgaagtatggcaaggtcgattctgggagcttgttcctggtcaggcagttggatctctctccattagggtaaaacccttgacacagagctgcaaagtccatcatttgcactgaagcattcctgacgttgcttgttttgcgctgtataggtgaagagcggcgctgacgaccgggcagtccttgaatacacgcatggtttatannnnngatt

SEQ ID NO: 2302 - DNA, 423 bp, Zea mays
aaaggaacatacagcgaagaaggccggcaagcgtgtgacgttcgccgaggtggagcctgagaaggagctcaaggcctcgaacagtgactggcacccatcctctgatttccacgcggcgtaccctgagcagaacccatgggctagcggcttcatgatctttgaggatgaaaacagctactggaaccgaggacccctagactggtaaacactcaacacttctgaatctttgtatagtcttcacattacacacatgtttgtgatgatcatccgcgttttttgtgtagctgagatcaaatgtatcgaggtggacactttttggtccgctagcagtgcaaggtcccaccagttcatcttcagccgaggagatgggtctcactcgcattatggcgacttgcgcctggtgtctgactctcggtcctgtaa

SEQ ID NO: 2303 - DNA, 361 bp, Zea mays
ggagatctgggcagagtactgcaagctcgtgccgtggaggatcctgccttatgtgtactgaagagacggtagaaaccaaggcagctcatggccctgggccagctgtaaaccttattttgtttgcccttaaccagttggtgaatgttgatgtagcactcggtaaactgtgaccgtgcaaacttttgttattgttggtccatacatgtttggaatcgtgaatcagaccgcctcacttggtggcatattattccctttagcgcttgcttgggagctaggacccgagaggattgaaggggttaaaattttcttgttattcaatattgaatattaaggaaattttagtgactttaatcctctccgg

SEQ ID NO: 2304 - DNA, 415 bp, Zea mays
ttttccaatgatgagcacttttaaagttctgctatgtggcgcggtattatcccgtgttgacgccgggcaagagcaactcggtcgccgcatacactattctcagaatgacttggttgagtactcaccagtcacagaaaagcatcttacggatggcatgacagtaagagaattatgcagtgctgccataaccatgagtgataacactgcggccaacttacttctgacaacgatcggaggaccgaaggagctaaccgcttttttgcacaacatgggggatcatgtaactcgccttgatcgttgggaaccggagctgaatgaagccataccaaacgacgagcgtgacaccacgatgcctgcagcaatggcaacaacgttgcgcaaactattaactggcgaactacttactctagcttcc

SEQ ID NO: 2305 - DNA, 415 bp, Zea mays
  misc_feature (184)..(184): n is a, c, g, or t
ttttccaatgatgagcacttttaaagttctgctatgtggcgcggtattatcccgtgttgacgccgggcaagagcaactcggtcgccgcatacactattctcagaatgacttggttgagtactcaccagtcacagaaaagcatcttacggatgggatgacagtaagagaattatgcagtgctgcnataaccatgagtgataacactgcggccaacttacttctgacaacgatcggaggaccgaaggagctaaccgcttttttgcacaacatgggggatcatgtaactcgccttgatcgttgggaaccggagctgaatgaagccataccaaacgacgagcgtgacaccacgatgcctgcagcaatggcaacaacgttgcgcaaactattaactggcgaactacttactctagcttcc

SEQ ID NO: 2306 - DNA, 297 bp, Zea mays
  misc_feature (288)..(289): n is a, c, g, or t
cacccacccctcttcctcctctctgccggcaacaggacgcaggcgcataaaaaatagcaccgccaccaccacgctccacacgctgcagtttctggaaggccaccccctctgcccgctttaaggcgccgtccgcaccggtcgcctccctcccccactagcgctgccgcggccctcgccccgcccatatacagcgcggccgcgcccaatcgttcgttccgttccgctccgccacagcggctccgcaccaaatacaggcgtgtccaccgcgctcgccccctgctggtctgnnctgctctc

SEQ ID NO: 2307 - DNA, 382 bp, Zea mays
  misc_feature (375)..(376): n is a, c, g, or t
tgcgtgctaactcctatgcatcgcattcctggatgttcattggtcaatcacgatgctgtgcactgctgcagctcgggtagtttttgctaagctggaggtgcagcagacaagacaacaagcaagaggaggcaactaaggagtagtactatatatacactgatgactgatgccactagtccatcgtggagctcggttgaggaagctcatcgatctcgttgtaccgaactatctcaaaaaaacatagtgcctgtttgtctggatagctgctcggccacaggcacagctgtctggccccgggcaccatccaaacaatcccatatagagcgtgtttggacgcagattcgtaggcctgtaaagcaaacacgtcccaattanntgaact

SEQ ID NO: 2308 - DNA, 348 bp, Zea mays
tcttcaatagagtcttgcatgttccactccatcaaaggcgtgctcataaatccattcgccttggtcctcaaggtgacttaggaagaggaatctcgatttgtgggaagcaacacgtttcaaatgatattttgccagaagttactttgaatagtcatcatggtcaaacatcagaaaactcaagagacagttcatttacaggagtgacaagtaatccaacaggcttcaaagccggtaatacatcttggggaatggtggatctttcttcaccagtaccgtcaactataggtcaaacacatacatcctccacagtcagaaaggagatgtgtgctgaagcgcatacattccctg

SEQ ID NO: 2309 - DNA, 402 bp, Zea mays
  misc_feature (358)..(358): n is a, c, g, or t
  misc_feature (362)..(362): n is a, c, g, or t
  misc_feature (373)..(375): n is a, c, g, or t
ggagcagcttctagcgcgactcttgttggtgcagcgtagtccattcctgcagagatggagctgggtcccatttgtaagggaatgtaataacatctgcttaaaagtgaaatgtaataacgtatgtatgcaggattttagcctgggaagccaagttgtgcatccgaaccccctggatggtggcttcaagtactaagacacctgccgtggggcggtggagtatgcaggctcacggcacgggaccaggctgagcggctacatggcctccagaccccccaggagacaagtgcctgttcttcaaagccggacctccagttcgttggacgcacatgacttatagttttaaatactaggacacccntttngggagtaaaannnttaaaaaactaggacccccgtttggga

SEQ ID NO: 2310 - DNA, 331 bp, Zea mays
gcatctatgggggtgtagttttgttctctgtgcagaccactagttagaagctaactcgcatgtgtgatggcgtctgcggtttggccgcaagatagagattggctgtgagcgcacgttgtgttgtgtgattcttaaggatattgctccttgctcatgttaccatgcacatgcctcattatttgtggtgcgactgtggcatcacttacaatatcacacacacacgtggatttgtttcatattttcattgttcagtttgagtgtgtcccgtggaacatgtctagtatcctgcagcgatgcctcatgacagtaagcataaaaaataccttgtgga

SEQ ID NO: 2311 - DNA, 393 bp, Zea mays
ctcctcctacccacagccactgcctcgccaccacccgcctccacctccgctccacatccaccatcacccgccgccgccgccgcagcagcagccgcagcagcagcagcatgatgcatgagtaccgagtagccgcagagcagcgcgagaggatcagacgatgccattagcttattagctcctttatttatccttcttcttcttcttcttcttcccttgtaatttcagtgacatcccagttgttaaggagttgactcatcatgcagcagttaggagggattaatatgattgtgtgacctaatctcatcccagccatactcctactacaagtcttcctctcgtcctcgttgctttcttggacgacctacctccattattaggttattagcatcagtg

SEQ ID NO: 2312 - DNA, 309 bp, Zea mays
ggtcggcggatcacactaacccaactgcaagccctagccatgtccgccgccaccgccgacgaacccagcgtcgcaatggaggagcagcccggaaaggagagcgaggaagccgccgatgcaatggaagagcagctcggaaaggagagcgaggaggcggcagagtccgccgaggaagtggggcaagtcgaggaggagcccgaggagggcgtcgaccccgccgaggcaatggagaaggctggagaggaggcggaggccgaagagggggcgtcgctgcggccggcgctgccggtggggagggtcaagcggatc

SEQ ID NO: 2313 - DNA, 377 bp, Zea mays
  misc_feature (368)..(368): n is a, c, g, or t
gctccgaccactgcagaaccttctcatgcagcgaaaccagaaccgattcaaagcaagacaagggcttgggcaccggatgacatatttcgaccacagagcttacccagcatctccaagcagaccagcttcccagcaagcattggtaaccgctggcaggatatgggaatgagtgctgcacagcagggaattctttcattgccgctgtcgtgccccatttgctgtgacgatcttgacctgacagattcgagcttctgtccctgtccttgtgggtttcacatgtgcctcttctgccacaacaggatcttggtggaagatgggcgctgcccaggttgcaggaagcaatacaacacagtttcaagaactgtcancgacataaa

SEQ ID NO: 2314 - DNA, 512 bp, Zea mays
tggcggcaggcagggaggttctattaccgccgcgctgttcctgaaacaggtacatttctgtttgtttttttcttttcttttgacacgcctaataaatacattatgaaatttgatcagagcgataggaccattggagtggtgagagattaagaatccgccacgatagtgaacactttgacaggacagacttccagagcagtggtaacggcatgaacgccgcttttgtgtccctcccttgttgcagttcgtcgacgacaaggtccagtggatgcacatcgacatggccgggccagtgtggagcgacaagaagcgggccgccaccgggttcggcgtttccaccctggtggagtgggttctcaacaactcgtcctcgtcgtgaacaaaacccatacctcccctcgtatcacaatgcctttccatgcgtttttattttgttcctcctcttttgtgctaccattccatagttgcaaactgcagagcgcctcttggcatgtgataccgttgtgatagaa

SEQ ID NO: 2315 - DNA, 655 bp, Zea mays
  misc_feature (55)..(55): n is a, c, g, or t
ccacgccctcaggctgcacggtgacgaaaacataaacctgaaatggatcacatanagctgcaagagcaactccaatagttatgtaaattttagttctctaaatcatagatttaagaagttgttaaataattttgggagtaaaaaatgtgggttcttcaatagttctttaaatataggttgtagttttgttttgtatctatccatataaaaaaataaagtcacaaatgtaatcaattacctttattatctacataatgcagtaaacatttttgtttaggaagtttctaaatggttgccaaatatagagaggaaataaggttagatgagaaattgttaaatttagaaagttcatttagagaactgttggagatgagtttttgtgttaactacttaaattgttaatttaggaagtctattagagaaatactggagttgctctaatgagggcaaaaaactgaatgtcattgagattctgcaggcaatgaacagattcagctcaaacggccgatcgacatccaacactaaccgggttgctgctctcagccttgaaaattatcttctccgtgttgagcagcctcctgttcttaccgccccaatcccaatcgtccacgagtctaatggagaagctcgacggtatctacaggactacagacac

SEQ ID NO: 2316 - DNA, 715 bp, Zea mays
  misc_feature (668)..(680): n is a, c, g, or t
  misc_feature (686)..(693): n is a, c, g, or t
  misc_feature (696)..(704): n is a, c, g, or t
ttcataacttaagacctttatattggactattgacttggttttcttatgccttaagatatgcagatggatattagagacatgggatttttcggtgatgagtcatttgattgtgtccttgataaaggtaaattattatcatcacgttttataactctaaaacaatattagcatcacctttactcaaaagccattaaactaaaattgtttcattacttcagtgctcaattgaaatctttttttttatgaatgtcatacaaattgatccattatgctacttcatttatgggttagtttgttgtacctttctctttagggaccctggatgctatgatggtaagcactatctaccagttgaactacatagcagccttctgattaggcatgtgttgagatcggtattgctataattttccagtgtgctgatgatgctcctcatggtgctttcaaaatgctagcagaagtggcaaggtttaagacagtttttcctcactctttacctatcaatcaatccagattgatgtatcaattttcctgaatttatgtatgctgtatattcgtgcaggcttttgatgcctcatgggatctacttattggtacatcctctgagttcaaaaaatattctgttcctgaatcctaacgagatcattatatgaagagagattgtctnnnnnnnnnnnnnatatgnnnnnnnnaannnnnnnnncccacttctga

SEQ ID NO: 2317 - DNA, 360 bp, Zea mays
gtttttattctggatatgatgagttatgttattgtaatttttctgctttatccctgatgcatgtttatgaaatgtgattattgaaatgtccatgatatgggttgtgttcgatcaattgggaaagttaagttcaggttctatggaactcaacagaccttgttaagttatctggtacacatgcataactatgtgaggtcattaagacaaagattggtgttgggggcctcttatgctgaagatcacttattagcaaagatcatctatctaacacatattgcttctgcattaacaagtatatttcaggaatgttcccactaacggacgaagctaagcttcggctaaagcagtgtacaaaggcac

SEQ ID NO: 2318 - DNA, 361 bp, Zea mays
tcactccctcctttttatgggaccaaatgaccatacatgacggaaaagctagcttattattggtgtgcatgcgcatctatcccccctctcttcttgatctgatctgctacctctagctctctcacccgatctgctgatctgtgtccatacatgcaataatgaggttgttgtccaaggcgcataatttatttttgctggatttttcatttttctcataatgatttaacctttattttttttggtttttggtttgggctttgtggagtgaattgaagactaaaaggctaagagtgtgcgtgttaaatggggttttattttttgtaaagaggatttgcatgctcttgcatggcgttgcgcttgg

SEQ ID NO: 2319 - DNA, 691 bp, Zea mays
  misc_feature (327)..(327): n is a, c, g, or t
  misc_feature (542)..(545): n is a, c, g, or t
  misc_feature (556)..(561): n is a, c, g, or t
  misc_feature (565)..(569): n is a, c, g, or t
  misc_feature (584)..(586): n is a, c, g, or t
  misc_feature (651)..(664): n is a, c, g, or t
  misc_feature (672)..(688): n is a, c, g, or t
ttgctggttagtattgccacagttcaatggagctgcacatgtatatgagcattttgtgaggccaatgattgtaaatcagcaagttgtaaacatctggtatattccaaagaaggatgaatcaagtagacctgatgatgtaatttcagctgcacagaggtacattgagcaaaatggatcaaaagcgtttgagaatcttgttaacaaggtattatctgtttcctgttaaattttaccattctcttttgtgaaaatagtggacacttgcaccagttaggtttttttttgtgctgtgagaagcacagaaaaatgactctacaagtctacagngatgatgctgccctagtgtttaatgatattgcagtgtggtttttattatccatactacggaattcagttaacaactgtcattgtgttctatcaaatattgtttctgtgatttcctacattctaaaaaaatcaacaactggggaaggactgcctccatggttttgcacattttcacattcttaggcctttaaaccttactgaaatgcttattaccnnnntgagctttaannnnnncaannnnntgggctttatcttgnnnaaattgtgtaaggaaccctctacaacaaaaccgagggaaaaattaggggacctaaagtttgacannnnnnnnnnnnnntgtcagcnnnnnnnnnnnnnnnnnctt

SEQ ID NO: 2320 - DNA, 636 bp, Zea mays
ttctgcccacggcactactccgtagactttggtaatgtcttggtgttgttgctgacaacttattggtaaatttggtagatgtgcactaaattgtatcattaggcttatgagattagagcggttttttataaataatcttgctgtgctttactcggtatataggattgtgtttaaaaaattagctacattttagtccccctaaaaatgtttttttttcctgtgaaccagttctatgtagtggtttattatggtattcctacattttagttatatgtacgtaagcaaactactacattaattgttattttgtttagaatagaaaaggcagatggatgttttgaagtatataatgatatgaacattacatttttttaaactccatgttcagttactcacccaagacctatgaactgcagctcgacgcagcagatttcattcaactgcagctcggcgcagcagatttcatcagtaaatagatgttgcaggatggagcatagaaatgtacatttcagtattagttgaaccccaagaggttggtaaacatctaatacattcctattccattattggtgaacttctgttgctatgtattacataaacaaatctcagaatcgaggtaaaaatttgttgtccaac

SEQ ID NO: 2321 - DNA, 361 bp, Zea mays
cgagatgagcggtgaggcggcggccgtgggcggaggcgaaggagaggcgaatggcatcccgccgaacgtcaccatctatatcaacaacctcaacgagaagatcaagctcgaaggtctcctactcccccgctccgctccttcgctaaaccctagggatttatgtcgatttgtctttagtttttgcggctccgtcgggggatttgcatcttagaatgtcgatgtgggcgccgtgccctagtagttgggcaatggaaatctctggcgtttttccatgggtttggggtgggctggtgttagtccatggaatgtacgcgtgagtatattgtgcccgactagtctgtgcatgtgatggtcatagagt

SEQ ID NO: 2322 - DNA, 407 bp, Zea mays
tttcggctgctgcggtgtctcggcggcacgtctacgctgtcaagagctgcggagtgaagaagcgcccgtcgagggcgcggttgctgggccgggtcccgctccgggacatcaccaacctggttcaaacgagcttggcggtcgcgggacctgaggctcctctcgggcaggaggtttcgccggctctggcgacgtagttggccaagcccgatgtggtgctgcggcggtgttgagactagcagcactgctggatggagtcgctgctgccccggcggctaaagcggacagatactccctccggaaggggttcagctaggcgcccactgtacagtatagaacagttcttgcttcgtggcccaatttctcttcggttttggttgcattcgattggactggattggttggttgat

SEQ ID NO: 2323 - DNA, 413 bp, Zea mays
agctgtaggccgagcgagctccagatacgagcatgaagggatggagtcgtgatgctggagagacacaaccagaggagtgatggccggagccgtacgcggagctcacaaccagctccatggaagatgaagacagcgtgtcttccgagacctggcaacaccggaaggacaactcacgtggctgtgggtgtcaactcctggaggctatcatgatgggggataagcacatagtacatggacgttacgtgggaaaaaatccacctaatgagcggcggccagatttttcttcttgctgcgcgagcggatgagaacgacggggtataaaaatcggaggagagagaacggcgggaggaacggctggatattttcttttttactcgaaaatttaaatataaacgtaaatatcagctcgagat

SEQ ID NO: 2324 - DNA, 408 bp, Zea mays
ccagctgtgcgctgcctgcgacggcctgaggtcgcagctgcgcggcgccaccatcgtctacaccgacgtcttgctcgtcaagtacgacctcatcgccaaccacaccgcctacggtgagtgacgtcgtctcatcgatgacctccgatccatgagtgcatccaggaggcctcggtctcatcgatcggtccacggtttcagggttcgaggagccgctcatggcgtgctgcggctacggcgggccgccctacaactacaacgccaacgtgagctgcctcggcccgggattccgggtgtgcgaggacggcaccaagttcgtcagctgggacggcgtgcactacaccgacgccgcaaacgcccttgttgctgcgaagatcttctccggccaattctccacgccccaaatgccct

SEQ ID NO: 2325 - DNA, 349 bp, Zea mays
aattctggcgatccacggaccagtgtttggcctaccaatatcaaagaaaaaccattgattgaggagacccggagggcaattctggaagcacagtcgagcagattcaatgatttccaaggcaagaaggtatctcgtgattcggaatggatgacaattacttcatcctttgactccaatgttgcttcttctgatgttcccaaggaactgtccactggaaatactggatcacgagaatggagctgtaagggacaatcttttgctggaaatcagactcaagacaagttattttctgacagacaaacagaagttcgaaaagcgccaggagcaagaactttggttcactgcttca

SEQ ID NO: 2326 - DNA, 559 bp, Zea mays
tctcatgtcacatttcaataaaatcggagagtgccttgtttctggttatatataaaaaagtgcatattgtgatgatggttaaacaccttttctgaatgatgaaaaacgtttctgagttattacgaaggctaacatgttctggttaccatggtggtttccatactaattattatacatcgtgtaaatgttgcaggagcctctttcctcttcagcagccgagtttcagtctggcagccccattttacaagagaaaattaaggttcttgtgtgtcaggctgatctaatatgtaattactgcatttttatgtggttatgcaacatgccattgtctagtttgttcaactagtctcctactttgtctgtagttgctcggcgaacaatatggtgctttaagacgggcacgtggagatggaaactgctttcatcgaagctttatttatgttttcctacctggtagtatctgcagtgtacttttcacaaatattatcgttcataattcaggctatgatcctttcttatatttgcttacaggaacacatcctagagagacaagacaaag

SEQ ID NO: 2327 - DNA, 681 bp, Zea mays
tgctggggtgggggacgcatctgtgatctcatctggatttctctattcctccgcatcgtgcaggccgcccagctacagggacggcccgaggacggcgaccacctcgcggagcgcgtcggcggtgtcgccgtagcgcacctgcgtcagcgggaggcttctgctctccactgcgtcgccaagctgccattcgtgcaagcgcgtcttgttattaatcagaaaaaaggcatcaagcagtatcaacaaactaattgcctacgtgtcgcagtcataaagattactatgcatgtgtagactgtagaggtcatcaaacgttgattttaatatataagtttactacgcatgtaaaaacaaaaactaattttgacgtggagtggcagtacgtagctgcgttccaaaagaggacttgatgcacattctaaaaaaaacaaaaacaaaaaagacttgatgcaatgggccaagcaagacatgctgtgcgaaaaaaaaagaggtggaagggcgtgtggaggattcctcactcacctcatccatggagtagaagaacttgttggcgacgacagtgagcgccttcttgtgctcttcgccctggcagaaggcgatcaagcggctgaggtcgatgcacaggaaggtggccttgagccggaggtccctcccaacgaggtcccacgactcctcgtcgtccgt

SEQ ID NO: 2328 - DNA, 345 bp, Zea mays
cgcttcgtgttcgacggcaagcggctgaaagggaagcagacgccggaggagctcgggatgaagaaccgggacaagatcgactttttcgttgatctgagcgcgacggacgacggcggcgacgtggaggagccggccgtgtacttgacggtgaaggtggtggtgctggacatgaaagggcgtacgatggagcgcactttgcagagtacccacaagctgcaggtcgttatggatgcctactacgacagcgtgccggacgtctcacgcggcgtgggcaagttcctatacgacggcgggcagttgcagggctggcagacgctcgcacagctgaagatggatgacaaggac

SEQ ID NO: 2329 - DNA, 388 bp, Zea mays
ctggggcatatgctgccccacccggtgccccttcgcaaagccacggtgccaatggacatgtgcagaactggaatcccggcaactcagtctatcccccagccccaggaccaggaacatatccaggccagatgtactcatctccctcacagtatgcagcgtcagggggcttccctaataccccatccactgctccgccacactatgcagcatcagggggcttccctaacaccccactcccagctcttcctggtgctcctacacaacagttgcacgcttcgcagcagatgctgcctcagcatggaaatcagtcgggaggcgcatccggaactagccaaccggcgccaccagcatcatactaccgttgagttgaaatcttctttcgctattg

SEQ ID NO: 2330 - DNA, 444 bp, Zea mays
tttgttcttttgctacctttgttaaacaacatcagatcattcgtattgtatccttcctcggattgcttcttttgttctactacaaatatgctccacatggcagggagaggtatgctcctaaatttcttattttgtgcattgtgaaatgattgttctaacaacatcaagtttgtgttcttcatataatctatctcagattgctctgtgttttgcaggtctcgaggtcaagcctggacccactgtcaagtgtgtgcttggacatgactttatcctgcactttccagtgtaaatctcattgtaatgtgtacttacttttctcagttggatttgctctgtatacttacttggatttaatcctgtaggctgcacttggggaatcaaagaaaagtgaaagtgccatgtcaaagttgatgaccagaagcttgctattggaaccctctctat

SEQ ID NO: 2331 - DNA, 395 bp, Zea mays
cagtcgggctcgggcaacgcattattgccgttgccgcagatgcccggcgggtggcagcaaaggaccccaactctacggctgctagagttgcctcgccatggcgcggagtcctctgcggcatcgtctccgtcatcatcgtcttccgccaagagggaggcgcgttcagctgctttggatctcgatctgtgacctaaaggcaaaatcattcatatcaaaaggaaagttcaaacgattctttcttttccgcttgtttcgggttcttcctatatattgccttcttctctcttttgattgatccattatataacttttgatgataggatctaggatttgacgttttcatttccttgtttttggcccttcactttttttttctctctcttttgatgggttgg

SEQ ID NO: 2332 - DNA, 399 bp, Zea mays
ctaggcttcaggggctactcttccagatggcagataagctctcggtcctggtggagatcaatgagagggcatacgaggcaagaactggtggtgctctcgagggggtaccgcccaggcgcaggggcgagggtcaggataatatgggaaagtggcaggataactttgtctcgtcacaggggcggcagggtggtggcaacaggtttggatactccagcagaggtgcaatatctggtcaaagtggtggtggacaccagagggacaggggcaatcagggttaccgcgggggctatggtggcgtttcaaggtttcaggatgcaaggggtcgcaaccagtctaatccatcaggcagaggtggtgatggtggtgcacgcatggtgaacctgaacagggttggtagag

SEQ ID NO: 2333 - DNA, 691 bp, Zea mays
  misc_feature (488)..(490): n is a, c, g, or t
  misc_feature (585)..(585): n is a, c, g, or t
  misc_feature (588)..(592): n is a, c, g, or t
  misc_feature (619)..(632): n is a, c, g, or t
  misc_feature (637)..(640): n is a, c, g, or t
  misc_feature (645)..(653): n is a, c, g, or t
  misc_feature (658)..(687): n is a, c, g, or t
cggagagacagaggcttcaaaactgagccggccgaccgagtattgtagggcgtcaagaggtaaacatgatgtcgtttaatccttgatagtttgcgtttatcagcatctcttgtttccttttttattaaattggtttcttaggaaatgttgttttgattcccctagcctaaacttgctgtgtagatcgattgatctgggagggagagaaaagggtaaagaaatacttgctggctgctgctggccatggaaactggatgcttcttccaaatgtggtaggccgtttttttgtttctgcgatcaaattaaaaagttgaacgttcttcctaatgtgcaatatccactggaatttgcattttttttcgtttcacttttcttgtcttgtggaatctgttcgcaaggatttgtgaaactttattgttttcttcccagaaacaaaagaaatctaaaaccatggggaaaaagtgtctttcttgattctctttttcggnnngaaatgaattgagagggattagaggagattaaatcttaatctcctccaatctcctatccctaaaagtttgttcggttgtgtctgtattgaagggnttnnnnnaaattaaatctctttttattcaatttnnnnnnnnnnnnnntttannnnccttnnnnnnnnnttgannnnnnnnnnnnnnnnnnnnnnnnnnnnnnataa

SEQ ID NO: 2334 - DNA, 355 bp, Zea mays
  misc_feature (348)..(352): n is a, c, g, or t
aattcccgaatccccccgccagcctccgcaaaattccccaatcccaccgccagcctccgcactcgcctcggaacctagccccgtcgactccttcagatccggcgggatcgccggctcctaccctcggtcgccacgttccggcatctcggctccccggcgtcctctacccggcttctacacctgccatcttccccaggcggcgtcccgacgaatcgcttggtcgacaggctacatcaccaccaagccagcatcgacgactcgaaggattcgtgtcgtcgtcgatcgccgatagccggtcgccggtcgccggtcgcctcttcgtagatcgaattcgttctgtgattattnnnnntgc

SEQ ID NO: 2335 - DNA, 457 bp, Zea mays
cccctcctgcggaaaccaatatcaactcctttccactacatgagtctagtgctggacagaatgatgcaggatgcagtctgaatatctctcataatttttctgcaatggtaagcccttaagagaaagctaattatccatattccatacctttcgcctatagtttgccttggtgcgcttatgcttgtgacttataggttgaagatttgaaaaatgatctcccagtaattggtcgatatcttgagggaaacttgcttccttcagatgttgcaagcttcctagagagggtgagcacgatgatcaagagttataccccaccacagggcagccgaaggaaagatcgagtaagtcatggccccgctgacccagtcaggtcaaagaacccaagaaaaaggggaagacattcactctttcaagattcttttcctcatcggtatctaggcaccccggtaaacatagt

SEQ ID NO: 2336 - DNA, 572 bp, Zea mays
gtgcctggcctactgatacaggctgtacaagtcaagctggaaatgctgatgaatcatgggtaaatgctgctgaaggtagtagcagtcatgttcaatcatcatccggttctacgaagaagttggatggacattgtaaagaggtactaactgctacttgtaccatggctgtgttgtttcgtctttcttttctgattaatcatctttgtaaggctagtgtcctattttgaattttctttattacttttttggggctagatcaaagagtcatcagcagcatatggcagtgatgaagaagaggaagaagaagctgatgtccgtcctaattcagggagtgatgaggacctaagtgaagaagacaccatggagatcgatgaggaggtgagatgaagtctttatttggattgttacaggctttttcctttttttcttttatcctaaacagtaggtaaaaggattcacccatgtagttgctttctctgcactctacgctctggatccctttgtaagcatatttgtggatgtttgcatggcagatggaagggtctgtggacgaggactgcaacaggtccgat

SEQ ID NO: 2337 - DNA, 424 bp, Zea mays
tgcgaggtcagaggcctctgaggagcagaaaccacctagcggggatgatgatgtataccatttcataaactacgttccagtggatggtgtcctgtacgagcttgatgggctaaaggaaggaccaataagtctagggaaatgcccaggtggtgttggtgatgcagggtggtggcttaggctagcgcagcctgtgatcaaagagcacatcgacctgttctctcagaacgagataagattcagcgtgatggcgatcttgaagaaccggaaggagatgttcacggtggagatcaaagaactccagaggaagagggagggcctcttgcagcagatgggcgatcccaacgcaagcaggcatgttgagcagtcactcgcggaggtggcagctcagatcgagtctgtgacggagaagatcataatggaggag

SEQ ID NO: 2338 - DNA, 539 bp, Zea mays
atccccagtacaagaggtacgtgctgcatacattttaccttgttatgatacgccgtgagacttgcttaatatttctggtttggtgttcactcgtgctggaacgtttcgaatgttattttatatgataggagtgccgccttcatgcgaaagcaagctgggaagccaggggtacatgggggcaaatcaagcagagaacctccgctggagggttcgtctctgggaggtacagtaccacctgacgatgctgttactaacaatgatggtcagaaacctgatggttcagccacagagaagctgcaaattttgtctgctgttaagtctctcaagagaaaccttggtgcattcaaaaactcaaagacaggtgaccgataaaaagagcatcatttttgttccggctattacacttaatcagtgaaatccctttgttggaaaatggtctcagttatatagtcttcgagatagtttcatggttatgtatgcttatctctgattctgtagacacgcgtctaatctttggattttcagttttgacactatcc

SEQ ID NO: 2339 - DNA, 660 bp, Zea mays
taatcacagttctcgaatgcgatatgatctttgactcggagtattgaagactaatttagtttgagtttgagattagttgtttttgtcattaataaactcacattagcgtctggttacgagctcactactagattttagatctccatttttggtgtacttctgctgcatgtgcctcccatagttgcggatttgcaggtatcacctgattccttttgatttttggattgagatacagtaaaagttatctttgcctgtttccaccacactgtatcatacaggtaaacatgaatacaaggctggcttgatctggcaagtgctcgccattctatgggcccatcacacttttcgagtacactgtttgatcatgaagagcagtctgctgccactaaacttgaggttgttgatcatgattgtctgaaaatttatcgggtaaatgacttctctactatttgagttaattgatgctatctatctatctatctatcaacattgcagaactaattctagattttaggaatgcttttgtttctcttgaatttggttcctcagttcaagttttgtttttattgaagcatacatttacataaaattagaatgtcaattccatacacaaatcactgatgggtttttgcttgtagggatatgccttgggatggagaa

SEQ ID NO: 2340 - DNA, 632 bp, Zea mays
  misc_feature (511)..(629): n is a, c, g, or t
ctgccaaagtcgtcgttgccacatggaagcaccggtacaccgctcgacccttctacaggtgagcctccatcccgctcatggcagttcacctgtttccattcggccatccgacactccgaccgtctgtctgactgatgtgccgatgtggtgatgctcgtgagcctagactcctagaacccatcaggtttactgcacctgttccagtgtccctagtcctagttgttcctggagagtggcgactatcagcttcagagcttccccaaatcagccacttgaaaggtcagcatccacattcactgtccgagcatctcttattttgtttagtcaggtgttcatgtggcaaatggaatttaggatttggtagcaccatggtccatgtatgtaaatcacatcactgagatggaggatggtttaaatgatgatgaaatggaatatccatttgagggtgatgctaataccagtaacaatgatcagatagtagaggaccatgctgatgatgcccctattgctnnnnnnnnnnnnnnnnnnnnnnnnnnnnnnnnnnnnnnnnnnnnnnnnnnnnnnnnnnnnnnnnnnnnnnnnnnnnnnnnnnnnnnnnnnnnnnnnnnnnnnnnnnnnnnnnnnnnnnntga

SEQ ID NO: 2341 - DNA, 405 bp, Zea mays
tagctaatggttagctggactattagatgagacatgagagtgtttggatgtctctaactaaaaataaataatatctaaactattagttgggttattcggatgtcttcagctaattttagcagctaattattagctctagtgcattcaaacagggtctaagtatagactctagaaaaaaaaggaacatatttctatcctgggtttacactgcttattatgtgccatgtgtattgttgtacccgtgccttctcatgactccttaccaaaggatttgaggtgttaactcagattccattcatattgagaccattttgtgcttataggttgctgacttgctgatcagttactgtgtctgaaactattctcctttatgttttgctgcctcattatggaaacacctctgta

SEQ ID NO: 2342 - DNA, 376 bp, Zea mays
cactgagattttaaaatttccaatttctcaaggatattgttgcctttgatactataatatgtagcttacatgatatttgccctgtagattcaaaaatttcaatttgtcaaggataatgttgtcttgtgatattctaatatctaacttcaatgatttctgtcctgtagattcaagcggattggcggcaggccatatcgctgaagaaggcaatagaagataaaattgccaaaggtgagacaacgtaatcagctgtgcttggccacacttgttctgattaacttgcattggattctttgcaaaccaaatgctttgatcacttgaacgccctcatcggggccatgttcatgaaatgcggtgtagagctaaagacaatttc

SEQ ID NO: 2343 - DNA, 487 bp, Zea mays
caacctttgtaaggtgagcatcatactgttcttttggacatgcatgtggtgaaagcatatatatatattttgttcatttcgaagctggctggccttggtttatagtctgaaggagttctacttcggggaatctggatcttgcagaggttaccttctctcatgcttagggttttgatttgggcattgaggctatcttcatattggtgacagaagaaatgtcgttgtgtatgtttctgtctaaaatcggctgtagcttgtagagttgatgaatatagttgacatgcttatctgggctgtgaagttttgaatgtttacataatgtttcatgtgccttatatgtggaccctgcccattttctccccgctccccaacatcatgtaattcattagttaaggctcgtgttgtgtatacttagtctgtcgagtttaaggcctatcggcaattctgcttctatacagttgtttggtgaaaccgttgctggtaggat

SEQ ID NO: 2344 - DNA, 450 bp, Zea mays
aatgaggattcaaacgatgagaacagagacaatattgagagtaaggttgaatctaagcaaattactcaagacagcaggccaaaagagggtcagactccaaaaccttatttttcatagttcatactttcatagtaccaatttaatctttatgatttgtcaggggcagttggggactaatacttatttccttgcaatgtgcagtcagcgaagctgttccagtccagaaccaagctgccgcgcagaagctactgcagaaaatgtcgcaggccgtgcctgaggacaggcgcggtcgcggtcatagattcaagggcaaaggcaaggaagaagatgctcaggtttttaccctcgatgaatgggagaagaggaaagccatcagttcgaagcccgctgcggaaagctacgtgcatgacactagccgagacgaggagctggcgaggcaactgcaggaac

SEQ ID NO: 2345 - DNA, 353 bp, Zea mays
  misc_feature (348)..(349): n is a, c, g, or t
gagggtcgggtctagtaggagcagggggcctggcagcgtggtggtggagaacttcacgctggacatgctccacgcctcgacggacgggttctccgacgacagccagatcgggaccggcagcttcgggtccgtgtgccgtggcaccctccccgacgggcgcgaggtcgcgatcaagcacatcgaggactcggcaaaggcatcaagctcagtggcgtggcactgcgaccgagagacggcgttcgacttggagctgaacgcgctggcgcgcgccaaccacaagaacatcgtgtgcctgctgggctgctgcgccgactccggcgagcgtgtgctagtgtacgagttcatggnnaata

SEQ ID NO: 2346 - DNA, 370 bp, Zea mays
ttcggtaattcggttctggaaccgagtttaggatacggtgggtagctggtttatcagcgtccttggttcttgtatgagctgggtgggtagcgattggtaactcgaattagctccgcctgccatcgatggttaattgagctccaggaccatcgccatggtggttccaaggaagagccatgatcggcttatatgtagcacagcttcttgtgaatcgtgattgagtcacggccgacggatggagggagaagatattggtattgccacaaagcaattgaagggatgacctgctcccttttgggcaaaaaggtagatcatacagttgttggggagacgaagacatgtctggttgtcataaaaataactggaactg

SEQ ID NO: 2347 - DNA, 255 bp, Zea mays
ggcgggtgctgccttagtacaaggcgcatagggctcgcggcgttggcactggcgctgacacgcgcgtcgtcaacgttctctgcgaatgcaatgtcccgatgggtgctgggtgcaccaacacatgtttaaactagtgcagccactcagttattcttagctcagactcagattattgagtgtcaattttggaaacggcaaattcaggttgtaagagtccatggatatgaggctgatgatgtggtggctaccttgaca

SEQ ID NO: 2348 - DNA, 770 bp, Zea mays
tggatccagcgtccaggggcaccgttcacatttattctcagcatagacaagcagcaaagttggtctgcgaccaaaggccattggggacgacccacgatagggaggcagaaatatctctctctactagcctactgggtcttgaacatgtggcggatcaggtcgacgacgcggttgctgtagccccactcgttgtcgtaccacgagacgagcttgatgaagtggtcgttcagggcaatcccggccttggcgtcgaagatgctcgacctaggtgagtggagacagccaagtgacaaaatgaatcagaatatgtccaaacaaattccacaaacgacacaatcagaactcaaacataagcgtgtgctataatggtcagttatgttggattcctaataaatggtgccagagcagagagcccatacctgctgtcaccggtgaagtcggtggaaaccagatcctcctccacgtagcccatgatacccttgagtgggccctcagaagcggccctgtaaagcaatagtaattatgtcaatgctattactgtcaatcctaaccgaagcagatggagaaagtactatgtatgatcaagacgatgcagaaaacagacaacattgagcatcaaatgtgatagtagaaataaatccaacaaggaatgttattgcattcatagacattggtttataaaaaagaaaaagaaattacactcacactgactgagtattaattaaaaatatataagcttacttaatagctttcttgatttcctcgtagga

SEQ ID NO: 2349 - DNA, 468 bp, Zea mays
  misc_feature (382)..(382): n is a, c, g, or t
agaccggatctccttgatcaacctgacaaagagatactttagacatggttctaaaaagttcaagtttgcgattgcttgaattgatatatacacgggagtactatcataattttttgaagttgatatatacacgggagtacttggacatggttctaaaaagttcaggtttgagattcatgtacatttgaaaaagttccacttacttgttaacatcagaaagtgatgactgcatgcttactaggtttgccatcagctccttagcagccccagcatcgacattcttcacaaacaaactaatgtatttagaatgatatatatctgaaacatgtggtacatatatgcaaggcacatgtgaaaaaaaggaagtacctcatagtcatancgtgagtaataatggcgaccatatgtggcccaatgctgacggacaatatcttcaacagtgacaagcttatctcctccaaggttgtc

SEQ ID NO: 2350 - DNA, 376 bp, Zea mays
atgttgatggctctgtgtccaagaaccagggcatccgatacctcttcggagatggttcacgactggtatgtagacctgtattgtttcagatatcctctattttatgtcttgaaccaaaacaaagggtctggggtgaaaaccttgttccgcggtcaactgtacatcttttttttgcaatattatcagtcagtacatgataagtctgagccttggtcatggatatatttgagatatctgactatatcatactggccacaagttgtgctggtgagctaacatggatttttggcgttctaggtgttccgtctctccggaaccggttctgttggtgccaccatccgtgtctacatcgagcaatacgagaaggattcctcca

SEQ ID NO: 2351 - DNA, 751 bp, Zea mays
caccacctgaaggcatttgcctcgtatatcttgtttgtccttttctttttgtagtgtcaaagtatcataatttgatatcttttgttgttccttacagtccgttatcaaaaagaagtatgggcaagatgccacgaatgttggtgacgaaggtggttttgctccgaacatccaggttagtttctgatttcacagttggggacatctgtttttttatttgtttcactttactggaacattggtctttatgtaggtaaaactgaaaacgatgttttgttatgagagttaatctgtttcaatttcctgatactaggagaacaaggaaggacttgagctcttgaaaactgcaattgagaaggctggatacactggcaaggttcaccagatatttgttttgttcagtattcacctgagacttgaagtttgtcatatgtttttcttatctctatctgaatgctaggttgtcatcggaatggatgttgctgcttcggagttttacagtgacaaggaccaaacctatgacctcaactttaaggaggaggtagaccattgttttctttctgtgaacaagttaataaacttgccagacatgtccctaactaaacattctgttttttttgtagaataatgatggttcacagaagatatctggcgatagcttaaagaatgtatacaaatcttttgtgagcgaataccccattgtttcgattgaagatccttttgaccaggatgactgggttcactatgctaagat

SEQ ID NO: 2352 - DNA, 751 bp, Zea mays
  misc_feature (436)..(436): n is a, c, g, or t
  misc_feature (447)..(447): n is a, c, g, or t
  misc_feature (507)..(507): n is a, c, g, or t
caccacctgaaggcatttgcctcgtatatcttgtttgtccttttctttttgtagtgtcaaagtatcataatttgatatcttttgttgttccttacagtccgttatcaaaaagaagtatgggcaagatgccacgaatgttggtgacgaaggtggttttgctccgaacatccaggttagtttctgatttcacagttggggacatctgtttttttatttgtttcactttactggaacattggtctttatgtaggtaaaactgaaaacgatgttttgttatgagagttaatctgtttcaatttcctgatactaggagaacaaggaaggacttgagctcttgaaaactgcaattgagaaggctggatacactggcaaggttcaccagatatttgttttgttcagtattcacctgagacttgaagtttgtcatatgtttttnttatctctatntgaatgctaggttgtcatcggaatggatgttgctgcttcggagttttacagtgacaaggnccaaacctatgacctcaactttaaggaggaggtagaccattgttttctttctgtgaacaagttaataaacttgccagacatgtccctaactaaacattcttttttttttgtagaataatgatggttcacagaagatatctggcgatagcttaaagaatgtatacaaatcttttgtgagcgaataccccattgtttcgattgaagatccttttgaccaggatgactgggttcactatgctaagat

SEQ ID NO: 2353 - DNA, 1130 bp, Zea mays
  misc_feature (53)..(53): n is a, c, g, or t
  misc_feature (55)..(56): n is a, c, g, or t
  misc_feature (1074)..(1075): n is a, c, g, or t
  misc_feature (1078)..(1078): n is a, c, g, or t
acttgtctatatgaaatgcatttgcgtggattcacaaagcacaactcaagccntnnaaacacccaggaacttacattggtgctgtgtcaaagcttgaccatctaaaggtactgttacgaacagactagctataagtctgcgaaagtgtcctcatgcatttgtttaggttttgcaactatgccaagtaatgctgccctagtctattagttcataggcataaacacagattttactttgtgcttacataaatgtttttgctcagtaaacttgtcagtggtattggtcgtcttagactttttggcatgtgtttgttgttggaatataatataagtgaattgtcaaccttctcctatcagcttaagcttttggatagaaagaattggttggtgcatgtaacttaatatggtattaaagacagaggtcatgaattcgaatcctgactagcacaattaaataaaacccaaaagcttaagcttataggaagagatggataattcacttatattatattctaacatttatgactaaactctttgtttgacctgcataaactcccttcacaggaacttggagtgaactgtatagagctaatgccctgccatgagttcaatgagctagagtacttcagctcctcttcgaagtatgtggatttggattacagtatatagatgccatcagttttataggactctggaactgatatctttttgtttcattgagcatgatcgtatatgaccttttcgttctattttccatgatatttcccccatttccagatttgctagtgtgatctccaattttgtgccttacccttatagcttgatcacaactgacttatattcatatattgacacattatttcatataattgttcatccttgtgccaggatgaacttctggggatattccacaataaattttttctcaccaatggcaagatattcttcaagtggcataagagactctggatgtggtgccataaatgaatttaaagcttttgtaagggaggcccacaaacggggaattgaggtaaccaagccaatttaagttaatggctgaatgctaaccgaaatnnaangttccttatatcatttttgacatggagatatgtcactattaggtgatcatgg

SEQ ID NO: 2354 - DNA, 846 bp, Zea mays
cgcacagtttcttgctatccttgctgcaactgactacttgttttcagactcctgaacagttgcacagtgagaaagttccagaaaatcttatccctcataaggttgtgactgctcacttattacttaaattaaactgatgtgtaagtattacacttagagatatatatatatatgtgtcttctgattgagccccctcggttatcctttttaacagacttttaagggcaaccggccatcactaagtttgcttctgcctacactatccgcatatgaggttggacaggttagccacaactcaagaggacattatcaatacatcatttatgcaagtcgttcaatcctcaacaggattttgtgctcatttggggaattaacagtacctatactcttcagcttttatccatctatgagcaccggattgcagttcagggcttcatatggggaattaactcatttgaccagtggggagtggagctagggaaggtatgtgcatgatgttcgtcttgttcagttacatgaactgggccaccattctgcaagtgccatataattttctccccatgctgacatgattgaacttgggacctgattttaattacgttatccctggaatttgatgttttcagtcactcgcttctcaagtgaggaaacagctgcatggaacccggatggaaggaaagcctgttgagggttttaaccacagcacttcaagtttgcttgcacgatatcttgctgtacgctcctttgctatgtcatgtccactaatggtcataataataataaaacccgtaaaattcttaaagtatcatgtctaaagtaaaattggaagcacttaacttcgtcttt

SEQ ID NO: 2355 - DNA, 737 bp, Zea mays
  misc_feature (50)..(56): n is a, c, g, or t
  misc_feature (723)..(726): n is a, c, g, or t
aatacatcatttatgcaagtcgttcaatcctcaacaggattttgtgctcnnnnnnnggaattaacaatacctatactcttcagcttttatccatctatgagcaccggattgcagttcagggcttcatatggggaattaactcatttgaccagtggggagtggagctagggaaggtatgtgcatgatgttcgtcttgttcagttacatgaactgggccaccattctgcaagtgccatataattttctccccatgctgacatgattgaacttgggacctgattttaattacgttatccctggaatttgatgttttcagtcactcgcttctcaagtgaggaaacagctgcatggaacccggatggaaggaaagcctgttgagggttttaaccacagcacttcaagtttgcttgcacgatatcttgctgtacgctcctttgctatgtcatgtccactaatggtcataataataataaaacccgtaaaattcttaaagtatcatgtctaaagtaaaattggaagcacttaacttcgtcttttttttgtaggtcaagccatccaccccgtatgatactaccgtgctgccgaaggtgtaattactcagttgtttttgacatgccaattgctgagttctgacttggcaaggttgagcataagtctttcttcattttgggagttatcacagagccagtttggcagtgctgtagttttggttttacctactcnnnntagaagaaaag

SEQ ID NO: 2356 - DNA, 434 bp, Zea mays
tggaggtcgctcaacaggcaattgacgccgctcatgtggaggctgttagcgccgtcaacggcgtaggcattgtcaaactgatgggaaggagtacaggccatatcgcccttcacgccaccctcagcagtcgggacgtcgactgctgcttgatcccagaggtggatttctacctggaaggcaagggtggcttgttcgagttcctgtacgaacggatcaagaagaaggggcatgctgtcgtcgtggtcgccgaaggagctggccaggaactgattccccggactgacgatcagaagcgggagcaggacgagtccggcaacaccgtcttcctcgacgtaggaccctggctgaagtccgagctgggcagatggtggaagagggaacatcccgacgagctgttcactgtgaagtacattgaccctacgtacatgatccga

SEQ ID NO: 2357 - DNA, 569 bp, Zea mays
ctacctcacagacacacgatccaatcagtgtccacacgcagtgtgtaagagatccacgatcggatccacccacaacaacaatcacactacacttaactaagatgaaattggcacgggcgatcataccttcgggaggcgacgcgacggtatcgtagggcaccaccacctcatccgtaggggtctggatcttgctccactcgatctgctccgcttccccactgcaaaacgccacagcacacataactcggctgacgagtcgatgcgcacaaagcaatcatacagagtgaacctgcgggatctacttctacttacctgaggtagcgtgacacgaggctgatgaacccggacttctcgttctcgctgcgcggaaaaacacactcagaaatcagcaaaaatgggaggcgaagcgatcgggcggcgagatctagtgcggagaggaggggggcactcgcctgatctggtcgagcttggcgacctcggcgcgaagcttgtcgagcttctcgtcgaccgacaccgcggcggtggccatcgtcggggctcgcgaggcttcgaaacgaaaggacgggacg

SEQ ID NO: 2358 - DNA, 776 bp, Zea mays
gccaaaagaatggctcgaaaagcaggtgctctagtatgtctcttattctatgcatgattgcttgtgtattttatggcgctctgtaatttatgttgcttgcgtgttttgtgaattgtgataaatacgatgcattttactatctgtctgcttgtgtgtgctctggttatggtacaaacacgcctgtccagtttagcctattcatgagacttaaccgctcccctggttggaattaattgacaggtcatatttgttgtggacgctagtggtagcatggctctgaatcgtatgcagaatgctaaaggtgcggcgttgaagttgcttgcagaaagctacaccagcagagatcaggtaaacctttacttcatgttgcatatcctgccatgctgaaggtcatcttggattgtgcttcccatttaggatatacatcatttgtgtgtgtggtcgtgtgaatagttcgtataccatcaatgcttattgatctgccttagctttgtgtcttggcatctctctcaggtttcaattattccttttcgtggagattatgctgaggttttgcttccaccatcaagatctatagcaatggcccggaaacgtcttgagaagctaccatgtggtggtggttctcctttagctcatggcctaagtacagtaagaactaagcattgctttgagttttgcaataagctatgtatgatctgataacatagaggtttattcttcaaggctgtcagagtgggtctgaatgctgaaaagagtggcgatgttgggcgtatcat

SEQ ID NO: 2359 - DNA, 418 bp, Zea mays
gtctcttcctacctgaagaaggttggatacaaccctgataagatccacttcgttccaatctctggttttgaaggtgacaacatgattgagaggtccaccaaccttgactggtacaagggcccaaccctacttgaggctctggacttgatcaatgagccaaagaggccttcagacaagcccctgcgtctcccccttcaggatgtgtacaagattggtggtattggaactgtccctgttggacgtgttgagactggtgtcattaagcctggtatggttgttacttttgggcctactggtcttactactgaggttaagtccgttgagatgcaccatgaggctctccaggaggcccttcctggtgacaatgttggcttcaacgtgaagaatgttgctgtgaaggatctgaagcgtgggtatg

SEQ ID NO: 2360 - DNA, 1069 bp, Zea mays
  misc_feature (502)..(506): n is a, c, g, or t
  misc_feature (589)..(592): n is a, c, g, or t
  misc_feature (639)..(642): n is a, c, g, or t
ggtcattcaagtatgcgtgggtgcttgacaagctcaaggctgagcgtgagagaggtattacaattgatattgccctgtggaagttcgagaccaccaagtactactgcactgttattgatgccccgggacaccgtgacttcatcaagaatatgatcactggcacttcccaagctgactgtgctgttcttatcattgactcaaccactggtggttttgaggctggtatctccaaggatggccagacccgtgagcatgctctccttgctttcacacttggtgtgaagcagatgatttgctgctgcaacaaggtatgattccaggaatttctatttattctggttcatgaactgagatgcctgtaaatgtatttcaatagtctagcaatatttatcttctctcagtattactgccttcaagttgaaaatactgcatttgtgctgtgattgaatagctaatgttagttgtatgctagttttgacaaagtgaaacactgattgcttgnnnnntaaaggccatctgcttcctacatgtttatgtatgatagcaatccatctttattacttcgcaagttaacatctttattacctcnnnnattggcataatataatatggttttccaggattttttcccaataggtnnnntgtatttatgatttcacctgtttttagttttttttgtagttggagtacttgcaatgtgtatgtgctgaaagcacaaggaattgcataattaactgttattatatgattgcaatttggtacttattttactttgtcaattagtaggatttgttggcatgcacctgatgagctcttatttctgtatacttgctttagatttttatacagcctgcacttgttagcatgaataaattttggaaatatgtttttctgtctggggattattgttgttgacaccccaagaaatttcatgccataaaaacaagtgtattgggccagttagttttaattagtatgttattgcatttttaatgtttgcttgctgtttaggttgctagtttcattgaactaatcatattgtttgggttttgctgttttacagatggat

SEQ ID NO: 2361 - DNA, 881 bp, Zea mays
gcgccgctgccatgtccgtacctcctgtcccgtccatccaacccccatcttttcctgtacctactccaatctccatgattcgaccaaacaaaaaagagggtcttttatgatttattattatttatccatcttgctggtgacaacgtctgttacagacccgtttcttgatgcagagtcgtggcgttccagctcttgttcatgttcgcgcccgtcaacgacagggacaaatggggccggagcgtcgccaggtacgctgttcttcattccttccttacgtttcgaaactctaatagttgggattcgcttccctcttctcctcggttgttaacttctaccagcatgcgcaccgtgcaggttcatatgcagacacgcaatgggctacttccctatcactctgcatgtggaggactacaagtccttggatcccagcagggcttacggtatgctcccgaaaacctgcttctccattcatggatgctgcagtcatcgtatccattatccaatccataagtgcccacgggagtcgagaaagtatcaacttcagttgctgagtgttaagggaagggaatcttttatttgcagagttggtgtggtgatagtgatggtagtgttgtgcatttgcagtgttcggttatgagccgcactcagtgctgccgataggtctgtcggctcttgctgaccttgttggctttctgcctctcactaagatcaaggtccttgcgagcagtgcggtaagtcagctaaatgccttgacgccaaatgccacaggattcagggactcccctcatgatggttaatttcgaattggggccaggtgttctacaccccgttcttgagacagatttggacatggcttggcttggtacctgcgacaaggaaga

SEQ ID NO: 2362 - DNA, 216 bp, Zea mays
  misc_feature (117)..(120): n is a, c, g, or t
  misc_feature (124)..(136): n is a, c, g, or t
  misc_feature (162)..(164): n is a, c, g, or t
  misc_feature (172)..(192): n is a, c, g, or t
aatgtcataggactcttagatgaaggccaggatatccaactttcgccttgtacctctcaaagaggtcccgcatggcaatgatgaactgtccatggacttcattaatctgtcagcacnnnnaacnnnnnnnnnnnnncttttttaaaaaacttaataaagatnnnttttattnnnnnnnnnnnnnnnnnnnnnccccaacaggatcctcactcatac

SEQ ID NO: 2363 - DNA, 545 bp, Zea mays
  misc_feature (514)..(530): n is a, c, g, or t
  misc_feature (534)..(538): n is a, c, g, or t
cgaactattaatgtgaactatgatggatttgctgaaggtattggcctatttgttaatattgtttgtagttactgttctttagcgtaacgttgcatctaaatcctacacagatgtgagagttggtgatgagctccttgtggatggtggaatggctcggtttgaggtgattgagaagataggaccagatgttaagtgccgttgcacagatcctggtttattgttgccacgtgccaatcttacattctggcgtgacggcagtatcgtccgtgagagaaatgctatgcttcctacaatttcatcaaaggtaaatgcactagcataataaatgtcctactgtaatgaccaaaaaatactgtaagcaaaaccctacaagtctatagcttacctcgcgttacaatggatttacagcttcttcttttttatcaataacatgatcagttcaaaacattgtgcactgaaactcatctctggataatttatcagccatttctaaagaaggctgctacaaaccaannnnnnnnnnnnnnnnntgannnnngaatctt

SEQ ID NO: 2364 - DNA, 912 bp, Zea mays
  misc_feature (461)..(905): n is a, c, g, or t
ggcctccctgctctcgcggtgccgccccgactgcccggtcttcgccttcacgacgtcgacgtccgtcaggaggcggctgaacctgcagtggggcctgatccccttccgcctcgccttctccgacgacatggagagcaacctgaaccgcaccttctccctgctcaaggccaggggcatgatccagtccggggacctcgtgatcgccctctcggacatgctgcagtccatccaggtgatgaacgtaccctgaggtagaagagccttacctttacctccatgccgcatggtcccgtatcggaaggaaggaacacgcgcgttatcggcaccttggaaggacggttccttccttccctgcgcctaaatcgctgccctttgttttcgctgtatcagatgctgctatgctatgctaggctctagtctggcccagggaactgtggcaataatctgtggctttcaggctnnnnnnnnnnnnnnnnnnnnnnnnnnnnnnnnnnnnnnnnnnnnnnnnnnnnnnnnnnnnnnnnnnnnnnnnnnnnnnnnnnnnnnnnnnnnnnnnnnnnnnnnnnnnnnnnnnnnnnnnnnnnnnnnnnnnnnnnnnnnnnnnnnnnnnnnnnnnnnnnnnnnnnnnnnnnnnnnnnnnnnnnnnnnnnnnnnnnnnnnnnnnnnnnnnnnnnnnnnnnnnnnnnnnnnnnnnnnnnnnnnnnnnnnnnnnnnnnnnnnnnnnnnnnnnnnnnnnnnnnnnnnnnnnnnnnnnnnnnnnnnnnnnnnnnnnnnnnnnnnnnnnnnnnnnnnnnnnnnnnnnnnnnnnnnnnnnnnnnnnnnnnnnnnnnnnnnnnnnnnnnnnnnnnnnnnnnnnnnnnnnnnnnnnnnnnnnnnnnnnnnnnnnnnnnnnnnnnnnnnnnnnnccccccc

SEQ ID NO: 2365 - DNA, 466 bp, Zea mays
tgagtggagccttggtggccgtcggtgagcgcgaggaggagggcctccttgaggtaggaagcggagcggaggaaaggcttcccgattgggggaagctgctgattgagccgcgccaatatctcgcgcccgccgatggagttgccgacctcagccgcttttgccgccgccgcaagctcatccagaagaagctgatgttgctgcgccgccggggttgttttcatcgaaccccgtggtggttgcagcgatggttggagctggaagggcgcggtggtatgcagtggtgggaatcgtagaccctgcggcggcggcggcggcggctggagttggttttggaggaggaacagattttcgggcatagagtggtggcgcttcggcgggggcgggagatgtggctggtgctgatggtcagggaaggaggggagcggcatgaaggaggctgctggcaacgcttggtgttgattgagga

SEQ ID NO: 2366 - DNA, 525 bp, Zea mays
tatatagctaagtaaagatagccatcaaactgctaaaagccagaagaggcgattgtcaacggtataaatagagcatctaaatgcaagtcaaaaggcgtttctcaatgttttggtgagtttgagcaccgtgcttgcaaacagaaattattgaatggcatggccatatcccttctcaaaactatagaaccaaaattggacatagctggccagtatttagttgtcagccacttcaattagggtttgctcgtagtcagcaggggcctcaaatccatggaggttcatcacagttgcggctacattggcgagcccagggatttgaatgtcgttccggaatttcactccggggtgaagaccagggcctccaatggcaaccggcacctgcaagttttacagaggcattaacatccaagcaatcaacatgtgtttggttttactaggagataaccaaagacatggcgtcaaatggcattgcactcaccggctgaagggtatgcgaggttagaatctggataccaccattcttgt

SEQ ID NO: 2367 - DNA, 525 bp, Zea mays
  misc_feature (49)..(49): n is a, c, g, or t
  misc_feature (126)..(126): n is a, c, g, or t
  misc_feature (139)..(139): n is a, c, g, or t
  misc_feature (152)..(152): n is a, c, g, or t
  misc_feature (253)..(253): n is a, c, g, or t
  misc_feature (328)..(328): n is a, c, g, or t
  misc_feature (345)..(345): n is a, c, g, or t
  misc_feature (466)..(466): n is a, c, g, or t
tatatagctaagtaaagatagccatcaaactgctaaaagccagaagagncgattgtcaacggtataaatagagcatctaaatgcaagtcaaaaggcgtttctcaatgttttggtgagtttgagcancgtgcttgcaaanagaaattattgantggcatggccatatcccttctcaaaactatagaaccaaaattggacatagctggccagtatttagttgtcagccacttcaattagggtttgctcgtagtcngcaggggcctcaaatccatggaggttcatcacagttgcggctacattggcgagcccagggatttgaatgtcgttncggaatttcactccggngtgaagaccagggcctccaatggcaaccggcacctgcaagttttacagaggcattaacatccaagcaatcaacatgtgtttggttttactaggagataaccaaagacatggcgtcaaatgncattgcactcaccggctgaagggtatgcgaggttagaatctggataccaccattcttgt

SEQ ID NO: 2368 - DNA, 488 bp, Zea mays
  misc_feature (409)..(411): n is a, c, g, or t
  misc_feature (442)..(444): n is a, c, g, or t
  misc_feature (451)..(454): n is a, c, g, or t
  misc_feature (458)..(467): n is a, c, g, or t
  misc_feature (471)..(474): n is a, c, g, or t
  misc_feature (483)..(485): n is a, c, g, or t
tcagtctctggaactctgtatcaacaggggatgggaaatatgtgtcatgttcaatgtttagctcatgaaacatagaagaccccattagaagctattatgtgcttacatttgatttttttatccaagactcaagtgtattaatggctttcccggaccgctgtgtctcctgtgctaaagcaacaccgtcatgtaaatttttcactttaccactgacaagtagggacgccgcagcatttagaacctgtgtaataattaggaattagcctaaagcttataggcaccaaatggcaattgatcattacaagtgcagtccatttctacaatttttaatcagttttcctattttaagcaagtaattcatgaaaacagttttgtaccgaaataatggtaatcaatacactgaattttnnntagcacagctgattaacaagatcttgggtannnaacattnnnnattnnnnnnnnnnatannnnagaaatatnnnatg

SEQ ID NO: 2369 - DNA, 708 bp, Zea mays
atgttcccccggttagaattatagttgctgatggagaagaggatgttactatcaaggtagtagtccttgtcataacctgtcggcaacattctagctacatctattcattgatggaagttcatatcactcttgatgcatgtggcactgtggcagagactagaagtaaattgtgcaacagagtggtgctgaagtttgattattgagtgggtgctcttgttctaattaacgcaggttagcgatgaaggtggcgggataccaagaagcggcctcccgagaattttcacgtatctgtacagcactgcaaagaatcctcctgagctagatagacctaatactgaaggggtaactatggctgggtatggtttcgggctcccgatcagccgactctacgctcggtattttggcggcgacctgcaaatcatctcgatggaaggatacggtatgccatcataatattttaatttaattctcgcatcagacgtcgggacatatatatgactaatgtttcttttcggtcgtgtaggtaccgatgcttacctccacttgtcgcggctgggagattcagaggagcccttgccttgacgacatatttttgtggacctccagtaccactcttctcctgtaactatgtggctcgatcttcttgtaatccagtgctggcctcgacctatatatatatagctatagttggcctcgaccttatttcac

SEQ ID NO: 2370 - DNA, 602 bp, Zea mays
ccgagtcaccaaatccaccacttgagcggccaaacccagaattgccaaatcctccaccgcctgatcggccaaaaccaccaccaccgccacgtccaccaaagccccctcgtgagcgcccatagtttgagccaccatacccaccacctccacccccgaaggagtcaaatccaccacccagcaagtcggatccctcaacattaatttttggaagctgcaaggcaaacgaaaaccaagtgaacataatgcagtgggaacagcccaaaaaaagcaatgtacaacacaaaccacaagcccccacctccgtaaacttgcatcctacgtcacgttcaatgacccgcacagctctactttgttcatagttgtacatcacaattgcagtgcccttcttcccagcacggccagttcggccagatctgtgaacgaatatctctgacgaatttggcaattcgaaatgtatcacctgaacaaggagaaccgcatgagggtacacaacagatgatgcacatggtgattgcaacaaaaaataatggagatagcttagagaaggggaagcacaaaccagatctacatttgggatatccaatccacgagaagcgacatca

SEQ ID NO: 2371 - DNA, 709 bp, Zea mays
tcaagaatcatcatatctatctgtcaaagtatcaacaaacaagtaaagaaatgaaatagcaagaaaagatcgttaatcatataaggtaccagatccatagcaagaatcgcagaacccatgtttgtagttgcaaaaggtacacagaatgggttcatcttcttgtatgaaaccctcaaagcttcaattgcatcactgaaaacctgatcaaaatagaattagaagagaagctaattaaaaaacgatcttttcagcaagtatatcatgtaatgtaagaatctgcaccttcatgccacccatagcagacccaatgaggactccacatcttgatttttccaactcattcatgacttcttcagtgattccagcattctccaatgctttctttccagctgttatcaaatattgcataaacttgtccattcgcttagctagctttggtgcaacccaaccatctgtcgaaaatgatttgatttctcccgcgattctctgtatgaaacatagtgtcgatgaagtacagcatgtttcagcgtaattctacaacaaacctcacatcattaaccatgataagaaactaaataccgtgggatagtgagaacaatcaaatgcctctatctcgcttattccactgataccccttaaaaggttattgtagaattcatcaggatcatgccctagtggcgtcactacacccatgccagtgacaaccact

SEQ ID NO: 2372 - DNA, 629 bp, Zea mays
tgtttgattgctctcttgttttttactttaaatgttaaacacaaatcctaatgcagatcaaaattggtatggatgttgcggcatctgagttccttacaaaggatgggaactatgatctaaactttaagaatcagcctaatgatggagcccatattctctcagcccagcatctgggtgatctgtacagagattttgtcaaggatttccctattgtatcaattgaggacccttttgatcaggatgactggagttcatgggcatcattgcagtcctcagttgatatccaaattgtgggtgatgatttactcgtcacaaacccaaaacgtatagcagatgctattgataagaaggcttgcaatgctctgttgctaaaggtaaccatttactaaacaatctgaaatggagtactatatacccttaatttttttttgcttccttccagttctcaacatcatgactgcaaaacagtatctagctcgagataagcttgcactgcaaaactaaatgtctttgttaaagttggtgtacctttttccaggtcaaccagattggtactgtcactgaatcaattcaagctgctctcgattcaaaagctgctggttggggtgtgatggtcagccacagaagtg

SEQ ID NO: 2373 - DNA, 1016 bp, Zea mays
tctgtataacatattcaggagctagcaggaattaaggagcttgtcatgcctgttcctgcttttaatgtaataaatggaggtagccatgctggcaacaatctggccatgcaggagttcatgattttacctgttggagcaactacatttgctgaagctcttcgtatgggcagcgaaggtaataatgttttggcggttttttataatattgtagggccatcacaaaatgtaggtccttttagttttgtcctaactcaaacttctctaactttaactgaatctatgtaaaaatacattaatatctataattactgtaccaaataaatgcactattgaaacatgtttcatggtggattacatgaaactaatttgttgtctagatgctagtgtatttttctataaacttggtcaaagttagagaaggttgagttggacaaaactaaaattacctacattttggaatcgtgggagtatagcttagttattttatgatcagctagctgactattttgctcttttgtttttttgaggatttttttgtgctcttttacgcatgctataattttttatttcccactgtatttcatgtttgttgaaagtcatctatgttgtatcagtgaatagctatattgggactatttgcttctgctagctggtcacttcatcttctaacctcacttggaatatccttgttctggtaacagtttaccatgtcctgaagagcatcattaagtcaaaatatggtcaagatgcatgcaatgtcggagatgaaggaggttttgctcctaatgttcaagacaacagagagggtcttattttgcttatggatgccattgagaaggcaggctacactggaaaagtgtgatatcatctaactagtttcattggccacttgtttgattgctctcttgttttttactttaaatgttaaacacaaatcctaatgcagatcaaaattggtatggatgttgcggcatctgagttccttacaaaggatgggaactatgatctaaacttaa

SEQ ID NO: 2374 - DNA, 915 bp, Zea mays
ttcttggccgccgagaagcagtggacgatgcttgattggaagcccaggcggcctgacatgctcactgacacttttgggtttggccggatcatacatgatggcctcatgttcaagcagaacttctccattaggtcctatgagattggggctgataggacggcatctatagagacaatgatgaaccatttgcaggtaaggatttgttacatttgaggtgtgagattgttgtggctgaggattggactatgaaaaagtttggatttgatccaggaaacggcacttaatcatgtgaagaccgctgggctgctaggtgatggattcggctccacaccagagatgagtaaacggaacttattctgggtggttagccagatgcaggctatcgtcgagcgttatccatgctggtatggtttgcagcatcgcatgatcttgtttcagttttcttatcgtgatttgagcttgaaataagttgcacccatgttgctatttgtggagacatagaatgactaatgattatgacttatttcctcagagctgggtattgtgtgattagttgaatgatggtttcagttgttcggcaataaatgtgaaaggaaagttccccagtgctttttttgaactgtttgacaataacttgttggaggagcctatatagtttttttagcataaggagcctatatagttgtatgtcactgggcagtttgtagacatctattattgacacagatacactcattgaacctcttgaagtcttgatacatttcctatgttaactaacatatactagaacatttaccttctttgaactgaatgttgatccctcatcatctgggttctactgttatgcgttctaagtcgctcctctattctgctgtaggggtgatactgttgaagtaaatacatgggttagtgcta

SEQ ID NO: 2375 - DNA, 440 bp, Zea mays
  misc_feature (424)..(437): n is a, c, g, or t
cagcagcccctaccaaacctgatttctcatatcatcacaagcatcttcaaaaggaggaatgctgaccaccgacaacccgaaacgcggtgtctatttacattttggttaacctaggtatgattaattatttggggggagcctccaagttcaatgacatgatcagggtaggggttccacaaaccttctgcaaggaggcggctaacgaatcttggctctatcttacaaattgcacacgtcgtccaacaacaggcaatacgcaccgggagcctcttcacaccatcttggatcttgtagctggaccatgctgcgggggagcatcacttggccaaaaaacaccaggcctgccggttgccttgtggctgcattgtcatgagatgtaggcctcaccttacttgtaattttcctcggcgtagatagagacaannnnnnnnnnnnnnctc

SEQ ID NO: 2376 - DNA, 440 bp, Zea mays
  misc_feature (65)..(65): n is a, c, g, or t
  misc_feature (87)..(88): n is a, c, g, or t
  misc_feature (424)..(437): n is a, c, g, or t
cagcagcccctaccaaacctgatttctcatatcatcacaagcatcttcaaaaggaggaatgctgnccaccgacaacccgaaacgcgnngtctatttacattttggttaacctaggtatgattaattatttggggggagcctccaagttcaatgacatgatcagggtaggggttccacaaaccttctgcaaggaggcggctaacgaatcttggctctatcttacaaattgcacacgtcgtccaacaacaggcaatacgcaccgggagcctcttcacaccatcttggatcttgtagctggaccatgctgcgggggagcatcacttggccaaaaaacaccaggcctgccggttgccttgtggctgcattgtcatgagatgtaggcctcaccttacttgtaattttcctcggcgtagatagagacaannnnnnnnnnnnnnctc

SEQ ID NO: 2377 - DNA, 918 bp, Zea mays
ttttggtgagatgtgagttccttccattctccccctccgcatctcctgtttgtccattatatccgtgttgtgttcctagagctgccattagtgtacacatcccttcccttcctttctagtttagcatctcaccgagtgttcgagtgccttatgccaacatctctgtacctacacaggaatctgaaactgatgatgagccggagaaggaagtacgcgagaggtaaacatattccttgctgttaaccatgctggtagatttcatcatgtgaacgtttgttactaattcccctcccatgcccgtctcaactatcaaatagattacctatcaagaaacggctaatgtttcctggcaagacgctgaggaagaccaacgtcaagaagaagaaggcgaccccaaaaccagaagatggcacaaaagccgacaagtctgctgataagccgagttcatccacacaagcagatcttcctgatgaactggaggctgagaaggccatccggaaatcaaccagaacgtcggtcatcgtgaggcaagctgaaagagaagcgatacgtgctgaaaaagaagcaacggccaaggtatgtaccagatgttgcaagttctccaccgctattatcaaatgttgtaattccattgagcatttgagatacttgtgtaggacataatgttgtgctacttggattagttcgtctgctgtggcattttttggaatttgtgttggcttacttgttactctctggctctctgctgtaccttgccagccgattaagaggaaaaaggagggagaagaaaagcggatgacacaagaggagatgcttttggaagcagctgaaacaggtttagactatgtttcacttgtaccgttatccagaaatacacagatggagtttgccagcatgccttttacattttattcgttt

SEQ ID NO: 2378 - DNA, 520 bp, Zea mays
catcttgtggctttaattcttagatattttaccacgaaccatggaaacaagttcaagtgtgcctacctgacggttgctctttgtttagaaatctgaaatgctatggcagaaataaacctgaggcaggactacatatgcctacataaccaatttaattagtataataaataagcagtttacactagactcttgagggacgtttatgcttatgtgaggcttgcttcctgtagataccgtgatccgaagacagggctgccttatgcaactatggaagcatttaaaataatccgggagaggtacattttgtttgttctcatagattcctactttgctctgacagctaagtcgtaaaccacttgcctgcaatgtttcttaagaaaaatactgctttctatctggatgcgcaatcaaaacttgctaacatctcttcaactgatccatgcattcagtttcctgaaagaggaggctgatagaaagcgtccgaacatgtcgaatatgggagagcttttcgaatcaataa

SEQ ID NO: 2379 - DNA, 408 bp, Zea mays
cagggcccaacggtcacttcatgccacctccaatgcctatcccagacatggttcctccctccacattcggtgcttccgccacagccaagatcagcgtcgatgcatcccttgctggcgccatcattgggaagagtggtatcaacacaaagcatatatcccgagtgactggggccaagttagccatccgggacaatgaggctgatcccaaccataaaaacatcgagctcgagggaacgtttgaccagatcaagcacgctagcgcaatggtcacagagttgattgtccgcatcagtggtaaggcgcctccacaagccaagaacaacccaggcagggggcctggttctcatgctgggggtcctgcaagcaacttcaaaaccaaattgtgcgagaacttcaacaaaggctcct

SEQ ID NO: 2380 - DNA, 421 bp, Zea mays
ctcgcatgtgtaacaagtacaacactgccgaaggatgtaaatgggggagcaagtgccactttgctcatggagagagggagcttggaaagcccctgcagatggacaacccgatgggacctcctccaatggggccagggcccaacgggcacttcatgccaccgccaatgcctttcccagacatggttcctccctccacattcggtgcttccgccacagccaagatcagcgtcgatgcatcccttgctggtgccatcattgggaagggtggtaccaacacaaagcatatatcccgagtgactggggccaagttagccatccgggacaacgaggctgatcccaaccataaaaacatcgagctcgagggaacatttgaccagatcaagcacgctagcgcaatggtcacagagttgattgtccgcat

SEQ ID NO: 2381 - DNA, 515 bp, Zea mays
tattacgagaaaagtagatctggtagtgcagaaaggggggcactaattagtcattacatttactaatttacatatagaacgtcagctgatttaggcttattgtatacagatacgatggtgacatgaggttatccaccatacacatgataaagatctaggatagattccaacaacaacaaaaaaaactggaagacacgatgctgttttactgagtgtgcacggattattgctttcagtttccatgatggaagaaatgaaacaccaaaaaagatctacagatggttattttgccttctcagtccggttcatcacatcatggtaatataatagaacacacattggctgcccgtatatgcagaaaaaaaaccaaaagatcatattgccaacctattgaatataccacaaattagacaggttcccataaaaaacgatcctagcaagtatcaactaagaaaaatatggctcaccattgtgtcactgaatttatttttgaggtatgatgtcaatatgatgag

SEQ ID NO: 2382 - DNA, 431 bp, Zea mays
ggactgagaaggcaaaataaccatctgtagatcttttttggtgtttcatttcttccatcatggaaactgaaagcaataatctgtgcacacagtaaaccagcatcgtgtcttccagttttttttgttgttgttggaatctatcctagatctttatcatgtgtatggtggataacctcatgtcaccatcgtatctgtatacaataagcctaaatcagctgacgttctatatgtaaattagtaaatgtaatgactaattagtgcccccctttctgcactaccagatctacttttctcgtaatatttaatattaaaacaatcacaccacacattctactgcctggtgatgatgttatataacatttggtatcacgagcggaatctaagcatgtctgtaatctgatatgtagtagatctgtgatgccctctcactt

SEQ ID NO: 2383 - DNA, 787 bp, Zea mays
cagcagcaaggctatgaaaactcttatgggggtaattgtaatcttttttgcatgtttcagaaaatattcttgtgtctcaaaatgttaacgttttgataaaaatgcaggttatggctccaatatgtatagctcttacggcggatatagtggaccctatggaaataacatgtactcaggttatggaggaggttatggcggtatgtatggaggttctggaatgtatggtggaccaatgtatagcggtggaatgggaggaccctatggtggttatggtatgggcatgagtccttataatcagggaccgaattcatttgggccacctaccccaccccctggtttctgggtgtccttcctacgagtggtaatatatgttattttatctagttactgctgatgcagatgattactttcaattgaccatccacacaactctgcataaataagatcttttacagtgcattaacagctgttttcaaatgctttccagaacttagattgcagttgtaccccatagtccctggcttgccatgattgttacacacatggtgaagcaacacatttcgtattttacctgcattattggaacatatattttgctaattcaataccaaattccatgtagtgactgcgtatcgtgttcatgacgctttgcatcagttgatttaaaaatatctttcacaggtgacaggactcatcgttctcctaaccagatctcttcttaattacagatgcatggtgttgtgaatttctgtgggagggttagcttccttgttagccagaacactca

SEQ ID NO: 2384 - DNA, 409 bp, Zea mays
cctccttcaaccttggtgcggctatcctaagtgacaagttcctcatgccgacgccgatgaaggaggagaccgccgacgtcgagttcatccagaagaggaacgcccccgctcctgctgagccagagctaatgctaaacaaccgggtgtacacctgcaacaacgtccagtgcccgcacagtgactacagctatggattccttgaccggaatgcccgcaacaaccaccagtacacctgtaagtacaacgatccgatcactcagagcgccgagaacaagcctctgccagcaccgccgcaaccacaagccttccagccggccttcagccaagccaatcaggcagtgaacaatctggacttcagcctgcctatggacgggcagaggtccatcgccgagctgatgaacatgtacga

SEQ ID NO: 2385 - DNA, 413 bp, Zea mays
tgtttagcattagctctggctcagcaggagcgggggcgttcctcttctggatgaactcgacgtcagcggtctcctccttcatcggcgtcggcatgaggaacttgtcacttaggatagccgcaccaaggttgaaggaggttgggtcagtgactgctgtcttctggttgccagcctcatcccccttgcactcatcaacgatgtccacgtcgtactcgcttgaggtggtgttgaaagatatggcactggcgatgccaccagtggatgccggcgggcgtgcgccagggtgcaacttcaggtacagctcctcttcctgcttgacgaccgccagccaggtcgagatctccttggcagtcatcttgtcctggaggcacttggactggcgaacgaggcgacggatcttctctatgtctggt

SEQ ID NO: 2386 - DNA, 378 bp, Zea mays
gatgtgttccatgcgctctactgcataatggagaaggaaggggttggcggcctgtacaaggggctcggaccgagctgcatcaagttgatgcctgcagcaggcatctcgttcatgtgctacgaggcctgtaagaagatcctggtcgaagacaatgaggatagtgagtgaagctgaagcatgtatgcccctgaggaggggtatgactgatgtgccaggctagaagaggtttgggttgggttgggttggggagtataccctagtattatcaactgatgaaaatgtagatccaagatatttgaacgccctttagatcataatttggttcagttttgtgttgaaatccataaacaatacacttacttgatggtgcatgttgca

SEQ ID NO: 2387 - DNA, 1459 bp, Zea mays
  misc_feature (270)..(270): n is a, c, g, or t
  misc_feature (272)..(272): n is a, c, g, or t
  misc_feature (356)..(356): n is a, c, g, or t
  misc_feature (358)..(358): n is a, c, g, or t
  misc_feature (366)..(366): n is a, c, g, or t
  misc_feature (371)..(378): n is a, c, g, or t
  misc_feature (383)..(384): n is a, c, g, or t
  misc_feature (409)..(409): n is a, c, g, or t
  misc_feature (413)..(413): n is a, c, g, or t
  misc_feature (415)..(416): n is a, c, g, or t
  misc_feature (418)..(420): n is a, c, g, or t
  misc_feature (428)..(435): n is a, c, g, or t
  misc_feature (438)..(441): n is a, c, g, or t
  misc_feature (443)..(450): n is a, c, g, or t
  misc_feature (455)..(458): n is a, c, g, or t
  misc_feature (463)..(468): n is a, c, g, or t
  misc_feature (482)..(489): n is a, c, g, or t
  misc_feature (491)..(498): n is a, c, g, or t
  misc_feature (502)..(508): n is a, c, g, or t
  misc_feature (515)..(525): n is a, c, g, or t
  misc_feature (529)..(531): n is a, c, g, or t
  misc_feature (533)..(533): n is a, c, g, or t
  misc_feature (543)..(553): n is a, c, g, or t
  misc_feature (555)..(559): n is a, c, g, or t
  misc_feature (563)..(567): n is a, c, g, or t
  misc_feature (574)..(580): n is a, c, g, or t
  misc_feature (583)..(583): n is a, c, g, or t
  misc_feature (585)..(585): n is a, c, g, or t
  misc_feature (588)..(590): n is a, c, g, or t
  misc_feature (594)..(597): n is a, c, g, or t
  misc_feature (600)..(600): n is a, c, g, or t
  misc_feature (602)..(613): n is a, c, g, or t
  misc_feature (618)..(621): n is a, c, g, or t
  misc_feature (627)..(630): n is a, c, g, or t
  misc_feature (632)..(635): n is a, c, g, or t
  misc_feature (639)..(643): n is a, c, g, or t
  misc_feature (645)..(645): n is a, c, g, or t
  misc_feature (651)..(665): n is a, c, g, or t
  misc_feature (667)..(668): n is a, c, g, or t
  misc_feature (676)..(685): n is a, c, g, or t
  misc_feature (687)..(687): n is a, c, g, or t
  misc_feature (689)..(692): n is a, c, g, or t
  misc_feature (694)..(694): n is a, c, g, or t
  misc_feature (696)..(696): n is a, c, g, or t
  misc_feature (700)..(701): n is a, c, g, or t
  misc_feature (703)..(718): n is a, c, g, or t
  misc_feature (726)..(733): n is a, c, g, or t
  misc_feature (735)..(742): n is a, c, g, or t
  misc_feature (745)..(745): n is a, c, g, or t
  misc_feature (751)..(758): n is a, c, g, or t
  misc_feature (763)..(763): n is a, c, g, or t
  misc_feature (774)..(775): n is a, c, g, or t
  misc_feature (780)..(781): n is a, c, g, or t
  misc_feature (786)..(788): n is a, c, g, or t
  misc_feature (790)..(790): n is a, c, g, or t
  misc_feature (793)..(807): n is a, c, g, or t
  misc_feature (819)..(822): n is a, c, g, or t
  misc_feature (829)..(831): n is a, c, g, or t
  misc_feature (834)..(836): n is a, c, g, or t
  misc_feature (842)..(857): n is a, c, g, or t
  misc_feature (862)..(873): n is a, c, g, or t
  misc_feature (875)..(884): n is a, c, g, or t
  misc_feature (886)..(888): n is a, c, g, or t
  misc_feature (890)..(912): n is a, c, g, or t
  misc_feature (915)..(919): n is a, c, g, or t
  misc_feature (925)..(931): n is a, c, g, or t
  misc_feature (933)..(934): n is a, c, g, or t
  misc_feature (936)..(940): n is a, c, g, or t
  misc_feature (943)..(963): n is a, c, g, or t
  misc_feature (966)..(967): n is a, c, g, or t
  misc_feature (969)..(981): n is a, c, g, or t
  misc_feature (983)..(991): n is a, c, g, or t
  misc_feature (993)..(994): n is a, c, g, or t
  misc_feature (996)..(998): n is a, c, g, or t
  misc_feature (1000)..(1004): n is a, c, g, or t
  misc_feature (1006)..(1008): n is a, c, g, or t
  misc_feature (1010)..(1023): n is a, c, g, or t
  misc_feature (1027)..(1027): n is a, c, g, or t
  misc_feature (1029)..(1035): n is a, c, g, or t
  misc_feature (1039)..(1039): n is a, c, g, or t
  misc_feature (1041)..(1046): n is a, c, g, or t
  misc_feature (1048)..(1060): n is a, c, g, or t
  misc_feature (1063)..(1065): n is a, c, g, or t
  misc_feature (1070)..(1072): n is a, c, g, or t
  misc_feature (1077)..(1087): n is a, c, g, or t
  misc_feature (1091)..(1101): n is a, c, g, or t
  misc_feature (1103)..(1108): n is a, c, g, or t
  misc_feature (1116)..(1118): n is a, c, g, or t
  misc_feature (1120)..(1124): n is a, c, g, or t
  misc_feature (1130)..(1136): n is a, c, g, or t
  misc_feature (1138)..(1148): n is a, c, g, or t
  misc_feature (1151)..(1156): n is a, c, g, or t
  misc_feature (1158)..(1167): n is a, c, g, or t
  misc_feature (1169)..(1170): n is a, c, g, or t
  misc_feature (1172)..(1175): n is a, c, g, or t
  misc_feature (1180)..(1190): n is a, c, g, or t
  misc_feature (1192)..(1194): n is a, c, g, or t
  misc_feature (1196)..(1201): n is a, c, g, or t
  misc_feature (1203)..(1205): n is a, c, g, or t
  misc_feature (1207)..(1209): n is a, c, g, or t
  misc_feature (1211)..(1213): n is a, c, g, or t
  misc_feature (1215)..(1221): n is a, c, g, or t
  misc_feature (1223)..(1223): n is a, c, g, or t
  misc_feature (1227)..(1227): n is a, c, g, or t
  misc_feature (1229)..(1235): n is a, c, g, or t
  misc_feature (1237)..(1246): n is a, c, g, or t
  misc_feature (1249)..(1254): n is a, c, g, or t
  misc_feature (1256)..(1258): n is a, c, g, or t
  misc_feature (1262)..(1280): n is a, c, g, or t
  misc_feature (1283)..(1291): n is a, c, g, or t
  misc_feature (1295)..(1297): n is a, c, g, or t
  misc_feature (1300)..(1312): n is a, c, g, or t
  misc_feature (1316)..(1316): n is a, c, g, or t
  misc_feature (1319)..(1333): n is a, c, g, or t
  misc_feature (1335)..(1335): n is a, c, g, or t
  misc_feature (1339)..(1340): n is a, c, g, or t
  misc_feature (1342)..(1345): n is a, c, g, or t
  misc_feature (1348)..(1348): n is a, c, g, or t
  misc_feature (1354)..(1357): n is a, c, g, or t
  misc_feature (1359)..(1373): n is a, c, g, or t
  misc_feature (1378)..(1394): n is a, c, g, or t
  misc_feature (1396)..(1400): n is a, c, g, or t
  misc_feature (1402)..(1413): n is a, c, g, or t
  misc_feature (1415)..(1420): n is a, c, g, or t
  misc_feature (1426)..(1430): n is a, c, g, or t
  misc_feature (1432)..(1432): n is a, c, g, or t
  misc_feature (1440)..(1444): n is a, c, g, or t
  misc_feature (1448)..(1450): n is a, c, g, or t
  misc_feature (1452)..(1454): n is a, c, g, or t
cgtccgtccagcagagagaagcgaaggcgttggccctgccagccaagccagactagtgcaggggtcgtagaggaaaaaataaataaataattaaataatttttgacgcagatgagatgggaaatcccagcttgacactttgttagggtattgtgcttgataaaaaatatggcaccaggtgaatctgaggtgccagtaaatcttggatgaattctgccgcacgcatccgaccggatcagcagaaacttgtctccacgccatgatctgaagnangctatagcgcaccgcgagccgcgtcgcgttcaacaacgcatcagcagagagtgtgctaaaaggagccagtctcataggtcgacngnaggaatgncgtannnnnnnngcggnnttgcggcggcgacgaggattactgncttntnncnnnctaatttnnnnnnnnttnnnntnnnnnnnntcatnnnnttttnnnnnnggtttttttgtggnnnnnnnnannnnnnnntgtnnnnnnncccaaannnnnnnnnnntgcnnngngcgctagccnnnnnnnnnnncnnnnntttnnnnngattttnnnnnnnttntnttnnnacgnnnnttngnnnnnnnnnnnnaactnnnnccactnnnntnnnntgcnnnnncnataatnnnnnnnnnnnnnnngnngacctaannnnnnnnnncncnnnntngncggnncnnnnnnnnnnnnnnnnctggattnnnnnnnntnnnnnnnnctnccttgnnnnnnnntaatntctggggggcnnggatnngatannntngtnnnnnnnnnnnnnnncgtttcctacgnnnntccgaannntcnnnaactcnnnnnnnnnnnnnnnntcccnnnnnnnnnnnnannnnnnnnnntnnntnnnnnnnnnnnnnnnnnnnnnnnctnnnnncccttnnnnnnncnncnnnnntannnnnnnnnnnnnnnnnnnnnctnncnnnnnnnnnnnnntnnnnnnnnncnnannnannnnntnnngnnnnnnnnnnnnnnttcncnnnnnnntttntnnnnnncnnnnnnnnnnnnnctnnnctttnnntccgnnnnnnnnnnnttcnnnnnnnnnnncnnnnnnctatttcnnntnnnnntctctnnnnnnntnnnnnnnnnnnccnnnnnntnnnnnnnnnncnngnnnnttctnnnnnnnnnnngnnnannnnnntnnngnnngnnntnnnnnnncnctancnnnnnnnannnnnnnnnntgnnnnnncnnncccnnnnnnnnnnnnnnnnnnnttnnnnnnnnnctcnnnccnnnnnnnnnnnnncccnctnnnnnnnnnnnnnnncntttnnannnnaanttcctnnnntnnnnnnnnnnnnnnnccttnnnnnnnnnnnnnnnnntnnnnntnnnnnnnnnnnntnnnnnncgtctnnnnntntccccaannnnncccnnntnnnctcct

SEQ ID NO: 2388 - DNA, 897 bp, Zea mays
  misc_feature (757)..(757): n is a, c, g, or t
  misc_feature (760)..(761): n is a, c, g, or t
  misc_feature (793)..(797): n is a, c, g, or t
  misc_feature (803)..(809): n is a, c, g, or t
  misc_feature (821)..(823): n is a, c, g, or t
  misc_feature (825)..(830): n is a, c, g, or t
  misc_feature (834)..(843): n is a, c, g, or t
  misc_feature (859)..(859): n is a, c, g, or t
  misc_feature (866)..(867): n is a, c, g, or t
  misc_feature (870)..(871): n is a, c, g, or t
  misc_feature (879)..(882): n is a, c, g, or t
  misc_feature (886)..(891): n is a, c, g, or t
ttctgtctttttttactgacatattattgtacaataggcatcctactacttgatgttgaagaaaacataacaaacatgtaaatgtttttctttgcttaagttttagttgatcccttaatggtcgtccattgggctgtcactgactctctttgcctgaatagagtatgggtggatcggagtacactaaaatcagaagggctttttagaattttaagaaaagaaacaatcaatttggaaatccgatgtcgggtcaaatacttgctgcttactttttgaatagtttccattctaacgttgttttggtcataaaatggcaaggggcacaaataggatagtttcttctactttgttttactacattttctgtgagtaccagttttataaaaaaaacttgacctgcggggggtaagacagcccccgggtattgtattaagaataagaccttctcacacaggtcaagaaaacccccgaacccctgccccacacatacacagcggcatcgaagctcatgtgagaacgaccacgaccagggctgagccttagacctatgctttggcgtggaacagacgaggggatttttttaaccacagcctggaaattcgctcccacggggagtcgaacccaggacctgaggagtgctactcagaccacctaaccaactcagctagaggccctttcgcgagtaccagttttatcatatttctctaattctctttatgtttcaggaatggtggcagctttaacaaacgagagtgcnacnngcaaatctgtatattttgctcattgcacgtcnnnnntgatannnnnnnctcatttgctgnnngnnnnnnctgnnnnnnnnnntggccctctgctggcngacacgnntgnnactctctnnnnaggnnnnnntgcatg

SEQ ID NO: 2389 - DNA, 621 bp, Zea mays
aatcgatcttgaacttcacagatccaatggctgatgatatggcagcagcaggagtccatgctgccaaaatgttgacacctggagcagcaatgtctggctgcagaagaaggtgcagggttttttcagcctcccaactagaactggaggtttgatcaacactgtagaggtttgatcaactgtcgaactggaggtttttttttaccttcagaacagcgggggacagagaacttggaccccgagatgagaaatatgcaacttctgggcccatcagttctccaagaatcgtttttgctgagccaaactggactgttggatttctgtgtatggaaaacagaaattattggaaagttgctgacagctacagcatattgctagattgttacgactgttggaacatgtgcggcactgtttgcatacctcgtgctagtggtgtatgcgagtatagctgttccaacctggtagtctacttgaaaacagggaatatcgaatgaagacgcgatgtccttagttaagaactgggcgaagatgactccgacgccacgagctttcttgacagtctccactgccactgcagctgatctctgtgcccttgtttggaagcaaagtaccacagttcccttc

SEQ ID NO: 2390 - DNA, 428 bp, Zea mays
atcgatggtgccagcagcgacggtcacgagccacggcgccgagttgatcaccgtctctgaataaggcccagaatttcctgcagagcagaccacgacaatccctctcgcgacagcatggaaggacccaatggacaggacgtcgtcaacgtacgcggggagcggtggcgcttggcctagggacaccgaaagcacgtcgacgccatcatgtatcgcgtcgtcgaaggcagctaggatatctgccgaagtgcagtctccggtggcccagcacactttgtagaccgcgagcctcgccctgggtgcccctccccttgcgacgccaccggcgagtcccctgaagcttgcaccggctaccagagcaccagcggcggtggaggctgtgtgcgtgccatgcccgacggcgtctctcgcggacatgaactcgtagatgt

SEQ ID NO: 2391 - DNA, 529 bp, Zea mays
ctgaactgtgttgtagttatttgctcgtatgcgtggcaacacattgtctgcaaattccctatatgtgcttactgctggcttttcaccactcatacctacatgggcttcatagatacgtggagcagcaggctttgaaggccgaggatgcttaaatgtgtacctgcaaaccagaggtaaaaggtactataattttgtcatatatttttgtctgctaaggtctattgcttaagtttacaatgtggtccaggacagtagaaagagacctttcagaagcaggaggatcccaatgaacaccatcatagggagctccaaatttagaggcatcaacagtcgcataacgaatcaatgctggaatacgatcaacccatactccaccatgtagaaagcgaaatttaaccttggaattgtgagggatggcaggtttccctttgacatggtcaattttgatcgaccaaacaccaaatttatccttctccatcttatggtttgcaccattccagtcattgaagtcaccaataagctctgcctc

SEQ ID NO: 2392 - DNA, 441 bp, Zea mays
  misc_feature (6)..(10): n is a, c, g, or t
cttctnnnnnacctgagatattggttggatgaattcatgtttgatggcttccgatttgatggagttacatcaatgctgtatcatcaccatggtatcaatgtggggtttactggaaactaccaggaatatttcagtttggacacagctgtggatgcagttgtttacatgatgcttgcaaaccatttaatgcacaaactcttgccagaagcaactgttgttgctgaagatgtttcaggcatgccggtcctttgccggccagttgatgaaggtggggttgggtttgactatcgcctggcaatggctatccctgatagatggattgactacctgaagaataaagatgactctgagtggtcgatgggtgaaatagcgcatactttgactaacaggagatatactgaaaaatgcatcgcatatgctgagagccatgatcagtctatt

SEQ ID NO: 2393 - DNA, 413 bp, Zea mays
tctttgcacattgcagggatttgttttatacgacgtacagatatgggagaagttagttttgagtacaacatgaatttactttaccttgccttgcagggattaatcctagatcaaactcatcttctggtacagaggatacaaacaaggaactgctttgctagcttcttccaaacaattctgcatgctatgccaatcgttctgtctctgtctctctctctaataacaatgacaagaatctcaagtagcagttcaatcaatctgtgcatgctatggagtatgaacaagaatcaattttgatggaaagttagtcggcggtgagagtgagacattcgagcaccctggcccctgtcaggctggcaatttgcccaggtcagctacgttgttagattatagtatacgtgtgcatgcatggc

SEQ ID NO: 2394 - DNA, 386 bp, Zea mays
ttctggtacagaggatacaaacaaggaactgctttgctagcttcttccaaacaattctgcatgctatgccaatcgttctgtctctgtctctctctctaataacaatgacaagaatctcaagtagcagttcaatcaatctgtgcatgctatggagtatgaacaagaatcaattttgatggaaagttagtcggcggtgagagtgagacattcgagcaccctggcccctgtcaggctggcaatttgcccaggtcagctacgttgttagattatagtatacgtgtgcatgcatggccaggtcaggtgccgaggtgttgctgcagcttgctcagatcagacgccgttggatctcgggctggcgccgccgtgttgtgtgtcgacgttgacgt

SEQ ID NO: 2395 - DNA, 413 bp, Zea mays; identical to SEQ ID NO: 2393

SEQ ID NO: 2396 - DNA, 484 bp, Zea mays
gcgttgatccttctgaagtccacatccacgtcagaatggttcagctccatcacatccccacaacagaagacaagataacagaatggatggtagagaggtttaggcagaaggaccagctcctggcagatttcttcatgaaggggcactttcctgatgaaggaactgaaggagatctgtcgacgccgaagtgcctggcaaacttcttaacagtagtatgcttgacggccatctgtttgtacctaactcttttctcatttgtgtggttcaaggtctatgttgtagcaagctgcgcttacctctcatttgttacctattactccatactaccaccccaactgataggttcaccagagggtgatgtcaaggccaaaaaggttgtgtagatgttgatgtaacttgccatgaaaactgtacatccgcaaacgattttttctgctggaatttctgccttgtgacatttaaggttccctttctgcagtaggag

SEQ ID NO: 2397 - DNA, 488 bp, Zea mays
aatggatgatagagaggtttagacagaaggaccagctcctggcagatttcttcatgaaggggcactttcctgatgaaggaactgaaggagatctgtcgacgccgaagtgcctggcaaacttcttaacagtagtaggcttgacggccatctgtttgtacctaacttttttctcatctgtgtggttcaaggtctatgttgtagcaagctgcgcttacctctcatttgttacctattactccatactaccaccccaactgataggttcaccagagggtgatgtcaaggccaaaaaggttgtgtagatgctgatgtaacttgcgatgaaaactgtacatccgcaaacgatttttttctgctggaatttctgccttgtgacatttaaggttccctttctgcagtaggaggtatgaatgtatgatagtgcgtatgtaggaattttctgtgattcatcagtgtgtgagggccctatctgaaggcagtaaactgaa

SEQ ID NO: 2398 - DNA, 686 bp, Zea mays
ttatgtcccaggacctttgttcggcctgttgatccgtaaacgccgacttttcgtatgggacacgacccattacgtcaaatgcaagccctatgcgtccattctcaccctgcaatttatttatcagtatattggagtgtgtgtataataatatcacaatatagctaccttgtaatacttgttgtaaagatcaacagcctcagcgtgggctcggagaaggttatggccaacagtgtatggctcagtgagcgagtttccaattgggttagcacatttttgtcctggggtgcaccgccctggggcgcatagcccggttccgtatgaaaaagaagaaaacgtttgtggctcattaaaggtcaaccaattgtttactttatcaccgaagttctcaaagcacaccttagcgaagtctgtgtaatcttttctgaaaaaatacaaagccgaatgaatgacaattaatgcatgtttctctaatacttagttgtgaaacaacatgaagttaaaccataaacatttattttgtccaaaatgtatataaaaatattttagtccatagtttattataaccataatttttgacaaaactttagaatcatcatcttctcgtcggtattattttgtttaaggaaggagtgaaagcaagttaatgatagatgggagcatattatttcaagtgtatataatactac

SEQ ID NO: 2399 - DNA, 431 bp, Zea mays
  misc_feature (407)..(409): n is a, c, g, or t
  misc_feature (414)..(424): n is a, c, g, or t
aattcagtctctctgttctactctatctctccttctccgtctctttcttctgtgttcttcctccattgctctgtacttattaattaatgcgcgctgccttttcaatcaggggcaagatcctcgaggtgctcaagaactggcccgagaggagcatccaggtcatcgtcgtcaccgacggcgagcgcatcctcggcctcggtgatctcggttgccaggggatgggaattcccgttggcaagctctccctctacactgccctcggaggtgttcgaccgtcagctgtaagtgctgctcacaatgctctttcttaagtattactactactgctatgtaataaacttgtagcactagtcgtagtaggaaagatttggaatcgattttttttcttcagtattactactacttcnnnattannnnnnnnnnnaatgttt

SEQ ID NO: 2400 - DNA, 780 bp, Zea mays
ctggtggcgatgctatgaagcagttcatgagaaaggggctcactgtaagtagcataatcatttgcttcgtgtcttattgtgccacatgcgtaccatggttgtttcttgaatgtaagttttctcatggaagtctgttaacattgaacagcctaggtggtggggcgaccttgatgtcaaccagcacgtgaataacgtcaagtacatcggttggattcttgaggtaatttcttcggggcctgcctcttttcatcgtattcaatggccactgctctggccatgtggtgggtgttgttggagagatctcgctggcatggcttcaaagtttataaagctctgtgtacttgtgcttgtgtaactccttgctgatgaatgatcaattggtagtctggctgggtctgtatttgaaaaaacagacgttgctagtacggttgatcagctgagctgcttcttgatctttgcctagtacgaagcaaagccccttagtgcctgaaccctttttcttcttcttcgcagagtgctccgatcgcgatcctggagaagcacgagctcgcaagcatgacgctggattacaggaaggagtgcggacgcgacagcgtgctgcagtcactcaccaccgtcgcgggtgaatgcgtagacggtgacgcagactccaccatccagtgcgaccacctgctccagctggaaacaggagccgatattgtgaaggcgcacacggagtggcgcccgaagcgggcgcatggtgaggggacccccatggggggtttcccggcggagagcgcg

SEQ ID NO: 2401 - DNA, 344 bp, Zea mays
attcccatgggcagaagacaatcctgtgctttctggaatgcgcttatctgcaaggagagagaaaaatgtgttacaaaagtttcctttttgtgtaaaaaggaaaaaaactatttcaatttacagtgtggtttataatccttacttttgggttaacttgtccttcccaagcaatggaatttatggacatggattccaaaccagcaccaatccctgtttagagggagagcagcgattcagcaggcaaactaaagcacaagagcgaaagtagcatgtatattcagatactaagtacctatgtcatagtaaccagcctttatagcagctgcgacatcggctactgcctg

SEQ ID NO: 2402 - DNA, 539 bp, Zea mays
tatatagagtagtgcttgtgaagaaaaaaaatacggatttcgaatatattacaaatgcagcaggcttatgctgctctaggatggatggtttttctgcgcctctacttcgcatccttagacagaaaattatgtgcctgcatgtccctcacgttggagagtccatccaccgcgtctccccgctcgaacacagctgctgcccccattccagatcctgcaattgtcacgatgcatcacggtcaactacagaagatcaaattacatctatgcgttgacatgctttgcctatacacgttagtatgtgataactgataagtaagactaaccgatacacatggtgacaacaccaaatctgcagtctctgccccggcgcttcatttcatttagaagagtagccacacaccgggcacctgaacatacaaagaatcacaagtttaaccgactttgctcagaaaaaaaaatatagcaggtaagtagatgttccattacctgttgcacccagagggtgtccaagggcaatcgcgcctccatttacatttact

SEQ ID NO: 2403 - DNA, 362 bp, Zea mays
tttaccgcatggaagctcaaaggcaggagatgcacctttaggtgcattttgggcgacacagcatgcacaaggtgctcaagctgtagttaataggaaccctttgtttgatggggagtcaattaaggcatcactgtcatcaaagcagaaccaaagctgggtggacaccagcatcagtattcctggcaataggcatgatcattctggtcagatgtcactgacaagtaaagcacaaaataactctttgtccaataatggtttcagaggtctctctgacacggagatacaaaattctgggaaaagtagagcacaacaacctcaacccgagccaaaatgtgagaaagacccatttaacagctttgttg

SEQ ID NO: 2404 - DNA, 558 bp, Zea mays
cgcgcccgcttcccggcactgcttctcgatgtccaagagccaggaagggtcaaaagggtcggcactgcctatggatgtgagctcgaaatctatctccacatctgcctgttccaacaagaacaaaagtgtgccagattatctatctatctatctatctatctatctatctacatgagaataatgactgaaactaacctgcagagtgtcaatttccttaatctcaaacagatcccccttcctgagctccaggccttggtgtctgacttgttttcctcggagcgactcgatctcttcgaccggccattgcagcagctgcttgctgtctttatccaaccatatagtcctgggaattgcctaaaccaaatcaaaaaattacatgcgtgcgtgttaaattacaaaactacagtatagtcagaagcttacatggattccagcccatcctttggcgacgtcgtctgacgaactgtccgtctcattcgtccagccccatatgaccctcctccctttcttcgagtcgaagaacgacttggaagcgtagtagttgccgtagtcaatcct

SEQ ID NO: 2405 - DNA, 396 bp, Zea mays
aagggtctcatgccttcccctgtcacacccatgcaaacaatgcacaaagcagagaggaagtatgttgttgggaaagtttctgatgaggaggaggcgaaacagaggcagttgaaaggcattcttaacaagctgactccacaaaactttgaaaaactgtttgaacaagttaaggaagtcaacattgacagtgtagcaactcttactggggtcatttcacagatatttgacaaagctttgatggaaccaactttttgtgaaatgtatgctaatttttgcttccatctggctggtgccttgcctgacttcagtgaagacaatgaaaagatcacattcaaaagattgcttttgaataaatgccaagaggagtttgagagaggtgaaagggaagaagctgaa

SEQ ID NO: 2406 - DNA, 324 bp, Zea mays
  misc_feature (98)..(98): n is a, c, g, or t
gcagatgattgtaagaaaaaagttgagcttgatgattgggaagatgctgcagacatgtctactccaaagctggcaccagattctggaaatcaggctgncaccacccaagtgctagattcagatacaagtgaagcaaacagcaggaagaaatattcacgggattttctgttgaccttgcaacaccactgtactggtcttcctgttggatttcagatgaatgaagctgtcaatgcaataatgaataatttggttggaaagtcttatgttgttgaccgggaaccttaccctagtcctggaaggggtttggaccgcccaacttctcgt

SEQ ID NO: 2407 - DNA, 922 bp, Zea mays
taatggacgatgctgatgttgaccatgctgttgagcttgcgcactttgccctgttctttaaccaggtatttgtcggtgtaatgtcagaatgagcatgataactgtgttttcagtttcgttctacctaaatatctttcttgtcgtatgaatttgtcagggacaatgctgctgtgctggatctcgcacgtttgtacatgagcgtgtttatgatgagtttgtggagaaggccaaggctcgtgcattgaagcgcgtcgttggtgatccgttcaggaaaggtgttgaacagggcccgcaggtacatctctgaattggatatttaatgagttacttagttacaacctctacattgccagccatgaattccatggagctcctataagtttgacatatcattcgcatagtatctgcttcgccggtaaactcataaaaaaaattctatgttcaaccaacgagccattactttgccaattttattctgatataactgatacaaattttaaccattccttcgatcaactaaagccatacaatagaatcttgaaagtttcatctatcgaggttgacgatgttcactaacgtgacactacattttctccgcatttggactgatgaaaacatgcaaattttgtctcttcctagattgacgacgagcaattcaaaaagatcttgcgctacattaggtatggtgttgacggtggagctacccttgtgacgggtggtgataggttgggtgacaagggtttctacatccagccaacgattttctcagatgtccaggtgagctgtgactgcatccaagtaccagtacaaaatttctgtctcttgcaagatatgcttagtgttccattagaaacaaagaaggatatatttaaagttcgttacatggctgttacaggacggcatgaagatgctcaggaggaga

SEQ ID NO: 2408 - DNA, 903 bp, Zea mays
ttgattgctcgtcgtcatctaggaagagacaaaatttgcatgttttcatcagtccaaacgcgaagaaaatgtagtgtcacgttagtgaacatcgtcaaccttgatagatgaaactttcaagattctattgtatggctttagttgatcgaaggaatggttaaaatttgtatcagttatatcagaataaaattggcaatgtaatggctcgttggttgaacatagaattttttttatgagtttaccggcgaagcagatactatgtgaatgatatgtcaaacttataggagctccatggaattcatgggtggcaatgtagaggttgtaactaagtaactcattaaatatccaattcagagatgtacctgcgggccctgttcaacacctttcctgaacggatcaccaacgacgcgcttcaatgcacgagccttggccttctccacaaactcatcataaacacgctcatgtacaaacgtgcgagatccagcgcagcagcattgtccctgacaaattcatgcgacaagaaagatatttaggtagaatgaaactgaaaacacagttatcatgcttattctgacattacaccgacaaatacctggttaaagaacagggcaaagtgcgcaagctcaacagcatggtcaacatcagcatcgtccattatgatgaaaggggacttgcctcctaactccagtgtcactgtcttaaggttgctctttgcagccaactcgagaataatttttccagtatcggtagatccagtaaatgcgatctttattgaaggaaagaaataaatgtttagtcgaaaggtatagtttttcagaccattctctataaatgcatacaatatagtttaaaggtgtatttaccttatcaacatccatgtgactagcaagagcagcaccagca

SEQ ID NO: 2409 - DNA, 1103 bp, Zea mays
agcggcccaccgaacccgcctagggattcctaccgagggaggccgcacgcagccatggatttcctgcaggagcaaagcgtcgagaccacagtggccgtcgccgtcgctgtcgccgccgtcgccgcaggcggcgccttcctcctccttcgatccaggaagcccaagggtatggacatgtgtgcaccctactagtctagcagttgtgcggtcgcgagatgcctctggttcgcgtaagatctggttgccaatgggctccgcgctttcatcagctccagtggaattagcgtgctagttcagttatctcggggaaatgactggggaaggggttccagcgcgtcgtcgcacacagtatagttcttttaattattatctggactccgtctgtagagtttctacttgcagcctccaaggcagtagttgttgggggcaaacatcaaatgaaaaggaaaacgagcagaagtttatgcccatggagttttgcttgtagatgtagtaggctgtcagtgtcaatcaaatatagttaagtttaacctgctttcactatctggcaagcatctgttctggctgactgctccatttctgagtggcaggggtggagttttgagtttattttccttgaaaatgtcttattatctctgattggagcatgttattgctagaaaaagactccctccgttccaaaatataagtcgctttgattttttttatacatagattttgttacgtatctagacataacctagccaaaacgacctgtaatttggaacggatggagtgtctgttgcctaactgttctaaccacaggatgtaacagatggtctctgttattacctgcgtggtacgaaatgtctgctactgttgctgtttttggttctgatgtgattttagtgaccgaaagccttattatgtgcaatatagttgtagtttcattgtttattcttgcttctgaaccgtctataagtattagttcttggcaggacatgataatttattcctggcatccattagattttttgtttatcacccaaaaaatatttgtgcttaagtttgcttctgcaattcaaggttaatgcgttatagctcaatttgattgttgtgctgtg

SEQ ID NO: 2410 - DNA, 424 bp, Zea mays
tgttggtagtttacttggctcctattactacttttgctgtgcggctgttcagtgtgcattacagccgaaaggcgacttcctttctatttggaatgtggttatctttatggccgtttttgtttgagaagataaacaaaaccaaggttgtcttctccggtgaaaatgtgcctccaaaacgacgtgtattgttatttgctaaccacaggaccgaggttgactggatgtacttgtgggatcttgcactgaggaaaggccatttaggatatatcaagtacatacttaagagcagcttgatgaagttgcctatttttagctgggcatttcacatttttgagtttatcccggtagaacggaaatgggagattgatgaagcaattattcagaacaagctatcaaaatttaagaacccgagagatcctatctg

SEQ ID NO: 2411 - DNA, 1073 bp, Zea mays
gctggtaaacccccactacagttgcatgttatatagtccgcaatggcatgtcactggctcactgcctcgctgccagtggcaacctcacaatctgtagatggtcattgtgtttgctcaataaggaaaaaagtttcttactgtcatgggaaattggtgttttgtgtaaagcttgttagaaaacagggttgtgccagtgacccaggttacaaaaggcaagcaagtgtcatgtagaatcttgattttgccaactcatgatcttgcagaaccaatcaaacagtattacgaatttatctattccccagcttcgctggccattttgccgagattgaaaatgctaaatacaaagcaagacatctgttttgagtgaaccgaagaggtcatgggtttacatcagaatgatcgcatattagtttgtgtcccatactcaattgccagttgtgggggagggtggtggtcatgtttttggggttatatgagagcgcataagaggtcactgtgccggtgctatatgccttattaggagtactaccgtgtgaaacctctggcagttgttgcattgcagctgggagctcttccttggtacttatggttgaatctgtttcccattccatagctcaatgaatccgtttttttttgccgaatgtgcatcctataaatgtattgatatgtcttctgggctctggccactgactttctattcccactgatggagcaggtgaccctgttttggtcgtgcctgctgttgtttggtgccatcgagttcttcaagtggacgcagctcctatcgacatggagaggagtggcattcactgccgcagggatggcgctcgtgacaggggtcatgcacgtcttcatcatgttctcccaggctgagcggtcgagctcagccaaggcggcacggaaccgggtcaagaaggaatgaaaacggagggtggagatgtgattctgggctctatttatggctagctttcaaaatgactcgattcatattaatgtatacagcaccaaattccagacattgatatgctctgaaacaggatgctctgctcctcttgtatttgtgtgcaggaaag

SEQ ID NO: 2412 - DNA, 423 bp, Zea mays
  misc_feature (386)..(386): n is a, c, g, or t
catagaaaaaaaaaccgaattaggtttttaagacagctagcttttgatacatgtgtgtgttatctcaatattatgagggctccaaaagagtatgatgggtagctcgagtaaatcgaattaaattattttttttactggcagatatctggaacagtttacaaatatatgaaacatttgtcgccagcacgtataactctaattattttgataatcaccacctgtttctgcatttggcaatgacgactgcaaattttgcccggcagctaccagaaatgttgaaggatccattcggacggaagaagcgtctgtgcttgcgaagaacattgactgggccttggtgatgactatctgaaacagcagacgagtcgcgctgcatacctgcagtngtgcctgggatctgtacacaatttgtctcctatagac

SEQ ID NO: 2413 - DNA, 546 bp, Zea mays
actgggccttggtgatgactatctgaaacagcagacgagtcgcgctgcatacctgcagtggtgcttgggatctgtacacaatttgtctcctatagactagcgatggacgtagtggggatgattgtactgttaccgcttagggcttgttcggttagctctcaatccatgtggattgagcgggattggatgggtttgaatcccaaacaagtcaaacttcttcacaattttttccaatcccatccaatccatgtgtattgggaataaccgaacaagcccttatagtggagtcgggaaactgacacatgtgtagattatgttagtagagaaccaaatggagtgaagccggccgcgcaagactcggcggcttcagccatcctccagagcttgtgtagagttgcctagctttgcatcttgccggaagcagcacatcgtgtagagattggacggttttaaaggatcggtggctgggtgtaagtaggttggtgggattacaagcatgggcatggcgacgttcaggatgcaaccggcttgacgactgtacatctg

SEQ ID NO: 2414 - DNA, 627 bp, Zea mays
aggggagccctcttgagagtgagtctggctgcgtagacagcagaagcagcgaccagcgatggcaggcgcgtcaccaaatcgtattgcatcagcgccaattcagcgaagaagaacaccatattctccatctgcagcattccccaccgggcaagataaatgtaagctcttgattggtgaatctctgattggctggctagccatgccgacgaaatttgtttacctctttctcaactttgccgcccaatgttgcggccttcagaaaacggacaaggaacatatacactgtagggacagtcaggttccactccagcctattcagaattcccttctccatcgaaagaatctgttctctactgtatgcactgtctgatatgaggatgaagtcgttcacctgaaaaaacacatatgaatatgaatcttagaagagaagtagcacactgagaacatgggaacagagagagatgaaaagctttctgtgcgcacctctggggcccaaatctcctcgtacttgcaggcgatcagcatagatgaaacgccgacaagctgcagctccttacgcaggactggttgcagcgagaggtactgatcgatgatgtacatggtcaggtagagagtttcgggcatcag

SEQ ID NO: 2415 - DNA, 1462 bp, Zea mays
  misc_feature (1086)..(1087): n is a, c, g, or t
  misc_feature (1298)..(1301): n is a, c, g, or t
  misc_feature (1315)..(1321): n is a, c, g, or t
  misc_feature (1380)..(1384): n is a, c, g, or t
  misc_feature (1392)..(1397): n is a, c, g, or t
  misc_feature (1400)..(1400): n is a, c, g, or t
  misc_feature (1418)..(1423): n is a, c, g, or t
  misc_feature (1425)..(1434): n is a, c, g, or t
  misc_feature (1436)..(1440): n is a, c, g, or t
  misc_feature (1451)..(1452): n is a, c, g, or t
tacgacttgagctactgataaagtattgtgtcttttggttccattgcacacaccctggcttcaaacattgcctaccggaatgacaccaacaatatgcagtttaccttggtatgcattcaccttagctcctgcccttacatttttgttgttgtatagatcttcctattttaacaatcattttgctatgccattgtatatccactgtatacacttaggtggctatgacaaggaggacaaggcagcaagggcttacgatttggcagctctcaagtattggggcactacgacaacaacaaatttccctgtacgcaaagttctatatggtgtttctttgggtgcttataacagaagcattttgacttgttttttaaacactatatatattaatctttgttcttgaatttatttttttgccaaaatttcattgttgcagataagcaactacgaaaaagagctagaagaaatgaaacatatgactagacaggagtacattgcatacctaagaaggtattattttgatgcttgtgtccttctcattggttcacttccatgaatgatttgactaacagttaatatgatcttatacattcagaaatagcagtggattttctcgtggggcatcaaagtatcgtggagtaactaggtaattaaacttcactagtaggcaatgtatgatttgtgtgcatacaaaaaaattgtccttttatttcacattatcattagatgcctgttgtgggaaaaacataactttacaagagatttatggaacttgtttttgtttcctttttttatattgacatcaatgttgttaatcgatcagacatcatcagcatgggagatggcaagcaaggatagggagagttgcaggaaacaaggatctttacttgggcacattcagtaagctagctagctgccttcttttcttgtttgtttgttttgagaactcagtgaagctagcacccattgattagtgattaatgcaactcataaaacctaattgctcggttaatggtgatccttaggttagttaatgactagctcatagtgttatatagtatgtccccaagatataagtcatctcgcccnntccgtacttgtttagtcaaatttcttgaaatgtttgtctggtagaattgaagattggatattctatatgttgctctatgggagcataaaatagtgactactccattatctatgtcccaaatgtgcctttccgagtgtttgtcttaaagttgtctgagaaaatcggggcatgcggtcaaaggggtagagcagaaatcctaagtgctttgaannnnacaatgtgcatacnnnnnnnggcatgcatgcaataggcgacatataggatatatgagacctagcctgcattggggaacnnnnnccgtaatnnnnnntcnagaagggaagggcagagnnnnnncnnnnnnnnnnannnnnagaaggcaaanncagagaggtg

SEQ ID NO: 2416 - DNA, 566 bp, Zea mays
  misc_feature (546)..(551): n is a, c, g, or t
cagtgcttttactgtagcatatttgaaaacctttctatacttcttttattttctccaaagtaatttctcataattcatttactaaaacgtttatgccttgatcttgtgcacacagaactgcaagataaaccattctgtagttggactccgatcttgcatatctgaaggtgctatcatagaggacagtttactaatgggtgcggactactatgaggtaaatatatacgtacaagtatatactgctgtcaatgcaacaatagagctcacacagctgtgttctttttttccagacagaagctgataaaaaactccttgccgaaaaaggtggcattcctattggtattgggaaaaattcatgcatcaggagagcaatcattgacaagaatgctcgaattggagacaatgttaaggtattccaaactgatgttccaacggtcaagaatattaatttagatttttccttaggatattacataatacttgatatgccattttgtcctcttatttttaacatttatttttgaaaatattaacttgaaaatatgnnnnnncttgcatgctctttt

SEQ ID NO: 2417 - DNA, 412 bp, Zea mays
agctgcagagagggaccattgattggtgagcgagggcagccatggcggcagatggagatggagagggaggggggaagaggcaatgagttgcggtggatggatgatgattggtagggttaaatgaggtggtcaaagggccgggcggtcagtgctcctgccaagatgcagccctgcctgcaaagtttctgttcatattcatgagggcaaaaattgtttgtttccgagtggtttgtttgtattttgttgatgccgctgaggtgaggtgagggcgtcagagagagagaaagagagagagagaaagaggggcatgctttgctttgctgtgatgggagtcacatggatatgccctactgtggtggtgctctggagggaaatatttgtccatctccagagctaacagtgtccaagcatg

SEQ ID NO: 2418 - DNA, 375 bp, Zea mays
gaaaaaagagatacaaacaatcagcaagggcccccaaaagccccatgcttggacactgttagctctggagatggacaaatatttccctccagagcaccaccacagtagggcatatccatgtgactcccatcacagcaaagcaaagcatgcccctctttctctctctctgacgccctcgcctcagcggcatcaacaaaatacaaacaaaccactcggaaacaaacaatttttgccctcatgaatatgaacagaaactttgcaggcagggctgcatcttggcaggagcactgaccgcccggccctttgaccacctcatttaaccctaccaatcatcatccatccaccgcaactcattgcctcttcccccctccctct

SEQ ID NO: 2419 - DNA, 413 bp, Zea mays
tcctaatgtcagtctctctgaccctagatcctttggagctgcggttggacaggtttgggcatcattatacacaaggagagcaatccttagccgtcgagcagccggtgtacctcagagagacgcaaagatggcggttctcgtgcaggaaatgctgcagccagatctctcttttgtgcttcatacaattagcccagttgaccatgatcccaaattagtagaggctgaggttgcccctggtcttggagaaaccctcgcttctggtacccgtggcactccatggagactctcatgtcacaagcttgatggcaaagtcacaactctagcttttgcgaatttcagtgaagagcttatggtgctcaactctggccctaccgatggtgaaatgagtcgtaggaccgtagactacagcaaga

SEQ ID NO: 2420 - DNA, 763 bp, Zea mays
gagctcgtcagtcttcacaacagaggtgccgggcgtgcaccaatctgaagttgtggactgctctgccctgactacactccagatgacatacgctcatgaaaccgtctggcccttctgttgcaataagcatttgctgtcacacgagaatccctcattcaaaactcaccgctccagatgtcaattttgttgggccattatgatattatgggtccatgcttggaacctccatatgtggcccgtcaactgtgaccggctgctgattatgggctcgaggggtgacaacatcttctgacaagaaatctatctggtcccactgcacttcttctattttccatgtcaagaaattcatgctgtaacaacaattatgtaacagaacagatgattttaaaccagcttaatgcatgatcatcaaggatacgtcctgttttccacatatcagtcatgctaacatccccctctgttaggagccagtaatcagaatccgtctgcaaattttgtgtagaatggtaagttactcaagatagcacaaccacctactttataacttagcaggttctatacagatttgcattcaggttctaggaagtaaaactcagaaaagcatatgaaagattcatatgtacatgcacattgatggaacattattttatagcacataatttcagatggggtgcattgttaataataagctttatgatcatggcaaagggggaaaagctgaagttcaacttcacaatgatctgacttacatggacgtcggaag

SEQ ID NO: 2421 - DNA, 280 bp, Zea mays
  misc_feature (192)..(207): n is a, c, g, or t
  misc_feature (228)..(236): n is a, c, g, or t
  misc_feature (258)..(263): n is a, c, g, or t
gtgaaaaactaaggggcttaactgaagatgaaaataataaaaggtaactatatttcttttacatcagttatgtttgtatgtcaccatctaatactgcatctatgtttcgtctgtctattaggtggctctatgtgactgaagacgacatcaagggattacccagctttcaggtctgctttagtttaaaggttnnnnnnnnnnnnnnnnatggattatctgttgctttannnnnnnnnaattctcttgaagtcaacatgnnnnnnagattggcaaataacat

SEQ ID NO: 2422 - DNA, 1074 bp, Zea mays
  misc_feature (564)..(568): n is a, c, g, or t
  misc_feature (1047)..(1047): n is a, c, g, or t
ttgtttctaatgcaagttgcaccaccaactgccttgctccacttgccaaggtcattttgcttattgctgtctgtttaccagtgtctagtttctgccaacaacggttcttgataatcaaaataaacggctcttgtacttcatattttctgcctttccaaaccctaatttcttaaacacggtgtgcaggttgtacatgaggaatttggcatcgtggagggccttatgacaactgttcatgccacaacaggttggttactggctttcatccagtgtctacctgttaagtcatttgccattttcatgcattttcaaaataattgtcatgagcatgttactgtaccatgtccagccacccagaagaccgttgatggtccttcaatgaaggattggagaggaggacgtggtgctggccaaaacataattcctagctccactggtgcagcaaaggtagctgaagccaaaggcacaccatgcgtattttagactcaaattttgcactgactgatttcactttgttgtcaggctgttggaaaagttctgcctgagctgaatggaaagctcacnnnnntggccttccgagttccaacaccaaatgtctctgttgtggacttgacatgccggattgagaaaaacgcctcctatgatgatgtgaaagcagccatcaagtatgtagaagtacctcacttgttgcttccgtatggttttcagcttccggtttgctattctgatgagtgaaagcacaacctcttgataaattagtaatcagcaatttgaaggctcacataatggtcgtagcacttcatactttgcagcgcatgatttacataaactagagatagttgcagcatttgttagatctggagagaggtagcaaaatatctcggtccaacatcttgctcactgtaggctgcacgattggacagtaggtagctcaattgcatgctcatgttactctggccccactagaaattatgtgtgaacttcatttgaagcgtgctctgctgtggtattcctaagatttgtgcagagagcaaccatgcgcatatnaccagccatcctacggtggatcttatg

SEQ ID NO: 2423 - DNA, 603 bp, Zea mays
ttatggaggttagcttctgataagccgtgttaagctgcgtgtaagaggatagataagcaaaaaaacagtttcaaatctcatagtgctacgcatatgatgagatggggcagacttacatccatgttctcaaaccaaaacatgtaagcgattgcaaccgcaggtgctctcccaagcccagcggtgcagtggacataaacccgccctttgcgctgcgacgtagcccattctagcgccgaaactgctttcagcagttgcgacctcagtgagtctggatcaaaatccacggcctgcaaacaagcaaccgtaagcatgcatgtagaagaggtcaggtgctcctagtgtcgataactggaatgcaaactgagctaagagaggcactaattagtattttcaaagttatcagaaattcagaagaaaattaagcgaacagggtatagcaagctcaccggtctcctgatgtgctgaatgccaagttctttgcacctattgacaatggattggaagtcaatgccccaatattcaatgtccttgtcctgctgtaagcaaagaatatatgctactcgctcttcatttttcaagcgatcgatatcttcaggcttctga

SEQ ID NO: 2424 - DNA, 299 bp, Zea mays
ccgccgccggcatcgccttcatgtgctacgaggcgtgcaagaagatcctcgtcgacaaggaggaggatgaggaggaggaggacggagccggcggcggagaggatgacaagaaaaaggttgaatgatcaaagttcttggccaagaaggtggcaatgtcgtgaagcgtacgtgaactggaaacggatggacaagtatatttggagtttgatgtggtgtttccggatcgtgtgtttgtctcagatgaaaaaaaatacaatattttgagtccaagttaatcaatgttccatttgcctatcaaa

SEQ ID NO: 2425 - DNA, 392 bp, Zea mays
ctgctggcttggaccttctctctgtaagtcaaatggattgctgatcatgaccgctgcatcgtatatcctcgctgtattgaattcacctatttccgtctgctgacagaaaatgcttcgatatgagccaagcaaaagaatcacagctaggcaagcacttgagcacgagtacttcaaggaccttgagatggtacagtgacctgctaaatgtgcttggggttgctttggcatttgtaattgtatgagctgagtcgctcattcctttttatgggcgtctgtactctctcattctctctgcatttttgtcgttcaactggatattttgaatctggtgtgttttgagatgtattaaggaatatcaaatagattaccgccttggtctctatttactgaaa

SEQ ID NO: 2426 - DNA, 690 bp, Zea mays
  misc_feature (663)..(663): n is a, c, g, or t
  misc_feature (683)..(684): n is a, c, g, or t
tgccagtgcattcttattataaatttattacaaaattggttacttttgtacgggatgccgatcaagcagcagaccacgggttgcatccaaatgttctcttttcctgagcggttttcgctcccaaagaatacgtcaaaacacggtaattgcctcctttcatttacaatagcagcctcctgatgtcgctgaaattcagcgccagctccgtgaaaaacttgcctgctcccgcccatacagtgcaagaaaagaggagtgactaaattgtgatgaaatagtacacactaaaagggaatgatataaagacaaaacaaagcaagaaaagagatgcacacctcctacttgcccatcaaatacacgatggtcagcagatagtgtcaggctcatctttgtaactgcagcagccttctcggttcctggacaatcacacgagtttaaaaaaaaagaagtgtctacgttgttccgaacaggagcgcagtgtgtctagaaaatataccatcgctgtccacaacaggttcaacaaccttgtttcctctacccactgcgagaatgccagactgatagaaagaaatgaagaataggaacgtcactacgtcagtatataaattagaagggtcccattactagggaagcaaacatgtgcacataggggacctgtggagggtnaatgattgcacagaaatggnncacagg

SEQ ID NO: 2427 - DNA, 600 bp, Zea mays
tgctgattgcttcaacgtaccatcaaggatgagggtttctcttccttgtggaggggtaacactgctaatgttattcgttacttccctactcaggtagcccacacattccattatattttgtactgagtaactattgtaaatatgttgaaactgcatggtctttcagtacctaaattattgaatgctcattatggttttcctgatcttgccgtgtgtacaagttactgattataatttaacttatatattactaattgtcttaatatctttgtcctaggctttgaactttgcgtttaaggactacttcaagaggctgttcaacttcaagaaggacagggatggttactggaagtggtttgctggcaacctggcctctggtggtgctgctggtgcttcctctttgttttttgtgtactccctggattatgcgaggacaaggttggccaatgatgccaaggctgccaagggaggaggcgatagacaattcaatggtcttgtggatgtctaccgcaagacactcaaatctgatggtattgctgggctttaccgtggatttaacatatcttgtgttggaattattgtttatcgtggcctgtattt

SEQ ID NO: 2428 - DNA, 640 bp, Zea mays
ctaactgaaacagttatcatgtggctctccaatgagcaagagttctgggatatctttgacgaccgatctgtccaactccagccttcggggctgcagcaggtatatgttttctcgagttctcgtgctacttggatgcaaacgctgaagttatcaaatcataaccagagctgtctgcggatggtttctcttttcttgaatgctccttcttgcagcttattcttgatatgcacttcattgtcgagattgctgtgtgtggaaggtttccatatagaccagttcagcagcttgtgtccacaatcataaccagagcagttgcagctttctcagcaaggggtgttgatccacaaaggtctgtactctgtagccagaatcctttttctattcttttttggtactattctcgtaatgttttaggtcgaatgcttgcctagtgtttaacgtcacctttgtccttccactaaaaatgatttcagtgttcttcctgaggacgggtggtttgtcgacaccgccaaggccgcaatccacaagctcatgctgggggtttctgggtctgagtctgagcccgagcccgaggcggaagaacatattgttctgcatggcgaggtctcagattctgaggagagctcaggtgcatcgacag

SEQ ID NO: 2429 - DNA, 617 bp, Zea mays
  misc_feature (579)..(580): n is a, c, g, or t
gcaggcagatcttcatccatgcctaactctcttcgcagctcatcctattaaaaaggacaacaataggtactatagtcggtaagttctgaaagatagaaaagatccataaaaatcagtatgacaacgctatactgcaattagctgaagaaattttgtaccttcggtcgaacaggtttgacaaaagagggccggacagggaggccatagactttaatctgtgcgggcttcagtccagcttttagtgctctcttttccacctcagttgatggacagtaacatctagtgacaagcttatggaacctaaggggcaacaatagaataactatttcattgtaagagtgtatgtctcgcattttgataagaaactacaaaagaagtatttgacttatgtagaacactgaggccagcataccatgttgggtgacaagtgctgagatccgtgataacagttgcgaatgggatcttatccaagagacctttcgatcttagaattcggagggggacatgttgcattaaagggtgtacactgataattacatctggttggtacttcattagaccttttgccacttctctgcnnaaagaagtagcaatttaagtgagggagagagagagag

SEQ ID NO: 2430 - DNA, 417 bp, Zea mays
tacatacattatgagcataccaccagtgttacactagatttaaaaatactgcatactaatgcaagcatagttaggaagtacaaatactgcaaatctgctaggcagatagctgagtggcctgaccaatatagatgtattccttcagccttcaatagcgatggccttatttaccataagcccataaccaaatcgtgcagccaacatcttgatttcattttccatcacatcatgatttcttgatctcccatcttccagaatatctcagggcatttgtagtcccacattacaggtgatggtagatgacaggggctactgctgcacgtcttctctttcccttcagcaatactcagcaagttaggtgcatgtggtgcctcaatctccttccatatctgatccatgggatatccatccatgaca

SEQ ID NO: 2431 - DNA, 427 bp, Zea mays
cctcctcactgacataccaaacctgccttcttgacaccattccagtcattgggatgggcagtggtgacactcacaatggtagctgtgtcaccagcaccctcgagaacacacagagtgtcatggatggatatcccatggatcagatatggaaggagattgaggcaccacatgcacctaacttgctgagtattgctgaagggaaagagaagacgtgcagcagtagcccctgtcatctaccatcacctgtaatgtgggactacaaatgccctgagatattctggaagatgggagatcaagaaatcatgatgtgatggaaaatgaaatcaagatgttggctgcacgatttggttatgggcttatggtaaataaggccatcgctattgaaggctgaaggaatacatctatattggtcaggccactcagctat

SEQ ID NO: 2432 - DNA, 495 bp, Zea mays
ttcttttacttttttgctgctttgtccttcagcgatctgctcagttcgtttgtaatttgcacagattgatcactcggtggtggagagcttcggagctgacgggcggatgtgcatcacggctcgagtgtaccctgagcacgcggagacgagcaacagccacatgttcgtgttcaacaatggcagcggcacggtggaggtgtccaagctcgaggcatgggagctcgcggcggcgaccgtaaattccgttgggggcaacgacagcttggttatgtctgaatctaataaccaaagtgaatcctattaaaatcttcaggttaatgtgtcaaaaatggggtccgtttgatttgattgctatactttgttatggagagggtgggggaaaggtgtacgtatttcaaataagaaatattggccgattgctgttgagaaattcatattggttgatttggagaggagaataaacaagttctactgatctggcacctctggctagca

SEQ ID NO: 2433 - DNA, 602 bp, Zea mays
  misc_feature (8)..(8): n is a, c, g, or t
  misc_feature (545)..(545): n is a, c, g, or t
  misc_feature (584)..(592): n is a, c, g, or t
atgcatcngaagccagactagccaaagttacaagggagctaacaataaaaagataaaagttcagacattgatatttctgcttgcatactccctggcaactgtttttgtgaaaccaatcactccagccttggctgcgctataattagcttggccaacattgccagtaagaccaactacagatgcaatgttgataatttttccctgcatttttacataaaaatgtgcacattacaacaacattttagagatcagtatacaagacaaatacaaacataactcatggtaacaaactatcaggcccattactgaggtgcgattcaatagttatgcattatcaatgtgagtcactgactggtctaaattcttaaggttttaatcccattcagctattcataaacacagggtaaaaaaacgatgcaacaagccagtaatttctttgtacttctaaaagaagtaaatctatcccagttcctaactggaaactgtgtaagaggaagagagttgcgacagttgtttacttatgaaacttgagtattgcaaaagtnctgactaaattctatggtgcttttctggctaatttgccnnnnnnnnnacccataatt

SEQ ID NO: 2434 - DNA, 488 bp, Zea mays
actgcatgtatcactggccatgacattcctgttgcggatcaatggttcgtgtccaacggaaatgctgatcgcctgagtgtgatctgattctgatcctatccaaatagccacgcgatcttgtcgagcacccagtcgacagcctctgcgagcccgccgccgacgctcatgtcggtctccggatcaaacgggaacgccggcgccggcgcggtggcttccagcagccgctccatgggcatctccggcgcggaccgctctaggggcttgaggggccgaccgtaccggtccgcatcagggcagtaatccttcatgaatgaagcaggagagagagagagaaaaaaaagacagatggttatatccggtgcagcccacatcatagaagcccagcctgtgtattcaaatgggccagaacgagatacgccaagcccgagaggcttaccaggtcggcgtgcattttccggacgaaggtccggaagatccggaagttgttg

SEQ ID NO: 2435 - DNA, 1138 bp, Zea mays
tactcttcagaagatgcccgaggcttgcttaaagctgctattagagatcctgatcctgttattttcttggaaaatgaattgctgtatgtcagtctgatcttgttgaatcattttgctagttgcctatcattttgctgagatgctattgtaccatttgcagttatggagaatctttcccagtttctgctgaagtgcttgattctagtttttgcctaccgattggcaaagctaaggtatgttgtgtcttgggtgcatatgggtgtatgggaaggagattactttaggtaggactatttctataagtttaccttgggatggttttgagtggacttcctattgctttcaaaacggttctccatttccttttctggattatacttgataccatgtgcacttcactgtgggcctcatctttctgtagatagaacgtgggggtaaagatgttaccattactgcattctccaagatggttggctatgctctccaggtatgcgatgttgtactttgtaaacaatgtaaaggaggattaattattaattcattaatcgaataagcattaccctataggttggaaaataattagcatatgtgtttcccaatatatgtttacttctgtagggatttggatgtactgcatcaatgcacttttgttagtcgttaaactgatctacaaggttgtccgttcgaaaactgtaattttgatttttgtcctaagagggatatttaggtgacagatggttttagtagtgctcatttcacttgtctgtcttaatttttcatcatagtgggctgttattttggtgcattctcatgctaagtttgcttcaggctgcagagatactgtccaaggaaggaatcagtgctgaggtaattccttttgtagacgttataaattcacttgttcagtatggccatttagttttctccatatgccatctgtagcaccttacttttggttcgtatttgttgacaggtgatcaaccttcgatcgatcagaccacttgatagagctgctattaatgcatctgtcaggaaaaccaaccgattggtgactgttgaagaagggttccctcaacatgggattggtgccgagatatggttcgtctagcccttaccctctcacacatttgtgtgtggt

SEQ ID NO: 2436 - DNA, 1134 bp, Zea mays
gctgctattagggatcctgatcctgttattttcttggaaaatgaattgctgtatgtcagtctgatcttgttgaatcattttgctagctgcctatcattttgctgagatgctattgtaccatttgcagttatggagaatctttcccagtttctgctgaagtgcttgattctagtttttgcctaccgattggcaaagctaaggtatgttgtgtcttgggtgcatatgggtgtatgggaaggagattactttaggtaggactatttctataagtttaccttgggatggttttgagtggacttccttttgctttcaaaacggttctccatttccttttctggattatacttgataccatgtgcacttcactgtgggcctcatctttctgtagatagaacgtgggggtaaagatgttaccattactgcattctccaagatggttggctatgctctccaggtatgcgatgttgtactttgtaaacaatgtaaaggaggattaattattaattcattaatcgaataagcattaccctataggttggaaaataattagcatatgtgtttcccaatatatgtttacttctgtagggatttggatgtactgcatcaatgcacttttgttagtcgttaaactgatctacaaggttgtccgttcgaaaactgtaattttgatttttgtcctaagagggatatttaggtgacagatggttttagtagtgctcatttcacttgtctgtcttaatttttcatcatagtgggctgttattttggtgcattctcatgctaagtttgcttcaggctgcagagatactgtccaaggaaggaatcagtgctgaggtaattccttttgtagacgttataaattcacttgttcagtatggccatttagttttctccatatgccatctgtagcaccttacttttggttcgtatttgttgacaggtgatcaaccttcgatcgatcagaccacttgatagagctgctattaatgcatctgtcaggaaaaccaaccgattggtgactgttgaagaagggttccctcaacatgggattggtgccgagatatggttcgtctagcccttaccctctcacacatttgtgtgtggtatctagtattttaataaatgatgcttgtt

SEQ ID NO: 2437 - DNA, 556 bp, Zea mays
  misc_feature (194)..(194): n is a, c, g, or t
  misc_feature (196)..(196): n is a, c, g, or t
  misc_feature (482)..(486): n is a, c, g, or t
  misc_feature (491)..(496): n is a, c, g, or t
  misc_feature (505)..(523): n is a, c, g, or t
  misc_feature (536)..(549): n is a, c, g, or t
tgcattttttgtcttactataggtcacaagggcaattcttgagaacccaaaggacaacacgaaagtacacttaatctatgcaaatgtcacgtatgaggatattcttctgaaggtatatgcctttttatgctgacagacttcattgactcttaacctgatatcagttatatacctgtatgcaaaagggtctggtncnattgatggtgcctatttggtgagacactggtatcattactctccatctgtccagcttacattacgaataaactagtaggtctggtttctgagatatggaaacaatctgattttttgctcataatttatggatcatgccatgaagagcataaacatgtctcagaataccaggcaagttgtgttttttactagaattctatatacggtctcttgcaaaaaattcttatataaaaatatgtgtaagcagcactctttgtctacaaataattacggatttatttctccannnnnaaacnnnnnnctcttgtcnnnnnnnnnnnnnnnnnnntacattactgttnnnnnnnnnnnnnntgtttat

SEQ ID NO: 2438 - DNA, 371 bp, Zea mays
  misc_feature (263)..(267): n is a, c, g, or t
  misc_feature (288)..(292): n is a, c, g, or t
  misc_feature (310)..(324): n is a, c, g, or t
  misc_feature (347)..(360): n is a, c, g, or t
atggcgatatggtcaggcttcgtctgctcaaagaggcgacgaaacttgttccacccccgtttattctggtactggtagagagaatgtaacgcttagaactggaactgcatctccttcgtgtagccaaggtcgtccaggtgcgcggccatggctttgttcatgggaggaggtccacatcgcaatacctgaaaacggaaaactgatctgacttccaccgagcaaaaactgatggcccccatccaagttccctcaaaatactttcnnnnnccggaaaagcttacctgaatnnnnncggcaggcgctgggcaannnnnnnnnnnnnnntccttcgacacgaacccgacgcnnnnnnnnnnnnnntcaggaggctg

SEQ ID NO: 2439 - DNA, 378 bp, Zea mays
cctctcagtgttgttaccacttgttttgcatcttctctgcagcagcatctctcaccacatgcaatgcaacattgcatcaacaatggtttatcaaacagtgcaactttgaagtaaagttcactgaatgtgaagtgtgccctgtttgggcgctggcattgggcttattaacctaagctctcctctccataggaaagctcagccctctgctttgttcatctcttccacctctcacaaaccaaaccaatcaaatctgacaacagccaatgccaacccatggcaatggctcaaagaacctaaaaaaatatcttctttttcgcaaacatataagttcaaaaagaagggaagaaaatgaaagggaagatcaaaccaagcccccct

SEQ ID NO: 2440 - DNA, 401 bp, Zea mays
gttcgagatggtgactttggcagcaaactatctggcagaagatcagaatggttactagcatcctctattggaagcaaatcacacggaccgtgacctaaactaatttaactatgaagtgtgaccaatagaggagatataagtggtggggtcacaatggaggagaccaaagcggggagatcgaagacaaaggaggcctcctgtgcatggtttgtttctgtttccgcctttcgagttctttcttacgacaatcttgggtcgcacaaatgggtgttgtaagtattgatctgtagctacaaatgtatgatgggggagtgattgcttctcatacatgttccttctggggctatgtccatatgttgtaagccccatgaaaacagatttgtcgcagccatatccattca

SEQ ID NO: 2441 - DNA, 368 bp, Zea mays
gttccgtttactcatctctggtgtggagccgaatccatcacctagcagcccagcggtcttcacatgattaagtgccgtttcctggatcaaatccaaactttttcatagtccaatcctcagccacaacaatctcacacctcaaatgtaacaaatccttacctgcaaatggttcatcattgtctctatagatgccgtcctatcagccccaatctcataggacctaatggagaagttctgcttgaacatgaggccatcatgtatgatccggccaaacccaaaagtgtcagtgagcatgtcaggccgcctgggcttccaatcaagcatcgtccactgcttctcggcggccaagaagatggtcgtgatggcag

SEQ ID NO: 2442 - DNA, 603 bp, Zea mays
acccacaacttgttcgggcagttccgctggatctctgcccagacaaacagggcccgtaacggcgagctctatcgctacatcgctgatacccatggtgctttcgtacaggtatatatatatatatggctctggattacaatctagattatatagaggttccattccatacctggcatatgtaccgactttaatcttggcatgttaactacagccggccttctatgaagcgttcggtctcaccgtcgttgaggccatgacctgtgggcttcctactttcgcgacgctccatggaggtccagctgagatcatagagcatggcgtctcgggcttccacattgacccgtaccaccccgaacaggctgctaatctgatggccgacttcttcgaccggtgcaagcaagacccagatcactgggtgaaaatatctggagcagggctgcagcgcatatacgagaagtcggtgctggaaatcctgttctactcatggttggtctctagtcagtgtgatgctcattttctttcgtacgtgttgcgtacccaggtacacatggaagatatactcagagaggttgatgacactggccggggtctacggtttctgga

SEQ ID NO: 2443 - DNA, 635 bp, Zea mays
  misc_feature (599)..(601): n is a, c, g, or t
  misc_feature (608)..(612): n is a, c, g, or t
  misc_feature (619)..(624): n is a, c, g, or t
tctggagcagggctgcagcgcatatacgagaagtcggtgctggaaatcctgttctactcatggtctcatggttggtctctagtcagtgtgatgctcattttctttcgtacgtgttgcgtacccaggtacacatggaagatatactcagagaggttgatgacactggccggggtctacggtttctggaagtacgtgtcgaagctcgagaggcgggagacgaggcgctaccttgagatgttctacatactgaagttccgcgagctggtgtgctctgttctcaactctcttatcatttacaaagtttacaaatatatggaaatgaaatttagtctcttgtcattatatttccttgtaagattgactggctggcttctgcttcccgtgcatgcaggcgaagaccgtgccgcttgcaattgaccaaccgcagtagcttgcgcaactgcgactgcgtagcacttggtacaagactgaaacctgaaggaccttcagtaatttaggcgcggcagacggtagccaataaaatgtgccggagctgaactggtttttattatgtacataatggcagtataacaaaattactgaaggcaggtgggttgcannngtgtgtnnnnnactgttnnnnnnattatgtcaag

SEQ ID NO: 2444 - DNA, 860 bp, Zea mays
aacgacgatccaagcctgaaagattttcttaccaaggtaaggatttctcctttatgtcatggtatattagtgtgtgttttattttataagtcctcatctggaactatattcgtagtggcagttgtcattcaggtaaatatgacattgcacataagtttatggtttcgctgagcatagagcacataagttgagtactcgagtctgttttactattattaagtcatggaaatgaaagcataggatgatgataccgttgcaatacttgctaaagaacgaacaaaaataaacactattctacattttctcttggtcttacgactagtggattgtaacgtgggcctaatttgtttgaatcacctagatgtacaggtgtatatatgtagtgttgcttttgtacatgtataagcgaaacactccatgatccatgcaggaatagagaagtaacgttctgtgcttcctgctccattccatgtagatttcctgttcactgcaaattcttgcatggtctaaacctgtaatatcaactgccgcaactgttctctattagtctaatggatctgttggtctattacccgagctaactcctcatggccacctggtctgagcagaaatcgtcgttcctagaagactggctgagatcactatccgcatcgttgaacagctccgagcgccagcccttgccaacggaggccacaaacgacgaggacggcttcagcccaaacgtgactcagaaaggcatgctgtcttccgccctgcagtccttgctcggcgtatacgcgggcaggacccagcaggtcatcacccagagatttgagcaactggctagaagcgtcgcttgaatggtgagcagcgacgagcag

SEQ ID NO: 2445 - DNA, 444 bp, Zea mays
ccgtacttctttccgaagaagaggatctggagctggtcatagccagaaagcacaccagcaccagcaatggcacgaagaatgttagcaccagcacccttgaacagggacttgggcccttccttcttaagaatctgctggaacgcgtccaaggagctcttgtacttgacagcctcaccagatgtcatcatcatccttctgcggacggtatcaatggggtaagatgcaagaccagcaccattagtgatcagccaacccagagcgaaactggcaaagaaattgtcctgcaagagagagaaacatattatagctcacactacaaacccacaagcaatatatagaaagagacagaaattagacaaacctggaggttgccagtaaggacaactggcttgatggaatcatagagcccaaagtacagaccacgataaacaatgatccaacaca

SEQ ID NO: 2446 - DNA, 633 bp, Zea mays
cttatagctcacacaggcaaaagcaaaatacattgagagagagagagacattatgcaaacctggaggctgccagtgaggacaactggcttgatagaatcgtaaagtccgaaatacaggccacgataaacaataattccaacacaagatatgttaaatccacggtaaagcccagcaataccatcagatttgagtgtcttgcggtagacatccacaagaccattgaattgtctatcgcctcctcccttggcagccttggcatcattggccaaccttgtcctcgcataatccagggagtacacaaaaaacaaagaggaagcaccagcagcaccaccagaggccaggttgccagcaaaccacttccagtaaccatccctgtccttcttgaagttgaacagcctcttgaagtagtccttaaacgcaaagttcaaagcctaggacaaagatattaagacaattagtaatatataagttaaattataatcagtaacttgtacacacggcaagatcaggaaaaccataatgagcattcaataatttaggtactgaaagaccatgcagtttcaacatatttacaatagttactcagtacaaaatataatggaatgtgtgggctacctgagtagggaagtaac

SEQ ID NO: 2447 - DNA, 622 bp, Zea mays
cgaatcgatcttgaacttcacagatccaatggctgatgatatggcagcagcaggagtccatgctgccaaaatgttgacacctggagcagcaatgtctggctgcagaagaaggtgcagggttttttcagcctcccaactagaactggaggtttgatcaacactgtagaggtttgatcaactgtcgaactggaggtttttttttaccttcagaacagcgggggacagagaacttggaccccgagatgagaaatatgcaacttctgggcccatcagttctccaagaatcgtttttgctgagccaaactggactgttggatttctgtgtatggaaaacagaaattattggaaagttgctgacagctacagcatattgctagattgttacgactgttggaacatgtgcggcactgtttgcatacctcgtgctagtggtgtatgcgagtatagctgttccaacctggtagtctacttgaaaacagggaatatcgaatgaagacgcgatgtccttagttaagaactgggcgaagatgactccgacgccacgagctttcttgacagtctccactgccactgcagctgatctctgtgcccttgtttggaagcaaagtaccacagttccctt

SEQ ID NO: 2448 - DNA, 613 bp, Zea mays
ctctttacactagaaaaagaagatcctaagctctacgcaaataatgtcagaaaactaatagcaatggaggtaggctaaacccaaaactgagcttgtctaaaacaaccatgcaaaggtcaaacaacctcttcgtaatatatgtatccaccgagggctgggtaacaaaaaggcaaagggcaaaacagttctttttttcaaaaaataaaaatcataaaaaaggttcttagggcctttacttagtgtttttcttcttggacttcgttcaagcttggggtctttcctccaataataagctctacaatcaccgatcaccttttttaaaatataaattaatatggtcttaatcccaccatataaataacgttctctttctgcagggcaatttagttctttctaatattgggctggcagagaagcgcgtgtaccatgcagcactgactggtagtagtctacctggcgctagacatgagaaagatgattgaaagacgttgcgtcgctttttctgtaacagacagccgaggaacacttaaaaatgtaactgtgtgcgtgtttttatacctgtaatgtggcagtttatttgtttgaggaggctgttgagtacccttctcatact

SEQ ID NO: 2449 - DNA, 499 bp, Zea mays
tatagatagcattactttagttgatatagctcagtacttccatcttccaatccgagatgcatcaaagacactcaagattggggtcagcatattgaagaggaaatgccgacagtatgggatacctcgttggcctcaccggaagatcaagtcacttgactctctcattcatgaccttgaggtaaatctgatggtatttctgtttcacttcactttgtgaatttccagggaacgaccgtcacaatttgatgcagttgtaacttgatgccaacacaactcatattttgttggacagttcgtgctagcaagagaggatgaggatgatgaggaggagaagcagctgcagaaggacaggctggctgctgcgataaacgccctcacaaaacggaagagcatgctggagagcgagaaggaaaccatacagcagaaaccggccatggacctgatggctgaaaccaagctattcagggaagatgttttcaagaggagatatagggccaaa

SEQ ID NO: 2450 - DNA, 603 bp, Zea mays
ttcctcccgccggggccgaagaagaactgccaaaggaacgaaggacacgatcagccagtcgatggggcggcggctatagtacggtacgggtatggtgaccgagcaacagatgcctcgttgagagcttaataataataatataatgacctggaactcgccaggcacggagatggtatggaggatcttggtgatgaccagtttcttccggccgtcggtgttggccaggtaggtgaccgtcccggccggcgccacgaagacgtggccttgctttatggtgtatgaccgcctctcgccgttctcgatcgtcgtcaccactccctcgcctagacacgacaaaacaacagatcagctaacgtgcatgggccggcgtcgccctcgatctatgtggtctcagctcacggaccggaaccggacggacgtaccttccgccacgtagcagatgcagtgcgcgtcggtgtggctgggcaccacgaacgagcgcgggttcgcctccaggaccgccacgcggtagtcccggatgccgcggaggagcctggacacctcgtcgaagggccggagcaccctcagggacccctgctcgctccggaccacgcgacgaaagct

SEQ ID NO: 2451 - DNA, 423 bp, Zea mays
tttgctccggcacacggaactcaggtagagatactggaagagcagtagaagcttcacccttaaaacctgcagcaaacttaagctgagatacatgaatcaccggatgaatacggctggaatcagaaagttggaggcgatatgccacggcacccacacgagccaacacctgatatggtccgaaatacttgaaacccagtttctggtgagcacggggaagcactgaggattgaacatagggctgtagtttcagatatacccagtcacccaccacaaaggagcgctctgatctgttcttatcggcctgttttttcatacgatcctgggcacggatgaggtgttgacggactaaggcttgcattgctgtgcgttcctgaatccattcagacagtgtggctggaatggctatgtcaagagacaggccta

SEQ ID NO: 2452 - DNA, 773 bp, Zea mays
tttgtatgtttctgatgatactagccaataatcgtagttttggctactactagagtactagctgagtatgtgcgacatgacagattgtgttccacattagttaaagaaaaagacatagaagatgtttttgcttttcctctgctccattttggacaatgatatagtaataggcatcctttgggggaacctacaggttgcaaggattctaatgaagaccgtatctcaattgacatctggaaagcaacctgttggtacaatggcttacatgggcaatgtacaatatctgatgcaatgcaaatgtgctgttaacacaggtacttatttaggctggatcattatattttctagttctcagttatatttgatatttgttccaggcttcttgaggataatgtctgtattgactatggtatacttcatgtttggtgactcaacagccgaagattggcttaaccctgttgccatacaagaggcgtttgaagcccgggctctcaggatggcagtaaactgtgcccagaacataggccaagcagcaaaccaagaagaaggtagtatttattacaaacagtcaataccattctttttcctttttttccatattgtagttgctgaattggaattactgtactaacgatgaccgcatgccttgcaggtttctatgagcggtcccctgatttgctagaggctgcagtagctcacatccagttggtcattgtaaccaagtgagtatcaattcaatgttgtttatgaagtgtgtgctgttcctttccttc

SEQ ID NO: 2453 - DNA, 822 bp, Zea mays
  misc_feature (816)..(816): n is a, c, g, or t
aaaattttctatgggtaaccaaagcaatcaactaattgatttgttagtttcaatttttaataggtaatatccataaatatgccttctatgccgtgccattcgatttgattgtatgccagcctaaccctctttattttccccacctgtgaccaggaatctctcgacaacattaatctattttcgataattacagtcatgtcattcttcctgttggccccggtaaccttacttacagaaggtgttaaagttagtccagcagttttgcagtctgctgtgagtatcctgctgcttattttttcatgataccttataagactagcttgggcagaattctatatttatgaatattgtttcttgtgcagggtttgaacttgaaacagatatacacaaggtcattgattgctgcatgctgcttccatgcataccaacaggtggtgatccatcttgctgatattggtggatttgtttgttctttgattacgtcatcaatgttgattcagattactgtatatgcctttataagttccatttgaaacaatttatagttcacctactgatcttattattttcaatttcttgaaggtgtcatacatgatcctcgccagggtatccccagtcacacattcagtgggcaattgcgtcaagcgtgtggtggtcattgtgacctcggttctgttcttcaggacccctgtttctcccatcaactcactcggtctgcatcttttccttttgctactcttaactattttattccgtcacggttcaccctcacgaatatgaaacattaaatttgtgcaggtaccgggatcgctcttnctggag

SEQ ID NO: 2454 - DNA, 456 bp, Zea mays
atgatgttctgctgtcttccactggtaataaagctacatactcctcatatcaggtctttgaagttggtgaatgaaggtgtcatgtcaaattttctgttgatacaaaatgcagccaaggatgctaccgatgatttcgaagatgtggggcacagcagcactgcccgtgcaatgatggacgagtacttagtgggtgagattgatgcagccacgatacccaccaaggtgaagtacacgccccccaagcagccgcattacaaccaggacaagacccaggagttcgtcatcaagatcctccagtttttggtccccctcgcaatactgggtctggccgtcgctgtaaggatgtacaccaagtcggaatctgcctagtctcttgtcatcaacgctgcaaacataacatcatccacaaactgaataagttagtgttaaaatgctgcaaagatcattaattctgaa

SEQ ID NO: 2455 - DNA, 302 bp, Zea mays
aaaactggaggatcttgatgacgaactcctgggtcttgtcctggttgtaatgcggctgcttggggggcgtgtacttcaccttggtgggtatcgtggctgcatcaatctcacccactaagtactcgtccatcattgcacgggcagtgctgctgtgccccacatcttcgaaatcatcggtagcatccttggctgcattttgtatcaacagaaaatttgacatgacaccttcattcaccaacttcaaagacctgatatgaggagtatgtagctttattaccagtggaagacagcagaacatcatc

SEQ ID NO: 2456 - DNA, 726 bp, Zea mays
acatatagaacgtcagctgatttaggcttattgtatacagatacgatggtgacatgaggttatccaccatacacataataaagatctaggatagattccaacaacaacaaaaaaaactggaagacacgatgctggtttactgtgtgcacagattattgctttcagtttccatgatggaagaaatgaaacaccaaaaaagatctacagatggttattttgccttctcagtccggttcatcacatcatggtaatacaatagaacacacattggctgcccgtatatgcagaaaaaaaaccaaaagatcatattgccaacctattgaatataccacaaattagacaggttcccataaaaaacgatcctagcaagtatcaactaagaaaaatatggctcaccattgtgtcactgaatttatttttgaggtatgatgtcaatatgatgaggggaatctggtaaaaagaggaaaagaaatatggtgtcagatccaacagttttctgtttaggagacaacataaatacatggaaccatattagatgactgttgccttctggtgctcataagacctcagactatatagcaaatggaaaaagaactaataaaggaaaaaatgagtaaagaaaaacataaatgttggatattgatccacagcatctggcgttgtattatatttacctgaagcatgattcctaagaaagcccagaacttgagtatgtggcagggaaca

SEQ ID NO: 2457 - DNA, 523 bp, Zea mays
tcagttctgtactgtgacacgcgacaattaaggctacaagctaacgctaagtttttacaacagaaacaaagctaacacgacggtatgcgcctctgccacgacgctgcggcggtggagggagcggaggtgagttccatgctgctgctctcatgtcctctgaatctatcagtctagcttcacccattcaaacctgcctgggagagggcagtcatttacaggatcaaagttgtacctgaagattaagccatgcatcatacatgtttgtggttagtgcaaggcatcattaagagaagccgaatgcatcagcaaaataatttataatgaatcaagaatcgacaaaacagattatgcaaatcgtacttgtcaatgaaagcctgttgttggcgtcgctgttcagcagcgaagtactcgttcatctccgttgaacttgggagggcgtgcacaggaggagctttcaccctgcggtgggaagagtggctggatcttgttgtggatccgggagtgctgggagtgctgatcatct

SEQ ID NO: 2458 - DNA, 810 bp, Zea mays
ataggactaggggggacgaaatcggttaactaaaatgttactcacggtggggttggtaacgagaagatcatctcctacaatctgcactttctgtccaatctcatcagtgagtttggcataagtgctccagtcatcctgatcaaatgggtcttcgatcgactcgatagggtactcagaaacaaaggacttgtacaggtctttcaggctgtcgcctgaaattttgtttgagccatcgttgttctagccaagaaagtgagtacatgttaatataaaacaaatgttcatgtattaccatacccctatagaataacataaggaatagctatagctctaggtaaataaaactacaaaaacataataagaagttgtgattcttacctcctccttgaaattaagatcataagtcttgtctttctcaccgaagaactcagaagcagcaacatccattccaatgaccacctgccacacaggtaagttgaatcaactatacacacaaaggtttgtctgttcgtgagccaagtagataagagagagcatacctttccagtgtagccagccttttctatggctgccttcaatagttcaaggccttctttgttttcctgcatatattggttgacacagaaattagattgtgagataaatggatgccgatgatcaattttgtaggtaccctacggtcaacataaaacaaaagagtgttcctatagtgacaaccatagagcaataattaatctaccgctttctttggataaaaactaatctgccaacttttgaattatggcgtggtcatcttaaatatgctagata

SEQ ID NO: 2459 - DNA, 673 bp, Zea mays
  misc_feature (659)..(663): n is a, c, g, or t
aggaggtaaacccaccacccattgtagttctttgtccgcttttttgaagacttaaacgttcctatttgatctgttttgctcaattgtccaatcttctctttattatatttgttcagtggcgagacagaggacaccttcattgctgacctctcagttggcctgtctacggtacgctgtcaactggtcaagatactgtcgaatcgaacgtcttgcgtactgacctggtttccatgactccgtttcagggccaaatcaagacgggagctccttgccggtctgagcgcctggccaaatacaaccaggtaaagcgcgcgcgcaaaccttcttcgtttcccaaccaggctatgctttttacctctgaaaccaaacgttcgcggtttgcagctgctcaggatcgaggaagagctcggtgatgccgcggtctacgccggagcaaagttcagggcaccagtggagccctactaagaaaggaagaggatgaggatgttttcttgtggagctatactagctcgctgctgccttttgttacaatgtttgtacggtcgcaataaatgtatggtcgtgtttgctcgagagctactcaggtgattttgtcgtgggagcaccaaaagcagaaaagaactgtttttttcttctctctctctagattctgacgagtnnnnntctgcactcg

SEQ ID NO: 2460 - DNA, 849 bp, Zea mays
atgagatctcacatgcattgccttatgatgttcagtggtgtttccccatgcatataattactgccaagccttttttcctattcaggttcttgcatatgaagcaggtcgaaaaggcaaaatcagagtgaacaccatatcagcaggtaactttttcttcttttccttttccaagaaagtaaacaagtccactttaggaaatcttgccgagcagaatttgtatttgagaacacttatatacaaaactagaagatataagctttaaagtttatctataatacatatgggatttgcagtttgtctgatgctttaataacttagcagcacttgaattgttgtgtgtcatgctttgcatctgtctccttaggtccattgggaagccgagcagcaaaagccattggatttatcgagaagatgatagagtattcttatgttaatgcaccactgcaaaaggaattattggcaggttaaatttccttctttcatttagggctagtttgataactctatttttccaagggattcctatttgtccaatggactaatttttcttgggaaaatggaaatccctttgaaaaatgaggttcccaaactagcccttatatctagtatttttcctgcctgaaaagtggaaaaaagtagagatttcttctttactttctctgaaaacggtttgcattacatatcaacagatgaagtggggaacacggcagcattcctggtgtctcctttggcatcagcaatcactggttcaactatttacgttgacaatgggctcaacacaatgggacttgcacttgacagccccactttatccacatgagcacatttcagcagaatgcggcgcagtta

SEQ ID NO: 2461 - DNA, 846 bp, Zea mays
  misc_feature (18)..(18): n is a, c, g, or t
  misc_feature (20)..(20): n is a, c, g, or t
gcacgtgcattttgattncntaggtaagacatgaattgcattctcttcccctttgcattatgtatcttgtgggccagatatacggtgcttaataacattgtatctcctgatgaaaagatgtccgttcataagaacatcttagatctgtaacatctggatgattcaacaattttattccctgattcttctgctattagtacatgaaactctccttaatgaagggctcctgagtgctaaacacttgctgactcgtaattagcctttttactcacatgaactgatgagcgatttctcatttttgcaataaatacttcctttcttttttgctttgccttcagggctagtttggaatctcaaatcccctctgggattggaggggattgaggagatttgtgtttccaaaccagcattcaaggtcttgtgtatattctgaagacgttaagtcattataatggagcacgaagtgattaaacccttgctgactcgcatatttctaaaaaatgcagcactccatttgagttgcaggatgattcatttgtactgaaagcaatggcattatctggcgaagaaactgattgtacccaagctcctggtgcgaatggaggcgagtgctcaagtacacggaacaattattggcaccaccaccaacaaccgcagcctccagggccaagagtagttagggtaccaaactcgcctcctattccagggatactaaaagggcgtgtcaagcatgaacactaggcttcaatatgcttagtggtgtcaaatgagctatttactttattgtccccagctagttttacctgtagaaaatgcatgtaaattatgcctgtaggggcagccgca

SEQ ID NO: 2462 - DNA, 568 bp, Zea mays
  misc_feature (554)..(560): n is a, c, g, or t
gggagctcatgaagcttggcttccgtgtgcgcgctgccgtcaggaacgcacagagggccacgtcgctggtgcaggtaccagtagcgtcatgagcttggtttccgtgtgctcatgatatatgtttggcattgatttggatccatccacagaaagagaaagagcagcagctgcttgagcttgtggagtgtgacctggagaaggagccgcaggaaggcatcgtttcagccatcggcaatgcttccttggtggtgtgctccatcggtgcaagcgagaaggagatcctggatgtcaccggcccataccgcatcgactacatggccaccagcaaacttgtacaagctgcgactgctgccaagcaggtggagcacttcatcctggttacatccctggggaccaacaagatcggcttccctgcattcctcttgaagtaatttaaatgcttattgtgctccgatccgatcctgctctctaaatatatatagattttatttatttatttatttattggtaattaataatacgatgaaatgcaaagcttgttctggggagttctnnnnnnnaaagacga

SEQ ID NO: 2463 - DNA, 257 bp, Zea mays
  misc_feature (248)..(251): n is a, c, g, or t
cttcggttctgaccttcatcaaagacacagcagttggtgctgaagggtccatataaactgctcgagtttgaactccattgatgtttaagtgatacagcaaactttgaccgtagtcatcatcacctaattttcccatgaatgcaacccttccaccgatcgctgctaaagctagagcaacattggatgaagaccctcctggtgccctcacaaatttgtctggagaccaaaacatgtccttcattcgatcnnnnatctca

SEQ ID NO: 2464 - DNA, 311 bp, Zea mays
agactgctttcagcatctcgaagcctctcaactatattgtatccacgaaaaaggattgaaatttactgttattccgatgaataactgtgcaggaaccatggaaataaatttgatgcagtcaatcgcttgctcgacttaccccaagtttcttcccagtttggttcagctgatcccgaacgtaggtcctcgccttgggatcagcgcacagctctgcaaagtcgccggccttgctgttggctgctgcccattcctcgagagcctgcctctcagggacagccacggcaacgaggaacgactcgaagctgttcccg

SEQ ID NO: 2465 - DNA, 691 bp, Zea mays
aatcatttctcacttcttttaatttgcacctaactgaaggatcagtcagtgaagcagctggtcgattcgtggaacttgtcatcaccctatgtgtgcaggtgatatcggggagtggcaatccaatggcacgatgaagatcatcgacagaaagaagaacatcttcaagctgtcccagggggagtatgtggcagttgaggtcctggaaagagcatacctgcagtcaccccttgtggcatcggtacgccgacaacaccctaaaccaaaattgttttcatgctccgatttggcttacctagaggatggccgctcctacctacgtacgaatctgcaggtctgggtctacgggaacagcttcgagtcgttcctcgttgccgtggctgtccctgagaggcaggctctcgaggaatgggcagcagccaacagcaaggccggcgactttgcagagctgtgcgctgatcccaaggcgaggacctacgttcgggatcagctgaaccaaactgggaagaaacttggggtaagtcgagcaagcgattgactgcatcaaatttatttccatggttcctgcacagttattcatcggaataacagtaaatttcaatcctttttcgtggatacaatatagttgagaggcttcgagatgctgaaagcagtctacctggagccggtgcctttcagcatcgagaaggacctc

SEQ ID NO: 2466 - DNA, 737 bp, Zea mays
  misc_feature (733)..(733): n is a, c, g, or t
agggagtagggacgatacagacgcaacacacaacacatccagcagctatagcagagaagctctgactgaccatggcgatggcggcagaaagaacttctctttacgggtgggaggagatgatacaggcagaccaggatcagctgcatatgccattgccgttatgttacattacaccaccaggcaccatgtacagttgcccccagtccaggcctgcagacggaggaagacacctcatctcctaatgcagcgctgtgagcaccgtagctccttccacctgcaatgcaggaacaagagtacaggtttttcagagaaatgttctaggagttctttcttcttcttcttcttcttcagttacgcttttcagctcactggcaacatctgaattgtgtagcatccatttcaagttaacctctggatccttcctttctaaacatctcatgagaccgatgatgatgcaggcctgacgaactagtgcatgcatggaactgaattctttcttcgagaaaggaaccgatcttacctggaaggttgcgccgcagatttcctcctcgtttgcaggaacggcagtcactttgttcttgggattctcgtagcacttcaatcctccaagggcattagagtagaagcaacctgtgtacggtgcaggaagtgggtactcagtcagggacgaagacgaagacgaccctctcctttctttttttgatgattcagaaagaggaactaaaggcagcanacct

SEQ ID NO: 2467 - DNA, 737 bp, Zea mays
  misc_feature (413)..(414): n is a, c, g, or t
  misc_feature (712)..(732): n is a, c, g, or t
gcaggtggagtgctttgatggttgtattatatcaccatattatgacatttttggagctgtggtttactaatatgacattttctgattatttgtaggtacttgacaatgaccatggaatgagcatgaggccaatgcctggcattgttggtctcatatcttctagttcaaaggtagtttagccttccacaccaacacttgaagttatccattttgctgttgtctttaatgagaaacattttccattttcctgttgtcttccatcgcactgttgatctcagtcatgacgccagtctctttgacttgcactaccaattataacatctcgtgacttattggactttttgcttgccaggaaaagaagaagcaagcaccagcgaaaccatctgatgccaaaagaactcgtagggatcgcnnggagatggaaaacgttatattcaagctttttgaaaggcagcccaattgggccctaaaggcactcgtgcaagaaactgaccagccagaggtatttccttgtccctttcctgaagtgtgatgcatattattatttatgtttcctctattgttctctgactgctcgtgtggttattatttatgtttctctatgcagcaattcctgaaggagatattgaacgatctgtgtgtgtataataaacgaggtccaaaccagggaacgcatgagctcaagcctgagtacaagaaatccacaggggannnnnnnnnnnnnnnnnnnnnagaga

SEQ ID NO: 2468 - DNA, 979 bp, Zea mays
cgcagcatttcttggcgtcggtgtccgcgggttggcgactaagcaatggcgacgaggaaccaccgcgccgctgccgctccgcagccggcgaacagaggtgagcggtcggaatcttgggtctttcgctgcgcgtagttccagttcttgatctgttgttcgcctgcttgtttggaccctccaccagcaccaagaacgggtttcttttcatactatgtgctgccaggggacgcctggtttccattcacatgtcaagatttggtttctatgtatccccgtttctctggataccgatattcttgatctttccaggctccgttattagatccgtgtgccaagttttgattgctatgtagacatgtagtagtccaagcttgttcgattcgatttcttgaactatctgctcctgaatctcacgccaagcaaagtttctgttccaaacagtccgatctttgtcatttcatttgctccgatttcacacgaatttcatcccgtgcaattgctgatcgaattgccgtcccacttcggcgatggtcaggtgccgcgagggtcgccgggaaacagaaagccgccgccgccgggacacgccgagccctcggtgacattggcaacgtcgtctccgatgccctcgacaggtaagacggtagaaatcgtcgtggccgttatctttctttaatatcgtcatctgaaacttgtctgcgtcgccgttacagggcgatcaagctgccggaggggatccatcgccccatcaccaggagcttcggcgcccagctcatgaaggccgctttggcgaacaaggtaaagaggacgaatcgcgttcagttctgcgatttctcgcatcctaagcgtctgatttggtctttctgatccccccaatggttggttctacagaacgccgacgccgccgtagctcctgctcagcctgtagcggcgcgcgccgttacgaaaccagctaggaaagtgactacgaagaacgtccctc

SEQ ID NO: 2469 - DNA, 578 bp, Zea mays
  misc_feature (568)..(569): n is a, c, g, or t
gtcctggcgctgggcaggctcccaaggagaacaagaagccatcagcagagggtgccgccgccggcagcggccgctctgtgcagaagaacaggaggaagaagcccgcgtgcacgctttcgaccgtcctttctgcgcgttctaaggttcagcactcgttctcctcctgcatcattgctgatcggttcatcagcatcgtataaacctgtgttgctttgttcccgtcgacgtcaggctgcctgtggccttaccgagaagccaaaggagcccatcgaggacattgacaagttcgacggcgacaaccagcttgctttggtggactacgttgaggacatctacacattctacaagaccgcccaggtaactgcgggttcatcttcagcaagccatgttctgaagcaagcctgatcatcaccatacaccatgtttgcgtcttgtgcagcatgagagccgccccattgactacatgggcaaccagcccgagctcagccccagaatgcgctccatcctcgcggactggctcatcgagtctcaccgaagattccagctcatgccggaaacgctctacctnncaatataca

SEQ ID NO: 2470 - DNA, 396 bp, Zea mays
gaagaccagaacatacactgatggccttcggactgtgctgccctataacttgctatacgcacaaatccgttcaaaacaaaggctaagtccaatggtaggtttaagctgagacctaccgcacttgctgattctatctgaactgtcgatgaaacagagtaacaactacaatcatgccgccaatgtacaagatctactgcctaccatgtaccctctgatttgttagttaacgggcctagagcatggagactaaaggtatcctactgatccagccccaatgcaattgtgcactgcagactcattctattttgtctgtctaaggggcaggttaagagccctaactccgaggatccatccactacgtgccccaagcatctgtcatactaacgtcaacgccag

SEQ ID NO: 2471 - DNA, 435 bp, Zea mays
agaagatcacgatgccagcccatctcatgtacgacggtaaggacgacaacctgttcgagcacttcagcgcggtggcgcagaggctgggtgtctacaccgccaaagactacgccgacatcctcgagttcctggtccagaggtggaaagtcgcggagctcaccgggctgtctggagaagggagaagggcgcaggactttgtctgtaccttggcgccgaggatcaggcggctggacgatagagctcaagcgagggcgaagcaagcacctgtcattcctttcagttgggtttacgaccgcaaggtgcagctttaatcaagaacgctaggcaatgtgggcatttactacgtatatcattttcagtcctggggttctctataagaaacagtctctaggttatctagcagggtagaattcaactactcgtggatctcactcg

SEQ ID NO: 2472 - DNA, 922 bp, Zea mays
aggtgttatgccgtctatctgtactaaaatgagtcatcacattgtccttttttgcactatattatattatttatttcacgtttgttattaattattagtaccatggttccctgcctttgcttacttattttgatacttggggcattcatttatcctatctggttaatgtgtccccttctaacacgttggtgtcactgcagatcactgattcaatcatttcccacggatgtttcttggataactgcaggatagaacatagtgttgttggagttcgttctcggataggctccaatgtgcacctcaaggctagatctcttcctttgttgcctggagtatttcattacacagatatagagaaacaagtattagttgtcatagatttggtccaatgttctgtagttagcggctaatgtatcttttcatcttttttccctgcaggatactgtaatgcttggcgctgattattatgaaactgccgtggaaagaggagagctgcttgcagaaggaaaagttcctattgggattggagagaatacaacgattcagtatgaatgcatattttgcttctaccactaactcctttgacatcatcttttactattcaatcctaatatcttcccttttgctctctgcagaaagtgtatcatagacaagaatgcgaggatagggaagaaagtggtaatctccaactctgaagtaagttgatctctacccctttattcaatatatagctgtaccgtgactagcaaactatctgaaatcagtcagatcactttgcaattttcaacaaaataagatgggtacaatgtatgtgtttatcgcaagttgtaggatcttctttctctctgcccgcattgctcttttattttttttctaatgcatacctcttcatagaatgtatcatcaactctaaaccaaatct

SEQ ID NO: 2473 - DNA, 428 bp, Zea mays
cggcgggatgggctgcagcgccgggcttctgtccatcgacctcgccaaggatctgctgcaggtgcaccccaactcttacgccctggtgatcagcatggagaacatcacactgaactggtactttgggaacaaccggtccatgcttgtgtcgaattgcctgttccggatgggtggcgcggccatcctgctctcgaacaggcggtctgacaggcggaggtccaagtatgagctggtgcacacggtgcgcacgcacaagggcgccaacgacaagtgctttggctgcgtgacacaggaggaagatgatattggcaagattggcgtgtcactgtccaaggacctcatggcagtggccggagacgcacttaagaccaacatcaccacgctggggccgttggtgctcccattatcagagcaacttctcttcatgg

SEQ ID NO: 2474 - DNA, 424 bp, Zea mays
gtggtgaaccattacaagctgagggggaatattgtgagctacaacctcggcgggatgggctgcagcgccgggcttctgtccatcgacctcgccaaggatctgctgcaggtgcaccccaactcttacgccctggtgatcagcatggagaacatcacactgaattggtactttgggaacaaccggtccatgcttgtgtcgaattgcctgttccggatgggtggcgcggccatcctgctctcgaacaggcggtctgacaggcggaggtccaagtatgagctggtgcacacggtgcgcacgcacaagggcgccgacgacaagtgctttggctgcgtgacacaggaggaagatgatattggcaagattggcgtgtcactgtccaaggacctcatggcagtggccggagacgcacttaagaccaacatca

SEQ ID NO: 2475 - DNA, 524 bp, Zea mays
  misc_feature (510)..(520): n is a, c, g, or t
tgcgccacatgtaaacgatgacaataatgtagaaaagtgaaagaaaatgaagttgcaggtatagattcatactccactgagtcctgaagagctgccaagtggctctggaggtaatctattcttttctggtcattcaagttattgccaaggtcaacttcagccatccctgtaaacaaaaaaacacaacaaataaatcagcatgtgtgacaaagcttagactcgatgcaactgatttcattttcattatagaccacatgcatgcatgtgtacgttaattactggatccggccggtcttaccgttctcagtgatgtacatgggtgggtttccgtatttctccttcatgatcttaaggagatcctttaggccttgaggatacaggtagatccaattccccatctgcatgcaaatcgaagcaatggatatatattagtcctctttattattgtcaacacaaaatttgcgaacttccctttttacatatgtaaaagtttaaccatgcatgagcacnnnnnnnnnnncagt

SEQ ID NO: 2476 - DNA, 708 bp, Zea mays
cgaaaaaacggcgtttattgatcaacaggccgaagaaaggtcctgggacatcaacctaggatggttcttggagccggttgttcgtggagactatccattctccatgaggtcgttggtaagggaccgactacccttcttcactgacgaggagcgagagaagctagtgggctcatatgacatgctggggttaaactactacacctcaaggttctccaaacacatcgatatcacgcaacacaacacactaaggctcaacactgacgatgcatatgccagtcaggaaagtaagttggcgcgttgaggactaatatatatataacctcttactgctccattgaaaaataatttggcattctctcacatgcttatcgtacattgcgcttttcttcttccgtcccccagcgaaagggcctgacggcgagcccattggtcctccggtacgcaccttactagtacaaatttttgtacaatgtttttatgctgaaactgataatgtgaagtgctcatgcatggttaaacttttacatatgtaaaaagggaagttcgcaaattttgtgttgacaataataaggcggaacaaatctatagtttgttcgtgtagtatgtacatatatattggtaattaattaattagggaaaaatgatatatccattgcttcgatttgcatgcagatggggaattggatctacctgtatcctcaaggccta

SEQ ID NO: 2477 - DNA, 397 bp, Zea mays
cctagaggtggtccgcttaccagtttactatccttctgagcaagaaaaggatgatcctaagctctatgcaaacaatgtacggaaactgatggcagtggaggtatcttaaacacttgaaaatgattaattacattgaatggtattgctgtacaagtgtttggtattattgtaaccatgtggtaatcttgatttcttttcagggaaacttgattctttcagaccttgggctggcggagaagcgagtgtaccatgccgcactgaatggtaatagtctagctcgtgctttacatcagaaagatgattgaaatgccatgctatcgtgcttccataatactggcttgcttgtaactgtgtgcttgcttgtgcatcgtcatggttgagaggaatgtcgtgaata

SEQ ID NO: 2478 - DNA, 345 bp, Zea mays
  misc_feature (243)..(243): n is a, c, g, or t
ttgcgctagcgtgcttgatctggtcaaacgttccctcgagctcgatatttttatggttgggatcagcctcattgtcccggatggctaacttagccccagtcactcgggatatatgctttgtgttgataccactcttcccaatgatggcgccagcaagggatgcatcgacactgatcttggctgtggccgaagcaccgaatgtggagtgaggaaccatatctgggataggcattggaggtggcntgaagtgaccgtttggccctggacccattggaggagctcccatcgagttgtccatctgcaggggctttccaagctccctctctccatgagcaaagtggcatt

SEQ ID NO: 2479 - DNA, 412 bp, Zea mays
gtgtcgatgcatcccttgctggcgccatcattgggaagagtggtatcaacacaaagcatatatcccgagtgactggggctaagttagccatccgggacaatgaggctgatcccaaccataaaaatatcgagctcgagggaacgtttgaccagatcaagcacgctagcgcaatggtcacagagttgattgtccgcatcagtggtaaggtgcctccacaagcaaagaacaacccaggcagggggcctggttctcatgctgggggtcctgcaagcaacttcaagaccaagttgtgcgagaacttcaacaaaggctcctgcacctttggagacaggtgccactttgcccatggcgaaagtgagttgcgcaaacctgctgctgcttgatagatgtgtttagtgtggcttgcggtgat

SEQ ID NO: 2480 - DNA, 413 bp, Zea mays
  misc_feature (367)..(369): n is a, c, g, or t
  misc_feature (380)..(381): n is a, c, g, or t
  misc_feature (397)..(399): n is a, c, g, or t
  misc_feature (401)..(407): n is a, c, g, or t
tccaatgattgtgatgttggccttttcaaataccagtacataatgcttgctgtcagagttagcatcatcttctggttcacctgagagaaataaaacatataaaatacagcagatcgtgactagatcacaaggggaataaggatattttaaaactgaattccgaatagcaccttcagttgcaactggatttgggataacactacatggaaattttggtacgacactaaccggcctgagtttactttaaggtccagtgaatgcaaatggatcttttagggctagtttgggagccacaaaatcggaagggattggagaggttaaaatccactccttatttaaaaaattgaataaagagtggatttttaannnctccaatcccnnccgattttgtggctcnnnannnnnnnctaaaa

SEQ ID NO: 2481 - DNA, 593 bp, Zea mays
  misc_feature (531)..(531): n is a, c, g, or t
  misc_feature (557)..(586): n is a, c, g, or t
tcagtgagatagtcaatgcagaagccgcataacaaagaaaggctgcagaaaacaaggagacatacattacacaatgcatgtcaaaatccaacaggtttgttctggtgactcaacatgagaatgcatcagtcaatagttttaataaatagactatgaattaggtaaactatatgaaaaaacgtgaacaattttatcttcaaaacatgttctttttaggatttacaaacatataggaaaagaaatttttgatcgagatagtagggcataccaggttgtgttgccaactgccagatctgtgtcactgagcttggtgtctcttcttcaggtgcatggaggatgattatggttgacccgattatacagagcacacagcccaacacacccatccgctgcagcttctcattcagggtgaaatgggctagaacagcactgctccatagaccatagagatcatatacaggagcatgtacatgtttttttaaagaaaaggaaagaaaatacacaaaatatttaaccatatccactctccanatgaccacatgatatataacagattnnnnnnnnnnnnnnnnnnnnnnnnnnnnnnctacctg

SEQ ID NO: 2482 - DNA, 470 bp, Zea mays
  misc_feature (444)..(448): n is a, c, g, or t
  misc_feature (462)..(466): n is a, c, g, or t
aagagacaccaagctcagtgacacagatctggcagttggcaacacaacctggtatgccctactatctcgatcaaaaatttcttttcctatatgtttgtaaatcctaaaaagaacatgttttgaagataaaattgttcacgttttttcatatagtttacctaattcatagtctatttattaaaactattgactgatgcattctcatgttgagtcaccagaacaaacctgttggattttgacatgcattgtgtaatgtatgtctccttgttttctgcagcctttctttgttatgcggcttctgcattgactatctcactgatcttgatatttcactgtgcaccccgttatggccagacaaacatcgtggtgtatgtgggaatttgctcagtgataggatctttgacggtaaatgatgtccatgggcatacctttgagaccaacttnnnnntggtttttatgtgnnnnnttgc

SEQ ID NO: 2483 - DNA, 737 bp, Zea mays
agctgttttgacatcggtgcttacattgattgatgaatatgatttatatggtcaagtggcatacccaaagcttcacaagcactctgaagttcctgatatttatcgtttagcagcaagaacaaaggtataatgtttttagccaaaaaatggtggtgccgtatcccccctgaatgccaagaactgaagcacttatctctaatacctttctactttgattttcttccaacaagcattcatggtgtatctaagtgaaatacagtagccattttcttattttaagcattcaccggtacaacttttcttgtcatatgtatgccagggcgcttttgtaaatgttgcttattttgaacaatttggtgtcaccttgatagaggtcagaactattgagatcatgaattcatttatgtatctcaccattttcatgcccttactacctatctgttctttttgtgagcaggctgccatgcacgggttgcctgttattgcaacaaaaaatggggctcctgttgaaatttatcaggttcatgaatcacattgtaccattttatgaattaatagagtattgacttacgtatgtaatagattggatcctttctggtggatgttgatgcaggttctggaaaatggtctccttgttgatccccatgatcagcatgcaattgcagatgccctctataagatgctttctgaaaagcagttttggtcaagatgtcgagaaaatggattgaaaaatatac

SEQ ID NO: 2484 - DNA, 558 bp, Zea mays
tcagaagagttctgctgcaatggtacagtggtccaggacccagaacttggacaggtatggtactccggatgaactcgtgtcccctaggccatcgactttagcctttctgaattatcttgatggattcggttctgcatgctgcccgctataggtcattcagctccagggtgatcagaggaagaacgtctcgaatttcctcgtccaggtacgcaccattcggtgcaacaccttgtgcgcttagagacatgtagcaacgtatgtataaagacaacgctgattctgttcctgatgttgtcctggcaggccggcattgtgaagaaggagcacatcaagattcatggtttctgagcaaccgccgggtccatagcaaaccaaccctgcatgcagggccagcttattatatataatatctgaggtggagcatatctatctggctgtgtactacaagcaggcctagtacgccgcctgcgcgttcctcctattacacataacacatatagccccctccctgcgtgtatgcttgttgccgtcgtgtcgaatcttgtactacgaggctcc

SEQ ID NO: 2485 - DNA, 617 bp, Zea mays
atcgaaaacatcgatgccatggacgacacggtagagcccaggaagagtgaacgcgatgtgggactcgtactgccccacggtgtccttgctgcagaaacaacacagaaaacatcacatactagttttatttactactaaagcacagcgatactaatatacaaattctaccttcccgcgatttcttggaatgtgctggtgatgatgaaatcggtgtggttcatggcaataaggtcagctgtgaactggcaagagaagtggtactggctgtcgaatttgtccaagtagatgtccgagttggggtatttggttttctccaaggcatgagcgatggtacactgcaagtatgtacaaaaccattaatcatttgaaataacttaataattttaaagaaacgcaattaataattttaaagatacccaattactcatgtaaaaccaaacagacctgagtgactcccaacttgtgcgcgagcagagtggcgactaggttgccatcgctgtagttgccaatgataaggtcaggcttggcctgcatttctttcattatttcactggaaacatcctgcagcacagaatgtatggcttcagtattactcaaacatgctatgctgtgtatag

SEQ ID NO: 2486 - DNA, 444 bp, Zea mays
taggtagacggagactttggggcgagtaccgtctcctcctcctggttcctgctcccattcctatggtagcgtcctctcagctctgcgagcggcggcggctagaacttcttgttgtaccagaagacgcccttgcggttgcggttctcaggctcgacgtagatgcactccctggcctcgcgccaggtggccttggcgacaggggtcgggtcgaactggtagtactcgccgaggacgggcctgatcgccctggtggcctccacggcgtggtagtgcggcatggtggagaagaggtggtgcgcgacgtgcgtgtccgtgatgtggtggaacacgcggttgaggacgccgtagtctcggtcgacggtggcgagcgcgccgcgcagccagtcccactcgcccgagtcgtagtggggcagcgccgggtgggtgtgctgcaggtacgtgatg

SEQ ID NO: 2487 - DNA, 397 bp, Zea mays
ccgcactaccacgccgtggaggccaccagggcgatcaggcccgtcctcggcgagtactaccagttcgacccgacccctgtcgccaaggccacctggcgcgaggccagggagtgcatctacgtcgagcctgagaaccgcaaccgcaagggcgtcttctggtacaacagcaagttctagccgccgcttgctttttccctaggaatgggaggagaaatcaggatgagaagatggtaatgtctgcatctacctgtctaatggttagtcaccagtctttagacaggaagagagcatttgggcttcagaaaaggaggcttactgcactactgcagtgccatcgctagatttaaggcaaattcagtgtgtctgtgcccatggctgtgagctttgggtactctca

SEQ ID NO: 2488 - DNA, 424 bp, Zea mays
  misc_feature (419)..(420): n is a, c, g, or t
ggactgtagttgctattgacggtggcctatacgagcactacaagaagttcagtgcctgcctagaggcgacgctcacagacctgctcggcgaggaggttgcctcatcggttgttgtcaagttggccaacgacggctcaggaattggagctgcacttcttgctgcctcgcactcccagtatgctgaagctgcatagttctaggagctcgggggtcctagtgtaacctttttttttgtttcccaccatttcccccttcaatcgagaagcccccctcgtgcgattcgcatctctctattttcttccctcagcagcgggatatagctaggatggtgccattgagcttggagtacattatcactagcaacaagcattagcagcggcaggaaagaagtggaagcggaggcctgaataagccgttcnnttcc

SEQ ID NO: 2489 - DNA, 398 bp, Zea mays
gctgctggtatatatggtattctgaagaagctgggtaaagacaaattgctaggtgactttagccaacaaaggactgtagttgctattgacggtggcctatacgagcactacaagaagttcagtgcctgcctagaggcgacgctcacagacctgctcggcgaggaggttgcctcatcggttgttgtcaagttggccaacgacggctcaggaattggagctgcacttcttgctgcctcgcactcccagtatgctgaagctgcatagttctaggagctcgggggtcctagtgtaaccttttttttgtttcccaccatttcccccttcaatcgagaagcccccctcgtgcgattcgcatctctctattttcttccctcagcagcgggatatagctaggatgg

SEQ ID NO: 2490 - DNA, 384 bp, Zea mays
ttgcttgttggcagattccgagcaaacttgttcttgaaaacgtacaggaattcaccacgagttgcacaccgacacacgcggccgttgggcgttcagtactgcgagtgggcagctgcaatgagggcggctccgaggccagacccgtccttggtgagcttgacctccaccagcctggacgcctcctccccgagcagctccaccagcgtggcctccaggcgcttcctgaactcggcgtagtgctcgaacaggccgccgtcgatggcgacgaccgaccggcgctcgtcgcctggcgccgctcgaccgatcttcctgagaatcccgacgatccccgccgcggccagccgggcagacctcccggtgacgatgtcacagatgtcgaccacc

SEQ ID NO: 2491 - DNA, 904 bp, Zea mays
  misc_feature (890)..(896): n is a, c, g, or t
cccggcgaggtactctgacgcatgcgcgagcgcttctcttcttctcttttcgctgtgcttttagtctgttcgtttgatgcccagatctactaggtttgtgtgatgagccgagccgatttatgcactggatttttagtcaagtgttgtttccgcctccgctatctttagtgtctatgtctgaatttgggttcagtgattatcgagctataaattatagttgttgcgctgttctatactagatccagttaccgatctatgatattacggggttgagcgattcatgtgctggagtactagtccaagatttgcttccgtctcctcatctacctttagtatgtactctgtatataaacttaattgcagtttgcaactgattctcggccatatattacttccgttgcgttgttcattagatccatttccgatccctgatattacgtgggtggggggtacttcgactttgtttttttcggattgtttgattactggtctattcccatacatatttgtttctcattgattttatataattttgatgtaagcagcagtgtaacattttccttcagccatgggcaaggagaagactcacatcaacattgtggtcattggacatgtcgactctggcaagtcgaccaccactggccacctgatctacaagctcggcggtattgacaagcgtgtgattgagaggttcgagaaagaggccgcggagatgaacaagcggtcattcaagtatgcctgggtgcttgacaagctcaaggccgagcgtgagagaggtatcacaattgatattgctttgtggaagttcgagaccaccaagtactactgcactgtcattgatgcccctggacaccgtgacttcatcaagaatatgattactggcacttccnnnnnnngactgcgc

SEQ ID NO: 2492 - DNA, 919 bp, Zea mays
acccgtgagactgtcaatgtcttgcaagactgctatcctgagaggttggggcttgcaatcctttacaaccctcctaggatatttgaatcattctggaaggtgaccactaccgactttattctgttcactctaaaaccagcatttcttctgtttcctgccattcgcacaggtgcaccacagcaccagtatgagagtgattgctacgagagcctaccatgatgttgcaataaataggtccatactaatggcctaatgggatccagtcaactttttattgtgcttccattcttcacttagatttgtttgttaaataattaaatttggtaataccattcttaatgaatttgaactactaaattcaaatgcaatgatcttcatctgtgttccatgatgttttgtgcactctactgttacctagaccgggatccaaatcatggaaattgatctatatgaaacataaaagatgttcactgaaaatgcactgtatggattcattttgtggattaggcagcaatatccaatccttttgtccctcggcattaattataccatctcgcactgctttcatcctttttctactaacctaagttattccattgattgaaacaccaaccagtctaaccataattacaactgacagatagtgaagccgttcctagaccatgagacccgcaagaaggtgaagtttgtgtactccaacgacaaggagagccagaagataatggcagaagtctttgacatagaggagctcgactcggcattcgggggaaagaacccagcgacatttgagtacaacagctacgcagagcagatgcaggacgacgacaagaagatgggatcttcgcacggctcagccaatagcttgcttggatcagctgggaaggaggctaatggcgcagactcggacgcctcaagcgag

SEQ ID NO: 2493 - DNA, 974 bp, Zea mays
ctgagcacattctatatctagcaattattccagtcctacttcaaacttccaataaaagagtttgcatagacgtgataataaatgtcaaatggtcataatgagtttgcattggctagtgtcctgcataaatagcttacaaaaattcaacaaatctcatattaacttctaatgaatagaagataatgatgttacactaaagatgtgttgcagcgttcctgaggtcatatttcattttcagactttctagctgactggttgcaacagggctgccaaagctaacatgatgaaacgtattgccaaacacaaggatgtgcagagcgtttccgtctgatgaccatcagatgccagtattgacttaagcctagttgtataaaactacagctagagaagcacactatacacgtacttctgctgcttaagtagaaaatttctagatttgtctttaactcttaaaactctatgttgtctcaacgtagcaaacctaggagaaggattgtaatagtcttgataagctaacgttaaacctaaccattctaacaaagataaaacataaaaggttaagtttcaattctagcctacccaaacttatctgggactaaatgactttatttattgtttgttgttgctgtcttcactcttaagaaacaaaacaggattaaagtattgaacccaccttggttcttgtactgtggtcgaaatggagcagaaaggctattccagtcctcggccctctccctttgcccggggttattgccaccagcaagttcatgtttccttgcgccagcagggtggaaaggaccataaacaatgccactttgtttaccctgtccaagccgattccgtacatctaatttgcaatttatcaagacatcgccaccactctttgccagttttgctttcttctgaacttttgaatctagattacttctatgcatgtcgatgttagtgagttcagttccaaatgctcttttgtt

SEQ ID NO: 2494 - DNA, 534 bp, Zea mays
ctacaccgaaattcggctggaagaagtgcccgagatgggctatgatccactcggcgttccttcgcgtggtgaaatctgcatccggggaaaatccctcttcgctgggtactacaaaagtccagaactcacaaacgaagccatcgttgatgggtggtttcatacaggtgaatactcgatttaatgagggtttgttttttttaaaaaaaagtaggcaaggttccattccacaatacaatgctcaaacacacttattttcaggtgacattggagagatgaccccagacgggatcttgaaggtgattgacagaaaaaagaacatatttaagctgtcgcaaggggagtatgttgcggttgagtacctggagaaagtttatggcttccctccactcgttgaagatgtaagtaaactaattcagcggctatagtatatatggctgaattaagagggaatattggccagcatttaacattgtcatttttttttctagatctgggtatacggggacagtttcagatcaagtttagttgcagtag

SEQ ID NO: 2495 - DNA, 386 bp, Zea mays
cttgctgacggacgttggcgcgacagacacggcgtgtgcgaacaactggagctgcttccggttcgccgtttggtacgcctcggctgcctgtaggggaatccatactctcattgttgacattttcccccccttggaatcctgcttgcccccaagcaggagcaaaaggataacattgcctcaggttgtcttggtcttcccatgtggctaactcagtaggaaggttggaccactgcaccagaacctgtttcacaaagcgtttacctttagcaaagccacgagtctgcaaaatacggagtggtatgctgaactctggcagttcatccggtaaggaagaagtagcagagcccgagaaaccttttgccagcttcagttgggagacatgaacg

SEQ ID NO: 2496 - DNA, 364 bp, Zea mays
aaaggagctacagctcgtcggcataagtgccatgctgatagcaagcaagtacgaagagatatgggctccactggtaggctggctgattttgtttctaaaacatgctatagtccattcttcgattagcttacacaacaagcagcgatattttacaggttaaggacttgatgtgcctctgtgacaacgcatttaccagagaccaggttctgaccaaggaaaaggccatcctggacaggctccattggaacctgacggttccaacaatgtacatgttcattgttaggtacctgaaagccgcaatgtgtgacacagaggtatagttgtccaagtaatgttgttttagcaccacaccacacatttagat

SEQ ID NO: 2497 - DNA, 393 bp, Zea mays
cagtcataaaccactcaacgtcggcaacaagaagccacttattcctcaggcagcagcaagaggcctgcgaccccttgccgacgttacgaatcttatgatcaatgaccgtgctgctcctgcaaatcgtcagaagcctctagatgttgtgtttaacaggaacgggaaggcagtaaagctgaaggaatgcaaggtgaagcctgaagtcattgtgaccattccagattccgagaaggagaagaaaggcaaattccctggtcagagagtctgtaggagggtgccaacactttttgacaatttgacaaaatgcagcagggtatgaacacaagcaaaattctaaggttaaggttgtctctttctttttgattctaagaatgcccgtgtaccccttttgtg

SEQ ID NO: 2498 - DNA, 637 bp, Zea mays
ctatactactatatacacatcacaaaaaaaatgcaggaaaacgtttcacaaagctggtggctagtatcaaaaaaagaacttctaaacaatcagaggacgcgagtgaaagatatggaagatggctagggctgcttcttgatccgtctcgaggtggttttggccagagcattgcatatctccctctttctcttggcgttttcgtccatcttcccagaggcaacgttggcctgtcgttccagcgcttccctcacaaagaatttcagcctccatagagttgtctcgctctgcatcagggagcatagttaaaacggacagggaaaaaaaagtcaaaatggtaggacggaaattctcaagttaaacgcgcagggtggtggtattctttccttaattctaagccatgatgcagtataaccagttaaggctatggtcattgaaacaaacaaaaaagaaagaaagaaagaaagaaagaaagggtgaacacaagggaacacataaaccattacctgggcatccatatcaagatccacttcttctgctttagtctggaagctaggattgtcttgtgcgacaatctctagcgccttgctaagatcatctggagacaagtgacagatacctgcacccagcttcctcttct

SEQ ID NO: 2499 - DNA, 440 bp, Zea mays
  misc_feature (11)..(12): n is a, c, g, or t
cttctcgatgnncttgacgacgtccatgccctcgacgacctggccgaagacgacgtgcttgccgtcgagccaaggggtcgcgacggtgcagatgaagaactgggagccgttggtgttgggcccggcgttggccatggagagcacaccgggggcggtgtgcttgcgcacgaacttctcgtcggggaacttctcgccgtagatggactcgccgccggtgccgttgccgcgggtgaagtcgccgccctggcacatgaactcggggatgacgcggtggaaggtggagcccttgtagtggagcggcttcccggacttgcccacgcccttctcgcccgtgcacagcgcgcggaagttctccgcggtcttgggcacctcgttggcgtacagctccatcacgatccggcccgccggggcgccgccgacggtcatgtcgaagaagacgc

SEQ ID NO: 2500 - DNA, 1155 bp, Zea mays
ttttgaggaactagcctcgtaatgcaaccaacctgcttgaggaaacttcagttctctaataaatcttggagagaggaagatgttcaaacaagtacaaggttgtgaggatagaaagcatactaatggttgagaagcttgtgtggaagcaagcttcaactgcttcctaagagctgctttgtttgctgactttccatatagatcattagcactgtattgaaccttgagaaacctatccgtagacggattccaagtatctgtgtcaatgccattaagtattccaacaaatttcttggagtgcactttgagtgtatcttggagcccacgcccaccctgagcaacagagtaaattcgtcagaaacaaagcgaggagacacttcatttcacaaaggggtaaaactcaatgagattaacaatgatgacaaagcttaagacagaagacatggttctaaaatatattaatctcaaatcaaaacaccagaaccatttcaggccttatgtaagatagtgtatctgaattaggaaagtttcaagcattcaacctcttgatccaactccttacgatgcaaaaataaaacaccgacggatagtttcgggtcagttcattttatcccatttgtccagattaatttaatgaaaatgagtttcagataagcaaaatttgtatccatagcagcttctgtgtaatgatctacaatatttttttatcatgaagaaatatcaagaagaaaacaatggaatgttgcacaattggataaatactagatcttttggggaatatttattgcattgtctctttagttttcttttagatgtctttacagtttttagtaagagaaggaaaatatgggtgcgaaaatgtttctattatagaacatacaagagaaaaggccagaattttttttcttcaaaacagaagaccaaaagtcaatacattagttgcaaagttgcatccaatggagccacattggacgtagaggtcataatattacctctgagcgaacctcttgtgcatatgttggtgatacagttgtcacaatgttggaatacacaactgcaccctgaacaataagtgcataaaagtgttagtgctaccataagactgaagtctagtcccaactctcctgttacaaattttccataggtaaataccttaac

SEQ ID NO: 2501 - DNA, 529 bp, Zea mays
aatccacggtaaagcccagcaataccatcagacttgagtgtcttgcggtagacatcgacaagcccattgaactgcctttcacctcctcccttggcagccttcgcgtcattagccaaccttgttctcgcgtagtccagggagtacacaaaaaacaaagaggaagcaccagcagcaccaccagaggccaggttgccagcaaaccacttccaatagccatccctatccttcttgaagttgaacaacctcttgaagtagtccttaaatgcaaagttcaaagcctgggacaaagatttgaagacaaattaataatgtacaagttaaagtgtagtcggtaacttgtataccttgcaaagccaccaggaacattcaaccacttaggtaagaaagatcacggtgtttcaacatatttacagatgttaccgagtaaaaaatatgatggaaggtgtgggctacctgagtagggaagtaacgaataacattagcagtgttacccctccacaaggaagagaaaccttcatccttaatggta

SEQ ID NO: 2502 - DNA, 414 bp, Zea mays
tgaagtccattgatatagaatgccatgcatgcgggggaacaggtagaggcgcgagcagcccgggatagctggtcctgtccggtttggcctgttggcagatattgcatgtctggacataggcatggatatctttcttcatccctttccaataaaatagctgtttaatccttctgtaggttaccagaaatccagaatgacctccgagagcagaatcatgaagagctgctataattttgagttgtaacgttgtattgttgcctagccacacacgccccttatgtcggatgacaccctggactagagtaaacggagagttgtcgttgttggatgatatagtcagttgtgttaataattcttgggcctgagaatcatgctggtatccctgtaccacctcatcaatccaggtaggtgtac

SEQ ID NO: 2503 - DNA, 452 bp, Zea mays
ctagctcagcaccaactatctcaccaataccagtacttactaccagtgtagtttcattgtaacaagaccttgcggtttgctagaagaaacgatgtcctccaacaatcagaatactatgtgcgttccgcatcagatcttcctcacctgaatgttgtgtgttgattgtgatctccagatgggatgtttaccactttgaacaagtgcaacctccttaccgtccttaaccataccatgtttctgtgaaatgcgacatcatgttaggatatccgtcatggacccatggtgaaacaaatggtaaaaaaaaatacatgatacaggaccccaatattgctttattgtaaatccatagtctcattctgctactaatagctgcagtgttctggtcagattgccaagataaagatgtgatatgaccgcatcagatactccagcccccccccccccaaaaaaaa

SEQ ID NO: 2504 - DNA, 452 bp, Zea mays
  misc_feature (297)..(299): n is a, c, g, or t
  misc_feature (441)..(444): n is a, c, g, or t
ctcacaccagttcggaccaccaccgccccccatgggaggaggtgcttcgacccatttcataaaatgcagaaaatagaggacccccatggagtgtgggatcaccaccaccccatttccaccatttgttgctaccatgagttcaatattgctctttattctgctcaaagtttgatcacgaacctgtatatagtaatctgcgttacaaatatggcaatacattttataccagaaccatttacacggtgggaactgggaactatcactaagcatcaaaagttcataaccaaatagctaatnnntggtgacttctgactaaaatttacttgtataaggccatccaagaagagtacctcagtgttctggaaagataacctccaatcatatgcagccatgtacatggtcttttcttcatatccaatacgagctaaattggcaattaannnngcccaaaa

SEQ ID NO: 2505 - DNA, 419 bp, Zea mays
gcgtggcaaaactcgtttcaaccctgccggcagcaagacttacgtgagagagtacagccattcaccaccctcaactctcctggaaggcaggggcactcagagcggtgcacatgttgatataatggggaacttcgctttgatcgaggacatcatcaggatagctgccggggcaaccggtgaggaaattggtggcgaccaggtttattcagatatattcaaatggtcagagaaaatcaaattgaaattgtaacccatgggaagttaaaagaagtgccccaacccgttcattgcgttcctaaatgcttgcctgagcgcaactctggattttgcttaaatatcgtaatttttttcacgcctcattcgtccctctagtaaatttacattgacaggaccccggtgcgacgcggatgttgtaccgt

SEQ ID NO: 2506 - DNA, 452 bp, Zea mays
agagtgctatataccattccggattgacgcctcggctgatggcggggaggaaaacaaatgcttgaaagggggtgtttacttagctgacggtgacgaaactgttccagttcttagcgcgggctacatgtgtgcaaaagggtggcgtggcaaaactcgtttcaaccctgccggcagcaagacttacgtgagagagtacagccattcaccaccctcaactctcctggaaggcaggggcactcagagcggtgcacatgttgatataatggggaacttcgctttgatcgaggacatcatcaggatagctgccggggcaaccggtgaggaaattggtggcgaccaggtttattcagatatattcaaatggtcagagaaaatcaaattgaaattgtaacccatgggaagttaaaagaagtgccccaacccgttcattgcgttcctaaatgcttgcctga

SEQ ID NO: 2507 - DNA, 1209 bp, Zea mays
tgatcagggaactcaagctcaagttgcaggtaagatggcttaacatctcaatgtacctttggaaacttatgggtcactggattgttgtatgtttcttgatgcattcctccttccacatccttcatatgttggttgaaaattgctgtacttcaggtttgattaacttttcttatgtcgttttaattcttttctcaccaaatttcttaggtcgttatgtcatttcatgaatgtggtggcaatgttggagacaatatatccattcccctcccacattgggtaatagagattggaaggagcaatccagatatctactttactgacagggcaggaagacgtaatacagagtgcttatcatggggagttgataaagaaagggttttgcaaggcagaacagcagtggaggtacagtcatttatttatttattttctcttgaacacatgagaactgtgtattattttaaataagatagggtaaataatcccgattacacccacccacacccataggttcacaaaattaagtacgcctttttcttacatgacctagaatgacctagtcactaggaacattgcctgatagggggatctcttgcgctccagccattgcccaaagctgagcctcctcagcaagtagcaagccagcttaaccatattggcagcaaagtcgccgaagacacattgattcctatgtttccgaagtgtccaagcgcctatgataattaggaaatttatgcctcactgcaattgtccatcgaccatatcattggctctgttccaccagtcctagaaagaagcatcattcagcataggtgctagagtttgcagccaaagcgatacaggagccatttcacattttcaccacatccacacagcttatcatcttattgatttccacttttgtccttgagcaagttctgttactactgctttggacaataactggaacctgagaggctgagggtggctttacatgaaacagatatgttatgtataccttgtcatgtccagtactttgatgtgtgtgtatgacgagactattttgttatgctacaacaatgcatgttctctatgttcaaacatttttattcatctttgttggaggttggaaggtcaattgtgtttaattgtttcattcctatatatcaatgtaggtatattttgatatcatgagaagcttccgagtagaattcgatgagtatttgaggatgg

SEQ ID NO: 2508 - DNA, 261 bp, Zea mays
  misc_feature (254)..(257): n is a, c, g, or t
aggtaaaaagctccggacgccgccacctcacttgctggcagcagccttaccggcggcggtcggggcgggggcatcatccttgtgcttggccgccgcgccgtcgtcaccggtgccttccttggcgaaggcggagacggggtaggtcctgccgagcccggtgggcgtcttgaaggtgatcttggaggggtcgtccctgtcgacgaacatgtcggagagggtgacccagatgaggagctccttggtcttgaccccgnnnntgcg

SEQ ID NO: 2509 - DNA, 386 bp, Zea mays
acgaattgaccgacaagatacataaagaggtaaaaccttgcatgggtgcgtgtgccacaaatacagaaactacccggccagcgacatatactatctttcccgccccgccccctatagtctaagcagattccatgaacaaagggcatctatatctatctgcacttgctgtatctatcaagctaccatactcatgaagcagaagtattaaaaaaaacacttctggtagcgacgactttgagcaccatgaaaagcactgttccctgtataaaaaaacagcactgtgtgtgggaaaagaactgggtctgcataactataaccatcaggaccctgccacaccatttccgttttcagtggatggggcgtttgaagtagcatcatccgtgtca

SEQ ID NO: 2510 - DNA, 1055 bp, Zea mays
  misc_feature (998)..(1003): n is a, c, g, or t
tgctgcgatcggggtgcgcgctctcacgggtgatgctcttcgtcttcgggttctactggatccgcgagacccgcagaaggtccactaatgctaaggttagttccggtgtcatgcctgtactgaataatgccagcgttttgcttcagaagtactgtatttggtcctagagcaccaaggttgatgttttgtaggaagtggagtgatagcgacactaagttcagtgttactcactacgtatgtataatataatataatggtttgttttgcttgttcagatagattgaagttaagtttgattgatgttatgtggcttgtattagtcacgaatctaaaatctggatggtacatatattctcacttttggacaatgtatagggataccctgtgtgcccctgccctttcaacttccagaaaaatatcttagcgctcaattcagtttgcgatatctagcaatagagacgtttggtcccttacaacactcaacggatttggattgtacttcagtaatggcagtgatttattttgcacataatgcatcatattactttcaaagattactgtggttctgcccatgcgactgaactataaattttgtatcctggtttccttgtcatctcggtttacattttatcagggtttaaatcaggaccaatttgaagaatcccaaaggccaggggcaattgtatctaatcatgtctcttatgtggatattctttatcacatgtcagcatcctttccaagttttgttgctaaggtacttatttgttgttcctaataacttgttcacactttacaaatcaatatattctagttttgtatgtgccctatcaatgcttaaacacatcctttttacaggagtcagtgtccaggttgccacttattggtctcataaggtacctttttcttgctcattagtattttcctaattttcggtagtgtcttattcatatatgtattctgctagaagatgaacaactagtttcatttgtatcttcctnnnnnnaaatgtacaatatattgaaaccaactttacttttcttttctggtgtaatgca

SEQ ID NO: 2511 - DNA, 393 bp, Zea mays
gcggtggcggctgccgtgggcaaggatgccggcaagcttccctcagctgcagacgagcacgtcctcgtcaacattgccaagctcaaccccgccctcccggagaggacctccgggacgatgatgcacccagtcacccagatggcggccgttcctgccaggagctgcgctgctgaagcaaccgcgccggcgatgctgcccaacagggacgtggtcgacgtcttcgtcagccgacacagccccgctgtccacgtggtctagcctctccatcatcgcaagcaagcatgaatcgagtcgagtccgaacgcataattaagcacccaatctattggatatataaatacgcgcgccccaacatgtgcgccatatagcagtttgttccaacccttagctttg

SEQ ID NO: 2512 - DNA, 1021 bp, Zea mays
  misc_feature (447)..(454): n is a, c, g, or t
  misc_feature (468)..(470): n is a, c, g, or t
tatgcacacatttaaatagtttcactctgtcggtgccactgttttggctgtgcttgctcaagaagtaccttgtatatttttggtcaactatgtatttgacagaagattccttttaattgctgcaggtcccggatatatccttgatgttgctccagagaagattgaaaaaatgttcttcgatccatgtaagtgtttcttactttttctcttgaaaactgttaaaagagactgcaatgggtatcattttactatggttgcatcaatttgcacttccaactcatatcatgctttcttttctatgttatataagcttgtttactgctgaagtaggcattcatcataaccaaatcaatgaacattggatgacgggaaacatcataacttcctttgaactaacttcttctgtatgtattacaatttagtggattttggcattcctcgctgcannnnnnnngatctgaaaggagnnnatccagcgtttaatgcaaaagttctccaggatgttcttgctggtcaaaggggggcgattgcagatgcccttgtaagttagccctagctacctctttctggtttctgcgcattgtatatttcttgcatatatcctgatgaattcacaatgttctgtacccaagatcttgttaatcagctgtgctaactaaaattcagtgtattgattaccattatttcggtacaaaactgttttcatgaattacttgcttaaaataggaaaactgattaaaaattgtagaaatggactgcacttgtaatgatcaattgccatttagtacctataagctttaggctaattcctaattattacacaggttctaaatgctgcggcgtccctacttgtcagtggtaaagtgaaaaatttacatgacggtgttgctttagcacaggagacacagcggtccgggaaagccattaatacacttgagtcttggataaaaaaatcaaatgtaagcacataatagcttctaatggggtcttctatgtttcatgagctaaacattgaacatga

SEQ ID NO: 2513 - DNA, 301 bp, Zea mays
  misc_feature (97)..(106): n is a, c, g, or t
  misc_feature (144)..(147): n is a, c, g, or t
  misc_feature (169)..(169): n is a, c, g, or t
  misc_feature (293)..(296): n is a, c, g, or t
tggagaagaatgcaaaggttaactcgtgctaccagttatcctaaaccctacgccataagctacctatatatatatcattgtttttttttctcggttnnnnnnnnnngcaccgtcgtcactcgtctcgtctgagcctctctgctnnnngtcgaatctttatcgctggctncgtcacgccggaagagggcaaaagactcgagccgccgacttcacacggccacgtcgggaacgaagctcagagcagcgcgacggcggcgagggcggcgacggctaggaggagctgtgacgcacgnnnngcggc

SEQ ID NO: 2514 - DNA, 302 bp, Zea mays
  misc_feature (72)..(74): n is a, c, g, or t
  misc_feature (76)..(77): n is a, c, g, or t
  misc_feature (80)..(80): n is a, c, g, or t
  misc_feature (88)..(88): n is a, c, g, or t
  misc_feature (97)..(106): n is a, c, g, or t
  misc_feature (144)..(147): n is a, c, g, or t
  misc_feature (169)..(169): n is a, c, g, or t
  misc_feature (294)..(297): n is a, c, g, or t
tggagaagaatgcaaaggttaactcgtgctaccagttatcctaaaccctacgccataagctacctatatatnnntnnttntttttttntctcggttnnnnnnnnnngcaccgtcgtcactcgtctcgtctgagcctctctgctnnnngtcgaatctttatcgctggctncgtcacgccggaagagggcaaaagactcgagccgccgacttcacacacgccacgtcgggaacgaagctcagagcagcgcgacggcggcgagggcggcgacggctaggaggagctgtgacgcacgnnnngcggc

SEQ ID NO: 2515 - DNA, 666 bp, Zea mays
tattcttcttctatgaattgttcccaaccattgtttcgtcagagtctcatgatgccctaccatttgttggaacaattattcgagcgatgcaggtatgcattttttcaattttcctacgactgtctacatttccaagtttcttctaagacagatttttgcaggttatatatgttgacagattctcaccagcttctcggaaggctgctgtaaatgaaataaaggtaaaaaccgttcctcttaatatgtgttgtgatcacttggttgcctttaaaaatgttgcattgtattttgtcacatgttagccaccccgttgatttatgtaagttttaagttattgaatatcactgctctacattgacttaatatatggaaaaaagtaacaaacagaaggatatctacaagctacttcttgcagttgcctgctttacagatccttttaatttcgtttgcagctgacatcataattgattctaaaatcgactccagccaacttgtcctagaataacatgattgtcttttagttatttgttcatatggtacatactctctaggatgtcctttcagagaaaggcagcttgcaatagcttcccgcgggtcctgttattccctgaaggtaccacaacaaatgggagattcctgatttcgttccaacatggtgcattcata

SEQ ID NO: 2516 - DNA, 512 bp, Zea mays
gatgcaaaagttatccaggctgggttgtttaacacaacttccacaggtgagtttgagtgatctaattcctatttatttaatttttgtctactacacgactggaactcgcatgacattttcacgttcatttcccactacagcacaggacagacgagcattgctgcaggagatccttaggagggggacaagctcgctgggaacagatatccccagtgagcgcgagataaatcgtttggctgcacgaactgatgaagaattctggttgtttgagaagatggatgaagaaaggaggcttagagaaaactacaaatctagacttatggatgggaatgaggttccagattgggtattcgccaacaatgatttacccaagagaaccgtggcagatgagttccagaatataatggtcggtgcgaagcgacgtagaaaggaggttgtctattcagactctttcggtgatcagtggatgaaatccgatgagggatttgaagacattccaaaggcgactcaga

SEQ ID NO: 2517 - DNA, 233 bp, Zea mays
  misc_feature (229)..(229): n is a, c, g, or t
aggcgtatgagatatctcacagaatagtacactacagacatagtaacaaggttcctaccagcctgcctggatacataaatcgctattccatctattaacttaaaccaaagaagcatacaatgatgtaccacaatataatatatgatgggcaaagtacacgcaccaatgttagcaaagtacaccgagcacaagagccgctgctaacacatccaggcaaccacagctaatntttt

SEQ ID NO: 2518 - DNA, 239 bp, Zea mays
agttcctggccgggaagggctccgtgctgcaggccattgggaagaaggtgctggcgctggcgctggggcagcgggacccgaccgccgtggacaagctgctgtccgcgcagcgcgactcgacgatactttcgtgcgtatcgtgcgctgaggagctggcggagaaggccgaggaggagaggaagcgacgggaggaggaagggggagggaaagggaaaggaccgggagaacgtgagaaggaa

SEQ ID NO: 2519 - DNA, 155 bp, Zea mays
gtcttccagttttttttgttgttgttggaatctatcctagatctttatcatgtgtatggtggataacctcatgtcaccatcgtatctgtatacaataagcctaaatcagctgacgttatatatgtaaattagtaaatgtaatgactaattggtgc

SEQ ID NO: 2520 - DNA, 321 bp, Zea mays
gagggcgcttggaacggttgcttgggcatggctgctgctcctgcagcagctcgccggggcctctcatgtcgtctacgagaaccttgaggtggaggcgacgacagccgccgtgcggccctccattgtcgaccccctgctgaggaccgggtaccatttccagcctcgcaagaactggatcaatggtaactaaaacctactcgcttgctgacttggcccacatccaaaattttgagctgtctcccactttctagcagtgccatggtagcctttgttaactgagggagtcgtcaagttgagaacatgtcatgtccagttaccagt

SEQ ID NO: 2521 - DNA, 358 bp, Zea mays
tgtaccacaggagaatcagatgagagcgtcgcagctgtatctgtttgctgatttggatgtaggggtacccaagaagccattggatgcgaaggacgggatcgcggcagaagtggaggttgcgccgctgtatgaggcaccacaggaggggccgtcgaggctaccaaacaccttgccacccatgttcccgaaggagctaaagccgccgccgggatggaagcctggtgatccgatcacgctaccacttgatgagatactacctggtatcaagggtgaagagcgggaggcacaggcccctgtgccgcaggcacctgtttcagtgcgaccagtggcaccaatgggaccagagacaatacaggtc

SEQ ID NO: 2522 - DNA, 456 bp, Zea mays
tgctttcatctctacatgaggccgctcttcggctcttgcgatagtggtagcttgggcgaggtaccgcccttcagacgatcacacacgatgtctctaaccgatctggtgttttgatctttacatgaacaactccttggatagtagttgctggacgaggtactgcccttctggttcctccaggtagatcttgtcgttcaggtaattctgtagattgttgacagcctcagtctgcatcttgttgccttgttccttcaaagctggtaaaaagcaccgtgatattacatccaggattttcatgaactgtgacccatatttcttgtgaagtgcaaaaccagccatctgaaagagcacaggaaccccaattaactacatggcacacaatcaggaggtcttgaagcagatgcctaccttgaggaaagcgtgaagggcacaagcagtggctgtagtagctggaag

SEQ ID NO: 2523 - DNA, 386 bp, Zea mays
cggcgcgtcgtcttcgcgcagaggcagctggcggcggcacgtcgtcgtacctggctcggggagagggagaacgggcgaagaggcgtgagtcggggggtcgacgcaaacggcttgagagttgagagttgagagtggagagttactagggctggcagctggctattgcctctttggggctttctttatcgagattgggtgctcaaaatctgactatttaagcctattttaggctaaaatggacgccaggcaggccccaggtgaggtccggggaaccgagcagcgcctctcgtcaaggaaattgggtgggaggaggccttgccggcgacgagaaaggacacgacctggcagcggcgatcggatggcgcgcaacaagaagaggacgaaag

SEQ ID NO: 2524 - DNA, 736 bp, Zea mays
  misc_feature (694)..(698): n is a, c, g, or t
  misc_feature (715)..(728): n is a, c, g, or t
acctacctctttatgccactgtcgccagaatgtgctaaaaaaaagaaaagtacatacctattatgttaatgttcccatatggcgattagaatctagaagcttcattcccccttttctaatgttctgtgcattggtgccccagtcctggttggtttgactttgatcgatagcaaagaacaacatgaatccatgcgcaattattagatatatatcgctacaaatgcagaactgctctctggatttatttctttgcatatcagtactgcatggatatatacctgtttaaaacttggtcacatctgtcaaatgcttgctcattacacaggagcttgaagatggaagtgttctccttcggtttgctcatctatatgaggttttgcactgctacccttactctcacttgttccaggtgaggtaaatcctaattttcttttctatgtcttgccctgtgctgtcgtgcacataggccggggaggacaaggatctttcgtctttagcgagtatcgacctcaagagagtgttcccggagaagaaggttccctccgtcactctgttgttttacttacgcttattctagtcttcagcattcctaactcagattcttgatccctcgctctagattggcaaggtcatcgagacaagcttatcggcaaaccaagaacgcgcagccatggagaagaagcgtttgaaatgnnnnncgcaaggttctgcggcnnnnnnnnnnnnnnttcggggt

SEQ ID NO: 2525 - DNA, 378 bp, Zea mays
aggaatgggactccgactgttactcatccaactccgacgatgaaggactggccgccttggccttcgacaaatcttcgttcttccccaacgaacgccatacatgccttatggctaagaaaaagaaggtatgtattcgggacactcccaaatatacttcttctagtgtgaagaatcatctgatgatgaagtagactacactaatttgtttaagggattagatagaactaaggtagacaaaataaatgaattaattgatgctcttaatgaaaaggatagattgctagaaaagcaagaagatattttctatgaggaacatgataaattcattagtgttcaaaaatctcttgctctagaaattaagagaaatgaaatgctatg

SEQ ID NO: 2526 - DNA, 350 bp, Zea mays
ctggtcctggttgctgtttttgcttgggagaacatgggtcagttcctagtgaagaccaaagaccgccacataaaaataattcaaattttgtggttgtgaacaactgggattctttaagagatgtggggaacaatgccctgcgattgatggtttccctgtagccattactgttaatcagcataagctgttcagtcatcgtcctcgagaagtacagtgtagcttcggtgtacggcatccttgtactttggaaaacagttagatatgaaggaaacctctgactactaatttcttctggatataactagtgaaggaaactaaaaattattattcctcactcgtgtaatcttgca

SEQ ID NO: 2527 - DNA, 498 bp, Zea mays
caggagcctgaggcggcggtggccatggctcagcacctactggtagctgctgacaggtaaggtttcttttaatcttattttttttcactcacagaagaacaggcgcatatggaagcaacaatatatatatgacgacaattactgtgtgtatagtgtatactagtagattgtaattagctcctaacaattttgacaggtatgggctgaacagactgaagctcatgtgcgaatgcaagctctctggcggcatcgacatcggcacagcggccgcgacgttggctctcgccgagcagcacaactgctcgctgctcaaagccaagtgccttgagttcgtcaccaggtcgcctgagactctcgatgctatcctggcgactgacggctacgagcatctggtggcaagctgcccctcggtgctggctgaactgctgagggctgcgcgtggaaggaagatctgagctggacgatgatttcatattatggtttgcctaagatgtgtgt

SEQ ID NO: 2528 - DNA, 372 bp, Zea mays
caaggaggagtacgacgctgaggtggaggacgacgatgcagacaacgtcgaggagtctgacggcgacgacttcgaccaggagaccggttgacccaggtggctcccccgtgcttcgtcggcgtccttgagcgtcgtcatccccgctgtccagtctgtatttcgcaatccctgagttgttccttctatctagatacgctgttaccctattctgctgctgtctgttctcaggatctgagcatgtccttgtcgtgtggaccttgtgtatgaaacaggtacatgattaatcggtccaatttaaatgctatattagtttcctctatctgtgccagatactgctacttcttaccattttgttgtttgtgtcatgaccag

SEQ ID NO: 2529 - DNA, 336 bp, Zea mays
tggtggcgtctggtttgatctgtggcgatgggctctgggcgctgccgtcttcgctgctggccatcttcaaggtggagccgcctatgtgcatgaagttcctgtccaactaccagactgagcagatgcggaagcacctcatcctagcagcagctgcacgccgaagaacaagttaattgttgtacccttacttgtttgagaacgaggaatgagaatggattgtttagtagctagccagtagccacacacccctccttgttttccaagataaaataggcttgatagctcgatctagaatctagatagataaaacagcacacacgtctcttgcttcttgca

SEQ ID NO: 2530 - DNA, 424 bp, Zea mays
tgcaagcccagtgcttttatatagcgctcaccactctgcggtgtttattctcacgggtaaaatctttcatcgttggagaacaaagaattctgatggttgaattgatcatcgcatcattctcccttgtccttgtttggcatagacctccagatcccagccaaaatgctaccgtagaccgagtggcagatgctcgaaacagcacacggaacagccgtgagagggttgcccaagtgcttgtttgcaaggacaaggcccaacactgagttctgcaatgcaaagaaaggaaattaagagctgctcaaatagaatgagatgggataatgatacgatatttctacaccagttacctgcataccaacctcaatagagattgttctcgcggaggaggtatcgatgccaagtactcttgaaagaacgtagccga

SEQ ID NO: 2531 - DNA, 424 bp, Zea mays
  misc_feature (88)..(88): n is a, c, g, or t
  misc_feature (90)..(98): n is a, c, g, or t
  misc_feature (101)..(101): n is a, c, g, or t
  misc_feature (103)..(110): n is a, c, g, or t
tgcaagcccagtgcttttatatagcgctcaccactctgcggtgtttattctcacgggtaaaatctttcatcgttggagaacaaagaantnnnnnnnnngantnnnnnnnngcatcattctcccttgtccttgtttgggatagacctccagatcccagccaaaatgctaccgtagaccgagtggcagatgctcgaaacagcacacggaacagccgtgagagggttgcccaagtgcttgtttgcaaggacaaggcccaacactgagttctgcaatgcaaagaaaggaaattaagagctgctcaaatagaatgagatgggataatgatacgatatttctacaccagttacctgcataccaacctcaatagagattgttctcgcggaggaggtatcgatgccaagtactcttgaaagaacgtagccga

SEQ ID NO: 2532 - DNA, 736 bp, Zea mays
aggcctagggaggtcgtcgcgggagaaggcggcgacgacgagggggagcgtgggatggacgaaccggacagcgcggcacgcagcgccgacaagctgacattggatgatgaggacggccccactgtccctgaagcggtgagcttttcgtatgaatgtatgatgtttaattgtgcctgctgcgcttcgattgtgtttcagcactctgagacgattctgagagatgaaattttggttccactgtctattttatgcttttcctgcgaaaaggcgttaccttgtagtttacttccgatcatttcacttccaaatgacttcggtttaatctttgcctgcttgttctataaaaacaggtccaggtgggtagttcaccgaagtatagagtcgacaggaagcttgggaaaggtggttttggccaagtatatgttggccaccgcatgtcagctactggtccaggtgccgtcgaggtaatagaggaatttctttagtactacacaacttggaaacctggaattttggttttgtatcagcaccggagagtaagccgtcttcctttctatcttaggtggcactgaagtttgagcataggaccagtaaaggatgtcactatggccctccttatgaatggacagcttacaagtaaggcatgatcgtttatggatgagaaagtgtaagtctttcggagaccattcaactcatgggtagctgattggttttcatgtttattgcatgtttagcg

SEQ ID NO: 2533 - DNA, 379 bp, Zea mays
catcttgccccctccaccgccacgaagaagaacctgttgcgagagagacgactgaactggtactgggctctcacctctctgtgtctgggtgtgtgggtggcgcgccctggtatatatggggcgcaaagcagtttttgataggagagggacagggagagaggagatgcagatggaagagggaggactggggggagacgagcgcggttggcccagagaggcgaagagaacggcgtgcgtgagagataaagaagctggaactggaaggatggatccgttggttgccgagttgcagagctatcgtcttcccccactcactctcaaggtgtgcgtgagagttggcggcgggaggatcgtggctcggctgtcgtagctcaaggtg

SEQ ID NO: 2534 - DNA, 560 bp, Zea mays
gcacgacatcggcgaacgtccatctagcattcctaatgtgcttcagcagagggttccctctctgtcgaacaagaatgaataaaaaagacacgaaatttgctttagaacaaggggacaggaacctcaaaacaagaggtcaaaagtgtcatagtgccacaaaccacaccccagtacctgcctatgactgacgagaatggagttcttgctttggagagtcggcgctgaggggctagcttgagtcggcctgcgccagcaaacctggcacgtcagagtcgaggccggcgtcgcaggtactgagaagagggagagagggaggacagtataggtacctcggggtggtggtgggctggggaggcggcggcggcggaggtgagtagaactcggaggacttgaggaaagaaaaagcctgcgagaatgatcccgaggacgacgaggaggatgaagcggcggcggcggcggaggtggctacaggagggttgtaggatggcggcttcgaggaagaggaggaggcgccggtgccgaagacctcctgataggacgggatcttgatgaggttctta

SEQ ID NO: 2535 - DNA, 431 bp, Zea mays
aaatgtctgccttcatgagcttccagcaaagcgtgcaagctgcaggggtgccaggcagccagcccaaccagacgacggagctggaccttttccaagacctgcagttgcctcaggtggagtactacctcccatccgcaaggccatttattcaccctccataatttctaattttgacaacgtattaacatgaatgaaaatgtctaattttgagcaggccggggcgcagagcacaaacccattctccgatgagagcgttcagggatacccacagtacatgaacgggcccaacggcgacaacgcacagccaggccaggacttccaacagcagtctctgaagctaccggcggcgagcccgtacgacaatttcctcagggctgctggctgttaggagtccagttacatggacgacaaccacctcacctcaagatagt

SEQ ID NO: 2536 - DNA, 410 bp, Zea mays
tctcatcacagactggaccttgtctgacatcttctggtaaagccatctctgggcggcctcgtccagcccatccggtgtaatggtcggccaccccttccgttcagaggatgagtcatggggtaccgttgatgcttcttgcttcaagcttggcaagtcaaactctattggctctccaacaatgatatctatcttcttactgcagagtggcactggtgttcgccgtccaaagaacgagttttctggcatgacctggaagtagatggcagcgtgctaataatatattcatatttctccataccacatactacaaatgtcttcactaacaagatgccatatcagttccatgtaccttttcgaaaccagagtgaacaattggcaaaactattggagttataggtgctcggacaata

SEQ ID NO: 2537 - DNA, 640 bp, Zea mays
ccctgatgacatctttgaagctgtcttcggggcacattatggttttacttggtctcaaatatcgtgggaagggtttcacttcagggacaaatcgttcagatttagatggagcggccgtgaatcacgcagagagaaaattccatgtgacagcgaagatgaagaaagcgcggatgagagcagagaaacagccagcgttggttcacatgctcacagggtcatccttggattacaaccatgtggtccactaactctagaagatgttaaaactgcgtaagttgtcctttgctgaaatccctgtttgtcttactgttatcacgtttatttttgtatggatgcgtaagttgtgccccccacccccattctaggactcacctgaattacttacggcctgtggatgtggcatgcagtttccgggcatctgcgctgcggtggcaccctgacaggcacccggggtcatcacaggtgtgtatccaaacaaattcaggtcctggaacttaccgcagaaactgatgccgtcattactcattatgcgtcttcattgtccattcgcaaataaatacaaaaaggcacagataataacaaggacataccacatgttctacttgcgtgcgcaggccatggctgaggagaagtttaagct

SEQ ID NO: 2538 - DNA, 432 bp, Zea mays
tatacgtgcgcattatgagattactgtgccttattacatgataatgttgacgggatgtaggaggtgctgcttccaggtggccatggcctcatggttcgtgggtatcgtccggttataaatactctcgcaaaaggcttagatatacgcctcaaccataagtacgcatatctatccttttcttgttaatttggtaatcactagttgtggtttcacttccaccagccattcctagatcactgatcctgttctttgttcttcagggttgtggaaattgttcgccataggaacagggtagaggttaccgtaagcagcggccaaacgtttgttgcggatgctgctgtggtcactgttccgttgggtgtcctgaaagcgaaaaccattaaattcgagccgaggctgccagagtggaaagaggaagcgatcagagaactt

SEQ ID NO: 2539 - DNA, 512 bp, Zea mays
ctggttaaggttgctgtccacgatggagtccagctccccttctctctgtagcttctttacctgtatttagttacaggtgcatcgcaggaatcagattacatcaagaatggagccagtttaaaaaaattcgtaaccaaataggcaaagggcaaagctatccaatatttggaagtgaaaaaaaagacttacatgatcaagcaatagcacatcatcttcgtcttccagccgtgagaagtcaatagcccgttgaccagtcacaagttcaagaagcatgatcccatatccaaaaacatctgtcctctcggaagacttccctgtggacaggtactcgggtgctatgtgacccatggttccgcggacttgtgttgtcacagacgtcttctgcacatctactagctttgctaggccaaaatcgccgacaacaggctcgaaatcctcgtcaagcaatacatttgcagctttaacatcacggtgtatgatcttggggttgcagtgttcatgcagatactcca

SEQ ID NO: 2540 - DNA, 1542 bp, Zea mays
taagaagctccccatcctcaagtctgtgcgggagttcgaggatgaggagccaggggtcgcgccgctttcttctgcgagggctggggtgctgctgcggcactcaggaactgagctccccgcgtctggggcgaacaagacgacagagggcgaggtattttgcagcttcagtttgagcttcagcaatgttaaatgatggaccttattacctcatagtgtttgtttctgtgttgaagtgacatgaattgagctttcttctgtgcttgaatcctcatttcaccaactaagctttcacaatgtgcgtcatgtgtctgtactgtttgttgtagttgttgtcttagtgaccataggcccataatgaaaatgtgaaatgaaactatgaaagggacctgattagactgcaggttgtaatatcatgtaatcactccaatcctaatgatgttcggacatgccaattaaagtttactagcatatcgataacatgcagcgtgactaaatttacgtggataatgtaacaaagtatctcttagggcctgtttggatcctatgagttgaaaccaatatgtagaaagtgcttcccatttcattattagattactttccagctcctctcaattcttgggaaccaaccatggccttatgttaaaattagctagaagtaaggcttttctggtggaatgatacaggctgtatccttaatagcttgttacacacatttctttatgaacctatcaataccactcacctttaggtccaaagagtcgcttagtgaagttgttgctgtttttaaagtgaagttgttgctgttcatactttcatttgtgtacaccacatttataaaaggtcaaacctttatcaattaatctattttgaactcattgtctggttctcttaactggaatttggatacacatgggttgttattttttggacaatagttcagatattgtacactaatttgttggtgcgcatttccaacaaaattattttttatctccgtctaattgaaacaatagtgatgttttattgtgccctttttcttaaatgtcttgtccttggaagaattcaaaatcgttactttgctaggtttatctgattgtatatatttctgatcagtttaaattatgtatgggctattccgctgttacaagaaaacatagtctgatgtgggcttctctaactccctcacctaaaccaatatgtccatggtacatctagtggactgctactatttgtttcaaaggatgctggaaaaaggaattatatcactctactctgcagggaagtcaagcacccagtaagaaaaatgcccaagaaatacctacaccgcagtttgatgctgtggacacatatgaaagggactatactcgcacctttgcacaaccgacatcttatatacgtggaagaggaggtttctttcttgttacttccctggggatgcattcttttcttgttaaacttacactgttatgtttattactaagagtgctcaatatctgcagccagagctgagatcggtgaatttgtcgagtatgacctggacaa

SEQ ID NO: 2541 - DNA, 417 bp, Zea mays
ttgacagcagttgctgtttgaacttcgatttgctgttctcccagtaggattagaaaggaaccacacattctcattggagcataattcagtctgtcagttaaacatgataaggagacacggcaggcagtgaagatctgtagtagctccaaatttgcctcctggcgaaacacctttccttgaaacggctatcaagcgtgctcttcttcacgcacaacgcaacctgttcctgacaccatctatgcaacctgacaaacattcgtaacggaataacaaataaataaataaaacagaataacaaataaacaaataaataaataaataaatcgaacagcagtacctggctggctcaggctctccaccgtcccgcgcaccaaccatgcgttggttgatcagtgatcactatcatatattccggtg

SEQ ID NO: 2542 - DNA, 489 bp, Zea mays
tggagcagttactcgctggtgtgatgtccggccgagtcccgccatcgccgccatgaatgcatgtacgggtgcatgcagtgccagaggccacagccagacggtttgagggcgagcgaggccataatataaagctacgaacagatgtgtatgtgagacatgccattattacccaggatgaagacgcaggcccaggagatgccgcgatccctcttgggcgtccggcgacgtccggcgccgccgtgcgactccacggcctccatctccatggttccagcagcagcagcagctgtggctcaggagacaccgaaaatcttcgacaggtgacgaccaatacgactctctctctctctcaatgactctgaccacggcgaattccgtgaccatggaaccattttgcaggaagcagatttcagaaacagaatcgtcagaggtgagaagacaagcgaatcgatgaaatattgtgtttcggtcgtgtactgcaaactattg

SEQ ID NO: 2543 - DNA, 331 bp, Zea mays
ctggacacagctgcctccacatcatcctttgtcactgtaacctcctcttgttcatgcccccattgtgtcacccctttgactccaacctccaccccagttttcagcacgtccaccaccagcctctcgttcacaaactgctctgcaaagtgtggccatgtgatcatgggcacgcctgcacagactccctctaatgtcgagttccacccacagtgtgtcatgaaacctccaacagatctatgccacaggatcataacctgcggcgcccagccccttatgatcaagcctctgtccttcacccgttcttcaaacccatccgcgagccattcctcaa

SEQ ID NO: 2544 - DNA, 363 bp, Zea mays
gttgattctgcagcgattcatcgaatcatcgtgttatccggcccttgatcaaaacttgattcatcgtttatcgcgccgaccctgcagcagcgaggataaggacagctgagccgatagcccgatatacggatcactcgccgtcctccgagatagcgcttagcctcttcacgacggcacgatggcgagaaccgcgggctctgtagctagctcccttcctcgtcttccccgctgcgcgtccaccgtcttgacccgcaggacgcgcggcgtcgtacccacggtgcacgtcgttcttccgagcagcaccatcggcaggcggaggcgggctgctctccttgctcacggcgaccagaagaggagccactc

SEQ ID NO: 2545 - DNA, 423 bp, Zea mays
gtgcgagtactactcagtctcactcacatatcatggctggtttaatttggtgaccagtgaatcaattctctaaccaaatcagccctcaccgagcaagtatacctgggcaacattttaacaagggactttacagcagtatttacagagcaggaatgttttgcagagtgaggccaatacagacatacagtggccttggctaaaccaattctgctgtgtgctgatcgtacccttcacacgagccttatgcaagagtagtagtaataatcaagagtgtcggaaaaaaagaagaaaaaaagcaagcggaggagtaaaaggtaaacaaaaggcacatacattctttgttgaacagtcactgcgatcatctcttccagctccggcagcgcaggaccgcgtcatcaccgccgacgatccaagtctccatag

SEQ ID NO: 2546 - DNA, 422 bp, Zea mays
  misc_feature (411)..(417): n is a, c, g, or t
gttctcccatccccaccataacagcgccctcgccgcacatgcattgccggtcgaccgaaggtagtgaagcccgtggtcgagtgcgttgctgacgtctgcggtctctgccatctgcttgaaggtcaactcaaggtacccatagcgggttgtggcgtcaatacgcccgtggaggagacggccgccgtggatggatcgtcgtcgtcttcttcgtcttggtcgcaatgagcacaaccggaaatctccgacctgagacagccttatgctggacaaacaaaatgcagcaaatttacatgccataaatcgaagaaggcaaaatttgaacttcatacataccatttgacacaagggaacgaaatcagctgtgcaccaaaacgaaacaatcgacgaagcaagaatgggagcacaactgtnnnnnnnaacgt

SEQ ID NO: 2547 - DNA, 347 bp, Zea mays
  misc_feature (337)..(341): n is a, c, g, or t
tgcgctgcttgggcgtgcgggagctccgggtcaacgcgccctcgctcgagtcgttcgccttccacggcgacaacgtctactcgacgagcgacgacgacgacgacgacttgtcttctgccgtcgacctgggatccacgccggctctgcgggacgcgtacctttctcacatcggcttcgacgacgccaagaacgcgtacgatgagcgcgagtacgcctactccaacttcttgagctgcgtcgctcatgcccgggttttgacgctctgttccgtcggcttgctggtatgtcgcagaaagaacccgtcatttgaatcagggaaaatgccatccgtgaaatnnnnnaaccac

SEQ ID NO: 2548 - DNA, 1012 bp, Zea mays
cttctctaaagtctgtggagtcttcctagcaaaatactgggcagtaggtcctggacgaagccccttaatcatggcctcattgacaatttcattgggcactgtaggcgcttgtgctatcaggcgcaagaaccttcggacatacgcttgaagatactactcatgatcttgtgtgcattgaaagagagcttgagttgtgactggcttcgtctgaaagccctggaaacttgtcatcaggttaatatgtacataaaagtctcaggaccaaaagtgatggagcctcatacctgtatataaatgagagtagtatgttagtatagacaacactaaagagttcaatgtaatatcaggattataaaagaaataacattctttgaaaggatagaaacagtaacatacaatatgtttattttctctttccctctgatcacagcaagcaggtactaagtcagttaaagtgtttgtcgaataaggtatatgagtaggctaatagtctaacacattgttatgacgatatataaggaaaaaaggagcaatgtagaagcaagtgtactaagaacgctgacaactgcatcttggtaatgtttgaataaaaggtttaaatcatctaaatacaaatcaagaaagacaggttaacatttaagaaataaattgttggagtgaggaagcaatgaagttcaagagtctgcagttaagacctgctgtttcatgcctttgatctccttcactaagtgagttaaacatttgggtaaatttttttgaataacagagacattcagtctatgcgcaaagtaaaatagtggcatctttgaacttcattgcttgcccagctaaaagtatggtggacaagaatttgtttcattggtaatttcatgcccagctaaaagtatggtttctttatttttatctcctttttccatgttcaggtgaatattagcgttctaacttggtaaatcaataactgcaggtagagtctgtctcctaccactgcagggtagacggaggtcttaaaacc

SEQ ID NO: 2549 - DNA, 379 bp, Zea mays
cgccgccgccgcgtgagttgagagggaaagaacgagagccaagaagccagggagggacttgagcttcacttgggaagggctagtactgctcccgcccccgccacggccgtctggctgtctgttgcgcgactgcgccagcctggcggctctgccccgggctgctggcgccgccattgctttcccttggagccgctggcagctaaactggtgccctcggccgcctttgtgcgttcctcgccactgcgcccggggtagctgaggtctgaagacggaggtgtcgcccgcctttacacggccacggctcccgcaccacggtttttctttctcgcatcgccagagcaacaactgccccccgccgttggtcagtcctgcgagctct

SEQ ID NO: 2550 - DNA, 269 bp, Zea mays
caacatgtgtgtatataggattaatgggacagtatcagtatgcatgcaatggtccatgctgcaagtgcaagtgcatatatgcaagtggtgtgtgaaagcaagaatcagattagatgcatgcatatgcatatgcatatgcatgtgttaatttagtagtaataattgtagtatgggatgagtcctatgctagccagtcacgcgcgatcgaccgaccgacccatcgatctccaatgcttctgttccctctccctcctacttgtccacttgtg

SEQ ID NO: 2551 - DNA, 321 bp, Zea mays
cctgctgcggttgtgaggggccggacgaggggagaagatttctcgcatgctcatctcttggttgttgctcctacgggagttagtttggatccaatatgtgttgtgcatatggcagttaattagtttgcaggtgaggccaagccattgttatagtcagtggtgtttagtttagcctgttggcttgaagaacaaggatccctagagtctgcttttattcagtttatggagttgttcatgttcgcttttttttcctttttaaaggtcccacgagtgaactagttattgctcatgtagtaatgccctgtctccgttctcgaatat

SEQ ID NO: 2552 - DNA, 321 bp, Zea mays; identical to SEQ ID NO: 2551

SEQ ID NO: 2553 - DNA, 351 bp, Zea mays
tcggtcgtctggttctagggaagagatgaggactgtggccagttttctgaagagaaaacaaggcctctctcatggttgctgtgccttgtgcctgtaaaataattttgttttgtttcatcccatgctggaggactggactgcactgctaatcctttgttttctgttctgaaaagtgggcaatcgagtgcttagctgttggggagacgtgcaaagatgccaacttttccgtgcgcccgccgagtctgtctgtctgttgcccacttgtgtcacctggaaaagtgcggtgtgcgggtgatcattttatatgtaaatgtgttttgttattaataatattatagcagcgcgtggggg

SEQ ID NO: 2554 - DNA, 522 bp, Zea mays
ctgaacttagcactgttccactgttgtttggttgctagtctcgattaatgcttcttcacaggcagctatttggccatacaatctcttgcaacgatatattcagatacatgactgccatgtgacagaaccaatgctcaagtgttttgtttcttctgcaggtggagcaagaattcacggttcggttcaaatctactctgctggaaagccccaaaacaacccatgtaacggaggtacattactctgtattttcacatcacttggtccgtcggaatagccatgtgaattcagcgtcttggctcgctcggttgctgtttgctagtgttcatattacatgttgaccccagttctgccaggagcccagagcactttcacaccagcaagctgctttcttacaagcgtaactgcgtcactgcgacaaccagcaccagcattgttgccggggaaaagtgaaccatggtagcagaacattggcatgctgaaaaacagtgtcaaatcattcagtttttgctaggacatttacca

SEQ ID NO: 2555 - DNA, 411 bp, Zea mays
  misc_feature (403)..(407): n is a, c, g, or t
ttctgcgtgatcctccccatgacgatgttcgtccccgaagccgagctccccgcgtgggtggtgtgctacatcccggcgacgatgtccatcctcaacatcctcccgtccccgaaatcgttcccgttcatcgtcccgtacctgctgttcgagaacaccatgtcggtgaccaagttcaacgccatggtctccggcctgttccagctgggcagcgcctacgagtgggtcgtcaccaagaagtcggggcggtcctccgagggcgacctcgtggccctcgtggagaagcactccaagcagcagagggtaggctcggcgcccaacctcgacgcgctgaccaaggagtcgtcgaagggcaccgaggaggagaagaataagaagaagaggaagaagaagcacaacaggatcnnnnngaag

SEQ ID NO: 2556 - DNA, 379 bp, Zea mays
ttgaggagcacaacattacccttaaaccacagggaagcaaaaatgaagaagcaggtgaacctgagtctgcaactgagaagggcagtgcagtttctgaatcaatcaagcttactgatgctcagaaaactcgtttggaaagccttattaactccagcccggtgatggtattcatcaaaggtacacctgaggaaccaaagtgtgggttcagtgggaagctggttcacatacttaagcaagagaacattcctttctctagttttgacatcctttcagatgatgaagttagacaggggctgaaggtcttctcaaactggcctagttaccctcaactgtacataaaaggtgaactggttggcggttcagacatagtgatggagat

SEQ ID NO: 2557 - DNA, 487 bp, Zea mays
tttcatccaagttgtagagctactgacgaagccatgcctgccgcctacattatcacatacgtacaggtatgggctaactaaacgactcctctgctcaacaaatttcagtcctttgtcccgagctcgggttcgcacgagctccagcacttcgttactgacatcacagcgacacgctcgtgtgctgcagcgggggagcgccgtctatgagtttactccatcatcagctctaggaggaaggagagctgctcagtggctgctgtctgctgacctgtctgtcattggcatggcacatcgtcaagaactcgccgcaagcccgcctcttcctgcgttggagcagaacgcgagacatttcaaacaccaatttttttcccctttcgtagtctcggtaaaactctggatccagctctcgcgatgcagtgttacctgagcttgtttaactgggtagttagatcactgatctccaggaaggatagcttgcttgagtgaa

SEQ ID NO: 2558 - DNA, 507 bp, Zea mays
gctgacaccggcgtcgttggctcggcagaagcggcgttccgatccgagatggggggccagcagaacgcgctccaccagctcgtgtccttcatcctcggggcgtccgccgccgccgtcctgctcttcttcctcacgacggcgacgagcggagcgcggttcacggggatctcgagctgggccaacggaaccacgggctttgacgacgatgctcccgtccaggcggctcctgctacccgggcaaatcacgccgacgcaaaggtcaattcttgagcatcatgtcccggtcccaagctgcagtcttttctttgctcggtttcagtttcttgacaccgtcgtctgtggatcctgtccggctcgatcacgcgtggtgaagcagggcgcggcggcggagcaggaggacgagctgcagcggctgctgcgcgcggtggcggacgaggaccggacggtgatcatgacgtcggtgaacgaggcgtgggcggcgcaggactcgctgctggacctgttcct

SEQ ID NO: 2559 - DNA, 351 bp, Zea mays
cagcaatccagtctcaatcagagtgcaagggacgctccgaggcttggagatgagtcactgttcccccctttgactgggtctagtaacaagatgaagcagcctgtttttacgcctaagcgtcctcgaacttttcctgctgccgaggatatccatgctgcaaagatgcgctatgctctgggaatgaacgaggacatgtactctgcgttcaaagagatcgctggtgaataccgtcgaggtaccatagatgcttttgagtatctttcatatgtcgagcagttcggactgtcgcaccttgttcctgagatggctaggctattgcctgattctcgaaaacagagggaacttgctgat

SEQ ID NO: 2560 - DNA, 430 bp, Zea mays
ggcacaggtaattgcccaggtagtctagtttgagtacgattacatgccggacaactgtggtaggagttagttcagataatgtctgaaaactgcaacgcagcaaccagcaaagcggaaatcactcgtcgacgacttggatcagcgttggctcatagtgatcgggtgcctgaaacccatgaaggttcatgaccgtcgccgcaacattggcgaggccggcacttgcgaggtctgtacggaacctgacgccaggcgcaagcccggggcctcctatcgcgattgggacctgcagtttccaggcttccgatcaagagtgcgattcgccgagagacaatgcgtctatggactgaatgaacttaccggattcagcgtgtgcgaagtcagggtctgcaccttgccgtccttgtcccggagtggttctccagacttgtct

SEQ ID NO: 2561 - DNA, 320 bp, Zea mays
  misc_feature (86)..(141): n is a, c, g, or t
  misc_feature (148)..(170): n is a, c, g, or t
  misc_feature (173)..(182): n is a, c, g, or t
  misc_feature (184)..(201): n is a, c, g, or t
  misc_feature (208)..(239): n is a, c, g, or t
  misc_feature (243)..(254): n is a, c, g, or t
  misc_feature (256)..(262): n is a, c, g, or t
  misc_feature (264)..(264): n is a, c, g, or t
  misc_feature (271)..(292): n is a, c, g, or t
  misc_feature (313)..(316): n is a, c, g, or t
aactactacctcgttaccacagatcgatcgacctgctggccctgaatcctgattatatatatatatatatatatatatatatgttnnnnnnnnnnnnnnnnnnnnnnnnnnnnnnnnnnnnnnnnnnnnnnnnnnnnnnnnctctcannnnnnnnnnnnnnnnnnnnnnnttnnnnnnnnnncnnnnnnnnnnnnnnnnnnacctttnnnnnnnnnnnnnnnnnnnnnnnnnnnnnnnntccnnnnnnnnnnnncnnnnnnncnagggtgnnnnnnnnnnnnnnnnnnnnnnatatatttgagagggcacaannnntctc

SEQ ID NO: 2562 - DNA, 480 bp, Zea mays
atgatcgatgaagcggaaggcctggaaaagatcgagaacctacagagccacgataacaatgaaatctatgaaaaggctgtgaagcttcttgagacatactggatggaggaggaagatgacgcaatggctactgccggggaagctgctcctgctgtttttgactttaaccaaggtggcaaccctcctggtgctggtggtctgaacttcaactgatacaggttctcccagccataccatgctcatcatagaatgttttacggttcattgattcttctaaggatttacggtcctggtattcctcttttgcagtctttgatcagaatggtgttaattccttcagtgatgggcttggcattggcttgtcgtgacaaatgtagtctggtcgactccacgtgggatataatggtttgtggtgagtccaataaactcaagatttcgaagggagatgggctgagcattaatgcattattcccaagtgaa

SEQ ID NO: 2563 - DNA, 353 bp, Zea mays
  misc_feature (335)..(344): n is a, c, g, or t
gggaatacaaagttctgtgctctagaaccataagtaggaagagaaacctcacaagttggatgccatgcgaaaccgctactgagatgacaaagctttcgcttatttaaagtacaatgtgccatagcatgattagaatctgctaaactttcctttgaaaagtaacatacagatctttgatgatcaacctcacaatcaaattgtccttgcccaattgtgctagtgaatgaaggggacaaaataggcacatgagtgtgccgtagaatgtcattcctcctcctgatgatagcccttgaggccatccttgagcacttactccctttctcaaggaaactccnnnnnnnnnntgcacaggg

SEQ ID NO: 2564 - DNA, 510 bp, Zea mays
  misc_feature (369)..(372): n is a, c, g, or t
  misc_feature (420)..(427): n is a, c, g, or t
  misc_feature (437)..(446): n is a, c, g, or t
  misc_feature (449)..(461): n is a, c, g, or t
  misc_feature (467)..(478): n is a, c, g, or t
  misc_feature (490)..(490): n is a, c, g, or t
  misc_feature (503)..(503): n is a, c, g, or t
ttcccacagctccggatcttctgacacatatccatccacttggtcctcaaaatcagaagggttagagttgtcttcaacatctgaagggggatgatcaaggtcccaaccaggacatttgttctctagatcttcttcacacacaattgaagtcttctcgagactcttgcacacttccttcaaatggccagcaagctttccaaccttacccccttcaacttctgggatgctacaacacaacctattcatgttttgtaaaagtgaagattgcctcctcatctcttgaatggcatatcgcagtgagttcttgatgctaacatgatacttcaagtcaacatgttcctgtacaaattaaactacttgttggtccannnnatgactaatttaccatgcttgtgaagaactaaccctaatttgaatgannnnnnnncctgtacccnnnnnnnnnnaannnnnnnnnnnnnaaatcnnnnnnnnnnnnttccaccgtggngtcatcttcaacnaatcttc

SEQ ID NO: 2565 - DNA, 363 bp, Zea mays
ctccacctaagtgcaagattttcatttggctagctgtccgaaatcgctgttggactgcagaccgattgccttggagaggactggcacacctagttcattacgttctttgcgacctggaagaggagaatattaatcacattttgttttcctgtgttttctcgagggttctggtttagagttttctcccggctagggtatatttattgaccatgtgttggggtcccaggagcaatcgtttgcagattggtggtgaaaggcttgcaaatatctcccaaaagaaagaaaaaaaggaagggcatggattcaatgattatgttgcgaatatgtggagtgttctgcatgctctcgaagatgaacaacatc

SEQ ID NO: 2566 - DNA, 368 bp, Zea mays
gggtcgtccgtcgtcgtcactgcctctcctgctggttccactcgagtatcgccgaacgaagggccctgttcggcacgagaaggctgcgctcgaggtcgagattcgtcatgggtgatgtgctatgcccgctgtcaagccagcccctaatagcttcaccctcataagtgaatccatccgcggcaacgtaaggatctctcatgatctcctggacaccatcaaattacagccatgagtttacccatttcaatgtatttaggtgttgtttggttcacatatttgtaacattaacgtaactcatgacgtttaaccatgtttgtttaagtccaaccgtaatcaatcagataccacactaggaactaataccggcc

SEQ ID NO: 2567 - DNA, 376 bp, Zea mays
  misc_feature (329)..(331): n is a, c, g, or t
  misc_feature (333)..(333): n is a, c, g, or t
  misc_feature (335)..(338): n is a, c, g, or t
  misc_feature (341)..(341): n is a, c, g, or t
  misc_feature (347)..(352): n is a, c, g, or t
  misc_feature (356)..(360): n is a, c, g, or t
  misc_feature (362)..(365): n is a, c, g, or t
  misc_feature (367)..(371): n is a, c, g, or t
agaatgcttgtaacagtagtgtatgctcacagtaaaatttgtatcctcgtgttccttggctcaaagtttgttcctctcaacctgcactgctgttccacataaggtgcctattcccagctgtagaaacgtcgtatcccctcaatccgttgaacaacttctgccattgctggtctcattgtggggttcttgtcacagcaatgaattgcaagtttgagaaactgaaccagctcctctaccacagttttgtttgtaaggagtttcttatcgaatgcttgtgttgcccagtgctcatggggtattgataaaacccaatcgaccaaatctggacnnntntnnnntgngaggtnnnnnnagtnnnnnannnntnnnnnacctg

SEQ ID NO: 2568 - DNA, 420 bp, Zea mays
gctgcacctgctccccctggagctggaagatcctccggccttcgaggtagctgctgccgaacgcggcgcgggagatgacgtcccctgtcaggttctgcatctcaggccacacgtccacctcgcacggctgcccatctgcgaccaggccttcccacctctgcaccagctccgtgcagcacgcggcgaaagcgggtaacatcccctggcaacacaagacagaagatgatcagcgcgctctactctactacatgcatcctgcaaaataacagaaggtagaggaagaccttgagtttctcgagatggaacgcggggttgatgatcctgcggtgctttgcccacttctcgccctcgaggctgcccaggccgttgtgcagcatcctctggagcctgccgaacttgagcttctcgtagtggccgaac

SEQ ID NO: 2569 - DNA, 406 bp, Zea mays
  misc_feature (66)..(68): n is a, c, g, or t
ctctgtgttcaccctctaggaacttataaggatagaactattcaagtcgcatctgctttaaccatnnnattgaatgcctttttataatctatatcatatcgctgtttaaaatcctttgccaccgacctggctttattatatatgtagtgtttcatctgcatttcagttaaccatgttctttgcctcatcagcacgagctgaagtcttattatttagcagacctaacccgggcctgctgtcgtccctaaccttacgtaacccagaaattttattttataggaacatcattttatttttgctatattttttatttatataaatattatcctgaacatcagaatatacgttaactaactgatacgttaattaacaggcacagcacggagaaatgaaccgctggattaac

SEQ ID NO: 2570 - DNA, 565 bp, Zea mays
gcttgcgctgctcgccggggctgctttgtccactcaggccatcgatctccagttccatgtatgctccaattttgttcttgtttttttttaaaacaaactcagttccagtacctgagcatgagtcacagcttggtttaggcgtgtggtggcgtttgctgggcagatcagttattactcctccactccacaccactgcaccggccggcaccgctggtaacgcacgcaggtaggcggccaaggccatgccaatgtcatgcagcgggattgatccatgcgtcgtccattggcgccctgccctcggctagctgcggctgtgctggaaagagatctggtggccgaggaggaggagaaggcgaggacgaggacgagggacagaaaagcagcaaaaggctcttgtggttggcatgcctacaaccaacgtcccaaccaggagcctgaaaaataatccccgggcataaagccatgtgacaggcgacagcgatgccatctgatccgttccgttcggttccccccagcaaaccgtggtgaaaatcacgcggcccccgctctgccatctacccctgca

SEQ ID NO: 2571 - DNA, 405 bp, Zea mays
ttcttctcggaggatcacgcctccagcctcaacttcagctggtgcgcgagtggcgcccaggactgggagtgagcgaggtttttggtctctgcacggttactgtaaaaccaatgttacggctgcattgtatttgtacattgggctcgtttccacaacaaggcgcctgcactagctagtagctagtggacaacgcggcaaagcgagcggacatccatcgcacggcgggaaaagaggattagttatgtccaaacgggctacaagggatggctaagcagagcctcatcagacacgtcggtcttgcagtaccgcgccaatgtgatcaggttgagattcagccacgacaccacggagttgtcgagcccgacacactatgtcctctaaacaactttttttctaaacagcctt

SEQ ID NO: 2572 - DNA, 983 bp, Zea mays
aattgccaagataacaaagtcacaacaatgtaagttcagcccattcatctcaactttctacactttgaactgaattactgccaaaaaggtagaaaattcacattatgccattatggtcattgaacagaaggaaatcttcaattctaacagttgagttgactatgtccaaagtgattaaaccccaccatttgtaaaggagaagagatttcgtttgaattgaatagtttcatgctctattttttcctagtttgcctactattataagcttgtgatgctgtgtacttgactacttgtgttcacaaaactatttgcttagtttctcattatgagtttgcagaattttgagctcgtcagggttaacaggatccttatcacccagcattgcaaagctaacaactttacagcagctgtaagttccccatgtattcttttgagtgcccaacatttggtgcccctgaaaatatgtccaatagtacaaaacattatgtccccatactagatgaataaatttgctgcttgctacataactatggtttcaggatactggataacaacaacattactggagggattcctccggagtttggaaacctatcaggtttgacaattctaaaccttggaagaaataatttaaatgggtcaataccggactcccttggacaactttctaaactccaaaatctgtaagtcagccattactcatattatcatgactgataaaataaatctgagtgggtgatgactgataacttgtacagggatctaagccataattatttgaccggaaatatcccaagctctttctcaaatcttctgtcattgagtgatatgtaagttttttaccccatggcgacaagatgtaaaattaaaacctgtcaaattttaccgatgtcatacttgctagtgccattatatttagttcattcaagggagtgaatagtcgttcaacaatcatgtagcataactcaatttattttgcagta

SEQ ID NO: 2573 - DNA, 801 bp, Zea mays
gctgctcataagtgacgctgctattgttgtctgaactagtatcatcaacagacagcttactccacctcttccaagaaatccttgatctctgctgggcttaaaactctgtattttgtatggaaaaactgttagttctcagcaaaccatttgaatgtagcaaggactttgtaatatcgcatagctccaggtttgcaaaaacaacaaataaacacaaacatttcccctacagctagagaggcacaagttgttagcaaaccctaaagaaacagattcttcgtatagtcagggagcaatgagcgatgcagtaattttgaaccatataaatatggcagtaagattgagtctctgtaacttacttgaactcacgatcagctcgaataattccgatttcaatgttgttggaggaaatttgcccctcatatctgcaagtccaagatccggaaccaattattaactatttaggatatttctaaactaagcaagtacaacagggatgcgagcgatacccttctttcaaagtcaaaattgcagtgtggatggcatcatcaagctccatatcttctgtgtatctacaatgaaaccatacaaatataacatgtgaaatcagagggaaaggatgaacaattatagcacacatgctgcttacattaatcactgatgaggtagataaaatcaactggaatttatttacaatcggatgaaagaatattatcagcagtactgtgtcacaactcaaaacagtgtctagatcaagtgcacaacattaatacattgaggctgtacctcttttcaagaaacgtc

SEQ ID NO: 2574 - DNA, 348 bp, Zea mays
acgtctgtatcttaaaatgtaaaatacaggtgccccctctgttctggttctttttttttagatcaatacctgtgagacaagaaagcatttgtgttcgagttttggcatagattaactctactgataccaataagtaatttatatgtgggcatttagtggcaaagtttgagtgaaaaccccaaaaggattccaaagtgaatctagtctgcatatttttcacactggaggaatgatatgtaagaaaatattgaatacagtgatattaaagtcttaaccaaactatcaatgtgttcgacatgtcatagtcatactcatgatttgttttactttttaatatgaccatggatg

SEQ ID NO: 2575 - DNA, 360 bp, Zea mays
ccccgccccgctcctgctgccgctgctgctgctgctacacggagatcacatgcatacatatatacacgtcccgtctcagttgatattaattacctttgcattgttgttgttcgttattgatgttgttattagctgttgctcccaagaaagaagacgctggcagggcagccaacacactgtatgtatgtagtgtgttgcgctggccacggtttcagtacgtgtactctcgatcaagtgtagaccgacctcggtcgtacgtgtcgcctcattcgttttggatcaattctttgtgattcttataagtcagcaatacaatacacgcagtataatgaatgagtgtaatgtaccaacaatgctgcg

SEQ ID NO: 2576 - DNA, 360 bp, Zea mays
  misc_feature (352)..(352): n is a, c, g, or t
tgaccgtattgtaccaagacatattgaatagagtaaataataacatcagttagccaaatcaaaaaaatattatacggagggcggagacaattaataaaaaatattaaaatctttttgtaggataatttatatagatattgttgtaagccgtcgtaacgcacgggcaaccgactagtatatatatatcgacgagtgtttgttaccgtgtaatcctagtaaatattcttcactagctaggcgatatcgacccaagcagagagcgtcacggcgtggccgtggcctcttcagtcctcggtgtttcaaactaacgatgacaaataaaaaaaagaacggaaagattacatgcacatangatgggca

SEQ ID NO: 2577 - DNA, 327 bp, Zea mays
tagcatctgtcgtcattgctttcctggtggttctgtcaaactggggccttgacattggtggtgccatcaccagagtattagttggtacaaggcctcttctatttctcattataaccaacatcaccattgtcttcacattgttgatggagaacaaagaccccaatgtgaaaagcagacccgttggcgtcaatctgggttctactgatagcttagggcagatgctagagatcgggttgctgctacagaaagccctaggtgctctgctgattgactgcagcgtttgcgctgttattatgatatgttttcttggattctgagggagcctag

SEQ ID NO: 2578 - DNA, 587 bp, Zea mays
ccatctcctccctgcatgaacctctggtatctgctggactcagagaagggcctctgggtcaggcagtacagcattcaggttgaagaatgggactgcagcctctcgtgcttcactccattgatcgtgctagacgatgggaggatcgtcatacatgtcgaagggtcggagatgttggagatctatgaccccaaaaccaacaagttgtccagcgtcgccgacacgggtctcagcagcgcagttagtgtgtacacaggaaccttgctcagcttagagtggtgaggctagtatctatctagctagctagcttgtgggaactgtcatttagggggtgtttggttttgtggactaaagtttagcccgggtcacatcaagcgtttgactttcaagtaggagtatgaaatataaacccaaccaactgtactaaattcgtctcactttttaatcttcggctgagaaattagttttataatccgactacatttaataccccgaacggaggttcaaacattcgatgtgataggggctaaattttagcaggggcaaaccaaacaccccccttaatttacctgttccgtctggtttatgtg

SEQ ID NO: 2579 - DNA, 318 bp, Zea mays
  misc_feature (289)..(292): n is a, c, g, or t
ggcagaaaatctgaaagagcagttaaagattgacgagtaaacatgattgacgaaacttacatctatttaaaaatagggacatccacatgactcaactccaagcataggaacctccacccttgctttagaaccatcaactaagcaaaaaagattttgaaatatgccaattgatatgacagtaatgacatttcagaaccatcaactaaacaaacatggtaaaatataaaaaagcttaatccatgatactgcacacgaagacaaaaaaacttaatcacgaagaatagacacnnnnactgaagttcaaacagtaataattta

SEQ ID NO: 2580 - DNA, 385 bp, Zea mays
tttgaaagacttctatcctctttatttcgatcacctcttggggcgcattccaatcttcttccagcgatagactggattttttcatctttttctcgtcttgtagttgtagcagttgcagttatagtaaaaaaataacaagattgcacaaccatcttgtcattggaaattgttcgttcataagaacaaccctcctctaacgaataagaaagaacccttttctatcgagttcaccacctgataacttaaaagttacacttacttgttcgacactggatttctatcccggaacatcagctctcacaatcccgtatccgtctaacaaaacaaaaccaaaagtttgagggtaggcacatgcattcccttctaaatctctcaagataggatg

SEQ ID NO: 2581 - DNA, 399 bp, Zea mays
  misc_feature (390)..(390): n is a, c, g, or t
gctgccgcagcttgaagggcagcaagccagaggcaaccacaatatgcacttactccttgaactgtccaagcatcgtaagtttgatcaggaaatccatcattttcaatcataccatcaccatcatgatcgaattgttccatgtattccatagcagtacagactgcaggccagacatccttgccaaatgacttgtcacctgttgcagcaaaatccctgtaaatctgaagcacgaacttgggattaagatctttccatctacttgtgtcatgtatgttgtaagcattcaattcatgccaaggatcatgtgctccaagatcatgggcgacagcaccgattactttacgaataccccaggtaccatcagcaagaaatctgactcttctgttatcntcccgcaaa

SEQ ID NO: 2582 - DNA, 361 bp, Zea mays
  misc_feature (13)..(16): n is a, c, g, or t
  misc_feature (326)..(331): n is a, c, g, or t
tgagcatagggcnnnngttttaagtatacccattccccaactgcaaaggaacgctcagaatgatgttgatatgcttgtttcttcattttagcctgagccctcaaaaggtgttggtgcaccagctcctgcatcacagagcgttcctgcaaccaatcagctagctgggacggcattgtgtggttgacagagagaccaaaggtacggggttggcggccataaagaacctcaaatggtgcacgccccagtgcagagtggaggctggtgttgtaccagtactcgcccacaggcaaccactctttccatttcgttgggcagacatttgcgannnnnngcagatatgtttccaagcattgattgactt

SEQ ID NO: 2583 - DNA, 359 bp, Zea mays
ctgatgagctagccaacacacagcagcgcgagttggagttcgttcttccggtgctgctggtctaggccgttgttctttgtcttcttctccagtggcttgcattttgcaaaagatttctcgacctcccccacacggccacacccacacccccaccttcttttctctgtttcattcacttgaatcatcactgtgcgcgtgcgtgagtactggtttaatcgtcgttgctattttatttagctttcatcaacccattggcagcaggcagagtttatgttagttttgcttggtttgttatgctcctcccgaggtacgacatgatgcaaacttgcaagaacagtttgagattccctaccaatgca

SEQ ID NO: 2584 - DNA, 359 bp, Zea mays
  misc_feature (134)..(135): n is a, c, g, or t
  misc_feature (144)..(148): n is a, c, g, or t
  misc_feature (222)..(223): n is a, c, g, or t
  misc_feature (226)..(227): n is a, c, g, or t
  misc_feature (232)..(232): n is a, c, g, or t
  misc_feature (296)..(298): n is a, c, g, or t
ctgatgagctagccaacacacagcagcgcgagttggagttcgttcttccggtgctgctggtctaggccgttgttctttgtcttcttctccagtggcttgcattttgcaaaagatttctcgacctcccccacacnnccacacccnnnnncccaccttcttttctctgtttcattcacttgaatcatcactgtgcgcgtgcgtgagtactggtttaatcgtcgnngcnnttttntttagctttcatcaacccattggcagcaggcagagtttatgttagttttgcttggtttgttatnnncctcccgaggtacgacatgatgcaaacttgcaagaacagtttgagattccctaccaatgca

SEQ ID NO: 2585 - DNA, 372 bp, Zea mays
gcctgctgtatgattttgcacatactgttgaaattcttgattttcttgatactctgcacactgtactgtaagtacattactttcatgtgaggcttgctcctttatcaatttgatggttgggcaatcggcctttaagaacatggacccatccttgaaagttcaggattcaaacatttggcttcaataatataactgagcattgtacattgttggaatatatttctctctcccaatttatgcctgtttatccatgtaaatggccaccttcgatttaacttctaaaataaactatggttgtctagtactttgtgaatacccgccagccgaaaattttagtacttcatgaaaagtattgcggtcttgcggagttat

SEQ ID NO: 2586 - DNA, 226 bp, Zea mays
ggcttgttgaagttcttgtacccctgggcaacaatggcgcacgccatggatgagaagcaagcatcaagcagcagcgagcagcaatagacggatggtgatggagatggagactcgggacacggaccacgccggagacgtcaaggatggtggtgctctggtcgacgtgcttcttggcggagatggagcaggcggggaacttgacggcgaaggcgcgctcgaactccct

SEQ ID NO: 2587 - DNA, 173 bp, Zea mays
cgtcgatctggagactggttgcttttgggtcagcggttgtattctttcgtacgtgtgggggggtgagacggtgaggacgcctgaactctgttccttggtgactggagccagagcctaccatgaacgtccttgaccttgggaaactctgaattacatcgaatcatgcatgcctc

SEQ ID NO: 2588 - DNA, 423 bp, Zea mays
cgagagcaatgtgccatttcaaacgagcggcttgggtatggcagcctccttgtgcccagcacaccaagggttgccgagatccctctctcgagggcaagctggatttgattttcatgcacgtcgctgggagcaagagacgtcacaagtacatcatgtgaaagaaggtaagcgccgaagctggcaaccccacagccaacatcaagcacattcctgatgttccctccattgttgagcgtaccatttggaaaattcagcatctaccacgacaggtgaaaaacgttggtcacgtcagcctacgatagcaaccatgaaccatgtgcaagagattagcctcgggggtatctcaaacctgcgcaaggtgcacaatatacttgccagcgccagtgtggaagtgggtgccaccgccagggaagttgatcttat

SEQ ID NO: 2589 - DNA, 374 bp, Zea mays
cgtgagcatggagagcacgattccgacaagaatgcttcccccgacgaccttcctccttccatcagatgaagctgacggcacacttccctgccctgggtcatggccacagggaggcagagggatgccgcagaggccagaattgttggcataccgggactgcggaaacgtggtgagctgcccagtcgaaggaatcggaccagacaggttgttgctggatacgtccaagtcagcaaggaaagtgagaccaccgaggcccggggggatgccaccggtgagatggttgtttgagaggtcaagcgcgccgactagcttgagccctgagaactcatacggtatcgtgccgttgaggtcgttgtgccccaggttgaggactt

SEQ ID NO: 2590 - DNA, 376 bp, Zea mays
  misc_feature (286)..(289): n is a, c, g, or t
  misc_feature (296)..(315): n is a, c, g, or t
  misc_feature (327)..(352): n is a, c, g, or t
  misc_feature (365)..(368): n is a, c, g, or t
tattgcacaacatgatagtagaagacgaaggtccattgtctttgaacacaacctttgaaaacatcggagtgctggcagacacaactcaaggttcaatggaagagcgcaacgacttcgtcaatcaaaggtacaaccaactgaaagaccgcaacaaatatactcagcttcaggtagatctgatacaccatcactgggcgcgacatggatccggagttgcataggaagcaatgaaacaagttgtgtcatggctgttcttatctactgtcgaactgtctttgtttacttnnnnttgttcnnnnnnnnnnnnnnnnnnnntgtctgttcttnnnnnnnnnnnnnnnnnnnnnnnnnngtgtctaagtgtnnnngtgtctca

SEQ ID NO: 2591 - DNA, 354 bp, Zea mays
atcattgggtgtggtggttatggtctagtctacaaggctgaactacctgatggctgcaagcttgctatcaagaagctcaatgatgaaatgtgcttgatggaaagggagttcactgcagaggttgaagcactgtccatggcacagcacgaccatcttgtgccactgtgggggtactgcatccaggggaactcgaggttcctcatatactcctacatggagaatggcagcctggatgattggcttcacaacagggatgatgatgccagcacatttcttgactggccgacgaggctaaggattgcgcaaggagcaagccgtggcctttcttatatccataatgactgcaaacctcac

SEQ ID NO: 2592 - DNA, 356 bp, Zea mays
ttgatgcatttacaacaacgtgataaatatgttcattgcctatctgaactcttcatatgctagtaccctattaagcaattaatgtcaagtgtctgcctaatgggccttgaaaggcttgtatttcagttcatggaataaaatgtgaaaacaatatgcccagatgttcccaggagcttatctgtactatcaacattataaaaccaagtgaaagatctagactctccatattatgcttatttttcgtttcacttcatagtgtatacaaaatcaaataaagaacatgcttagtaggctagccgcacctcactcaacaattctgcatcaagcatccacacaggtcagctaaaggcaatttc

SEQ ID NO: 2593 - DNA, 701 bp, Zea mays
  misc_feature (662)..(664): n is a, c, g, or t
gctgacacttaaaaaaagagtaagatggaaaggaaatgtatcaattgagagcagattgtattttattaagtatattatgtcactataacctatttcaacttgttgagagcctagcagcaattcttgtggtcggtttatatttttgccacactactaggcttcctgattagtccccccttcaaccaatatatgtcactggatgtagttaagcaaaatgtcacgcagagcatctattatctgaatggcataagtcagctgctgaaatgtattgtagcattgaattcaattgtgtgatcctacgtgtgtagagtgtagactgctttcaaaacacaacccttggtcgaacaagtataactgccccttcaacattttgggtcaactgcagtgctgatctgtttatcctgcaggtcattcctttgcggaggatcaactgggtttttcgtgtacggctactgcctgtactactactatgcgcgatccgacatgtctggcttcatgcagacatctttcttctttggctacatggcctgcatctgctatgcattcttcttgatgctcgggatggtgggcttccgcgccgccctgttctttgtccgccacatatacaaatcaatcaagtgtgaatgagctgttgctggggagacgaagagcagcagagttgnnnccgtttttggtgccccaccgagaggtcccagatatag

SEQ ID NO: 2594 - DNA, 364 bp, Zea mays
tgttctgtgatgcgagcaatcaaactttttagtaatgtctgtgttcaaatatctatttgtaacataaaattgatgatgtagatttatcagggaccacatcttcatggtattattagacatgggttttataaactttattataatagaaattagtggtcaaagtggcattgtggagacagttgacgacttgacgtcgtgatgatgttcttttgtgagcactgagcagatggcatgtcacgtcaaaaatagtgtggagaccactacaaaggctttatgtgttggtagctggtgtctttgggataatgggttggggaatttggaagcaacattcttatacacattactggatccttgtcagttgtgg

SEQ ID NO: 2595 - DNA, 260 bp, Zea mays
cacctctcctttcctatggccgctgccgccgttcgccgcctactgcgtggggcctcgtccacctccgtatccaacaccagccgtctcctctcctccaccacctcgccgccaacccaccagagccccaacaccaactcaccggttgccttcgactagtccaacgacgacgttgacggctcctcacatctacccccgtccactgaaaagaaggatgagctacctcccccctactacgaccccttcagcaagaagcccgccat

SEQ ID NO: 2596 - DNA, 279 bp, Zea mays
  misc_feature (86)..(89): n is a, c, g, or t
  misc_feature (181)..(181): n is a, c, g, or t
  misc_feature (243)..(251): n is a, c, g, or t
ttcttacccaccaggggatactcaggccgagaacaatccacctcaaggattcgaccggccatacaactgggcttctcaatcacgtnnnnagagcccaggtgcggcgactccacttcgccaagaatctgaccacagtattcaggacaagcagcaattgatggctaatgcaccttttatgttnccgccgattcctcctcaccagggaaactttatgatgcctatgaatatgaatcagcctttgannnnnnnnncaccattcaattatcctctccagcaaga

SEQ ID NO: 2597 - DNA, 351 bp, Zea mays
ttgctctcgcgggccaggcgggacccaaggcaacaaatttggccagcttcatgtgtgaatctaaagctttttactgtaaagggacaagctacaatgaataccttagtgattgggtgcaaggttgggtatgctcctgtggcgtcctcagttgatgccaattcaggaagtcttaaaagtttcacaggcttccataaaaagaaaagccatgggcattcatcttaccaactacgagtggtccatgctgtagatactcatgacagtcgcactgttcagctgttcatctacaggtagcaagtagtctagatgtgtttatagctgcttttattcagccaattggcctcttacataagc

SEQ ID NO: 2598 - DNA, 408 bp, Zea mays
tctaggcatgggcatatgaactgtgggttggttattctttctatgcaacatcaacggttgtggaactttctatctcttgttctctctggctctgccacccttttagctacaccttgtcgggtagtggtattgccatgatatagatttgttgcagttgctagtagattaatgggatgcttgttgcttggttgacgaatgggttagtacatcatatttccactcctaacttttttgtttgatttgtggaatggaatggattgatccaccaccacatcattccttataagctattagtataaccgcatgccactaaaattcatgggatgaacacatgatggaccacctcgcctgtgtccggtgtccccctccccccgactttagtgtccataggaatttgtggcatccctt

SEQ ID NO: 2599 - DNA, 220 bp, Zea mays
acgacctgacagctcttccctggtacgacaatagggtttggagattttttgccgtgagatactaagatgggctatatcactccattggatctcataggacacaatcacacaacaatgtattaggctaggtgggtatgggaagtagcaaggagagctggagatattttggtctaagttaacagaaattccttcacttatttgatttgtttcttatttccta

SEQ ID NO: 2600 - DNA, 324 bp, Zea mays
  misc_feature (313)..(314): n is a, c, g, or t
tctgactgttcagggaatggtcaagaaaggtctgaattcactgatctctttgggggcctggatgatctggaaccaccgtaacagatgcgtttttgatggacaaactccctgtctcccctctatccttcggcaggctgatgatgagagaagactgtgggcattagctggggccaagggcctctcttttttggcagcttccttaacaaatggctgattcctgctgtttctattttagtagtagttttttgagtctggctttattggactctttcacttataggaggtgctggcctccgcaaggagcttattgttnntaacctggtc

SEQ ID NO: 2601 - DNA, 350 bp, Zea mays
cttcttcgttggcagcggtttttgcttgtgccgccgccgattctgcctccacgttgcctttggtaggctttgagccgatgttttcttgggccccatcagccccggcggtggcaaggacacacaagccattgtttcctccggcagcagcgagtgtgatcttgcgcttgtgcttcttcccagacaggtgagaccgcatgacgatctcagatggtgcctttgcattgcagctcaggcagacgaggaagccatccacccgccgcagagggtgcaacacactgtctacttccatggccagtgagtcagaatcacagacattgttgacctgagccccagcagaagttgcactgcct

SEQ ID NO: 2602 - DNA, 355 bp, Zea mays
cctagtctaccacttcgactgggagctagcggaaggggaggatagcaatagcaatattgatatgactgaggtgttcggattgacagcgcgtcgaaagcacaagctccttctcgtcccaagatcagcatcaagtgcacctgtcgctgtagaccagagcacagggagaggagctcatatgtaaacctagctagctagccccttcgctgcaaacttgtatgacagctgtgtcagtagccgccggaattaagcttattttcggcggctaaactctggccgccgaaaataatcttggccgccgaaaatgatgtacaatgttgttgtgcgtgtctccaatctccacgagtttcctctctct

SEQ ID NO: 2603 - DNA, 362 bp, Zea mays
  misc_feature (353)..(357): n is a, c, g, or t
tatgcatcgctcattgatgggtacgttgctgttggcagggttggggatgggtgtaggttgttgaacgagttggttgatgctggctaccgtgctgacctggggatatataacacacttattattgggctgtgtggcataggtagggaggataaggctcataagttatttcagattgttcttcaggaggaccttatgccaagttctgatactgtttcaccgttgctagcttgttatgccgaaaagggtgaaatggttacattttttgggttggttaacaaactggcagagatgggcttgtctgttgttgaaatgttagtagattttatgaagctctttgcaggaaaggatggtannnnnttgaa

SEQ ID NO: 2604 - DNA, 403 bp, Zea mays
aatttacatgtaattactgtaaaggctagctttttctttcctttttattgaacacagaccaaacaaataggagaattgtttggtcctttccatgaaaatttgcacagatctcaaagaaacaaaattttaattaataattgtattaattatatttctcttgtgtctcatctaggctggcatgcctgcgtccagcccatgcccgtagctagctgaagttcctgatccactttcatgaacttagcggctgctagacgaaaaaattgatcaaattagctaaataggctctgtaattgatcgaattaacctattagtttatctaggcaagcaaacaattcaaccatgtttgattcatgtgaacgataaaagtgacagctgcaaaggataccaacaaggttccaaaaaa

SEQ ID NO: 2605 - DNA, 339 bp, Zea mays
ccaccagcgcggacgtggagcatcccgtcgctgccgttggatgtcagcatcgtcagcaggttctgcgagcactcaacgtcgattgatgagctcatggccgtggcgacgccaggatggctggggaatagggttggcacgggctggtcggcgctcatcagctgtgggagctgcatggaagggtcgaaagaagggaagtcatattgcatgaggtgagggttgttcttgtggtctgttgttggcagggagctagtgccagcagggacgacaggaaccgtgaaaggctggagctcttcgtcgtccagtgccaccatctcagccacgtcatggcctctctgctca

SEQ ID NO: 2606 - DNA, 373 bp, Zea mays
ctgtccaagaccccagttttgttgcggcgatgttgccgcgcagggggcggagtcgtgcacggcatcttctcctgccaaactgcacgcatccgtcctaatcctaattcgaagcagcctcaacctcgaaattccatggccatcaagcatggccaaaggtccaagcctcgttggcttccgctgctcctctcttcatctcatccctcgccgccgttgtcttcttcgacgagttaaggctgtccttcgtgacatgtgcttcttatctatttagtgtggtgtcgtttgtaatatgtcctgttgaacagccttttgttttatggactggccaatagcctttgttgttgaattattgtgcttccggtgttcttcactttgc

SEQ ID NO: 2607 - DNA, 300 bp, Zea mays
gggagctacggggtcgtctgttcggctattgaccaacatacgggcgagaaggtagccatcaagaagatacagaacatcttcgagcacctgtcggacgctgccaggatcctccgcgagatcaagcttctccggctgctgaggcaccccgatatcgtcgagatcaaacacgttatgctgcctccgtcgaggagggactatagagatatttacgttgtgtttgagctgatggataccgatcttcaccaagttattaaggctaacgatgacttgacgaaggaacaccaccagttctttctctat

SEQ ID NO: 2608 - DNA, 385 bp, Zea mays
cgatggcgttggtgacaatctctcccccttttatatgttcagatggtttgtctttcgcacccgaaaatagatctaagccaggagaaatgtcagactgtgaagcagagatggtcacatgctcaaacaatttttttggtaatgccgagcaatctgctaaacttgccagcagtgatgacaggccagaggctttcacaatgactgagagcactacaaactgtgggggtgaacaattgacagatgccaaagaacctgtggccagtacagcaaaagaacagttatcgaaagacatcgagactatgccagataaaaagaagggtgagggggctctattctatgaacctcctcgattccctggtttggatgtcccgtttatcagttgcgatct

SEQ ID NO: 2609 - DNA, 360 bp, Zea mays
gtggcatctcaagctgatagctttaatttatggctctcttttctttatgcacattccatatgctagaggttctgacctaaacaccgataagcaggcccttcttgcatttgctgcatcactgcctcatggcagaaaggtcaactggacctccacaacccaagtctgcacgtcctgggttggcattacatgcacaccggacatgaagcgtgtgcgtgaagtcaggttacctgcaatagggctctttggtcctatcccatcaggcacacttagcaagctcgatgccttggaggtgttgagccttaggtcaaaccgtcttactattaatctccctcctgatgtaccatctattccctcacttcg

SEQ ID NO: 2610 - DNA, 352 bp, Zea mays
gcttacgacgctacctctcttcgatgataaggttttgtggagaataattgatggtaggcttggtttcttgcagcagttggactgaatcagttgtgctggcacttagctcaaatcagatttgttcatttgcagaaactaacctggcatactaccaaagatgttttggattgtcaaatatcagttgtagttattcatgagtgggcgactcaattcaggtccagaaaccaccttttagatctactccatgtccaatgctcagttgggttgatctgatcgaggaccagcaactgcctttagatcaactccatgttactcagtaggttatagtacaaaagcttactacaatcacctc

SEQ ID NO: 2611 - DNA, 371 bp, Zea mays
actagctgtatctctgcgacgtgccggtgctcgcacgcaactacggactagcatgtattattcggtcgtcgtcgtcggtgttaagacgcagacgcagggagctgtacgtacatacagctgtctgtcatgtcatgtgctgttcaaggcaaatcctgctagtaccagtagttggttaacatgtacaactctcattttcacgtagccggacttacttagtatttgttttctcgttttctttaaatgcaaattcgtacataaaatttgcagcaattgctcattgagattgattgcaggccgggcacgcggtcgtgcccaagttcggctcgtgggacgccgagaacatcggctacaccgtcttcttcgagaaggtg

SEQ ID NO: 2612 - DNA, 396 bp, Zea mays
ggcttcttcaccgacgcctacgacctcttctgcatctccaccgtgtccaagctgctcggccgcatctactacccggacgacaacctgtacatagacaagcccaagcccggcactctgcccgtgtccgtcaacaacatggtgacaggcgtcgcgctcgtcggcacgctcatgggccagctcgtcttcggctacttcggcgacaagctcgggcggaagcgcgtgtacggcatcacgctcgtgctcatggcagcctgcgccatcggctcgggcctctcgttcggcagctcggcgcacgccgtcatcggcacgctctgcttcttccgcttctggctcggcttcggcatcggcggggactacccgctgtccgcgaccatcatgtccgagtactccaacaaa

SEQ ID NO: 2613 - DNA, 360 bp, Zea mays
agcatccggtacgtcttgtgttgctgctgtgtttggaagtgggattgcacacgctgaggatgaagttccaagcggaggtgattcacaagagccgtttgccgaatacgatggtaccagcaatgaatgtgatgtacatcattggcagaaattctagcttggctgcatcagcatggtaaatagggttttgaggattcgggggtttgatgtcctgtacgcagcagcagccttaaaagtttctgtgcccagccagcatctctatttggtttgcaaatgtaattactagtttgtactgtcttgtttttggcaaacttgctgcgagcctcgtgcttagtttggtttatttatttatgaactttaggc

SEQ ID NO: 2614 - DNA, 334 bp, Zea mays
gcagacccaggccgcagaacagttcaaggcccctgacttgagccagatcacgagtccagagacttctggcccgggccaggaagacaatgacgaggaggtcgacgaaactggtgttgaggccaaggacatcgagctggtgatgacccaggcatctgtttcgaggcccaaggctgtcagggccctcaaggcttctaatggggacattgtcactgccattatggatctgacaacttaaaaccattttttctctctccctttggagtgccatgctatgcagcttgagtgttatctgtggaccatatggttagagatgttagcatgatggcttcttctg

SEQ ID NO: 2615 - DNA, 787 bp, Zea mays
ttagctagacttgaccggaaacacatgtacggcgcagctgattggctgtccttgtccttgcttaataatacaagtactagctagctggctagtgagtactactagtgaagatcagaaactgagcaagactgctggaacttttggcgcgtgcatcaggttctggagatccgtccgagcatcatgtgggacaagggcaaggccttggagtttctgctcgaatcgctcggtacgtgcgttacgacaaaacaaagcccaccccccgccccgccccgcccttgtctatttcggccgtgtcgtccacagttgctgctctcgtttcgcctgcagtttttattcagtacctacctgcgcgcgtatcacacctcctgtccaaacaaaatcgctgctggctgatgctgatgacacgcacacgccgcctatttatttatttttttcccgctgctgtcgccctccaggattcgccagctgcagcgacgccctcccggtgtacatcggtgacgaccgcaccgacgaggacgccttcaaggtgctgaggaagaggggccaaggcgtcgggatcctcgtgtccaagtgccccaaggagacgaacgcctcctactcgctgcaggaccccggcgaggtcatggacttcttgctccgcctggtggagtggaagcggaaatcctcgacgacgacgacgactcggccgccggtgtagctcttgttcttggtcgactagtcaatcgatggaccgatcgatcgatcgaatgggcgtccaatcatgcgcgaaaacataccccaccactgc

SEQ ID NO: 2616 - DNA, 590 bp, Zea mays
ggtccgctatagatgaagcacattacatgaataaggtatgtagttggattttctgttccatttcttttccaaactgtaagatattgggttttgagcacggttatgcttttcatttctaggttggagctttgtcaaaggtaaaccataagaatcttttgaaccttgtgggttattgtgaagacgaaaaaccattcattcggatgatggtgttcgagtatgcttcaaatggatcactatttgagcgcttgcatggtgagttttaattgtgggttgcctttcttttcaggggtatgttgtggggtactgcaaagctgcaaaagccttgttatctgttattagcagtcttcacacaagggctcatgatgttagcagttgtgacaggaaaattcatataagcaggtttacaaattctaattatcatcaaaaacattgttgttgcagttaaagaagcggagcatctgaattggcagtcacgcctacggatagctatgggagtactgtactgcctgcagtatatgcaccagcagaacactcctgtaaccctaaagaatctaaacagttcatacatatacttgactgaggacgatgcc

SEQ ID NO: 2617 - DNA, 1230 bp, Zea mays
cttcttttgttcctttccttgtacaagtggaagagaattcatagaggtacatgttccgcgtattttttatatccattcagttatttactttttaaaaatacaagtttagttttcagcttaagtaaacatgatttggcagtaatatacaagttacaatgtccctgggcgtgctatgctcttgcaaaatattactgctgctaaattgtttcatagtaccaaattcatatgataaatgattagtattttttatcagatttgatgtagtaacatatagcactattttagaattgtattctttctagaacggatggggtacagtttgaacatcctttgatgtagcctctgtttgacaaagtacaaaattgatggaacttctaattcaattatttgttctttttgtctgttaggaagcgcttattcagcattatgattgatattccttatttctttagagcattcgcggacaggaaacatgaaagaaataggtctgggtactgctaacatgttttatggaccaagatgctggcatgcactcttttggtcattccggaggtactgctaacatatttacatgacactgcctaccagtatatttgaactatcggctacatgttgtagttttgtataaatgtttgtcctttaactaaaactcagaagtaaagatcgatgcatctagctgtgttctgcattctcgaatgactttggagctaaacgcagaaggaagatactgaactacagagtattccccctttgatagcttcttgttctcgcttgagacagccctaccagctctacacacataactttgtggctgttattatattgaacatgctccttacacaatcgagtttagaggagcggatggttaggaagaaatagataactgatatcattttggactactttatgtagtcactccagggcgcccaaaaggcgtcggatgttgtagtcattgcataatatttgttttagctatccataatatttgtttctcgttatcattggtctatgttagttattttggttgtgttgatgagcttctgagagttggtacataaagtaatattttgcatgctctgaaatcttaatcagtgctacaaaaatttaattcttgagaactgtactctatcagtgtggaagaatgatctaggagataaatcttttgtcctatataattcaaatgtttatatatgtgtgttgatacaggctaatgtacatattctaaatatt

SEQ ID NO: 2618 - DNA, 356 bp, Zea mays
atcgccctcgaactacatcgagccaacaagttcatggagcgcggttccatggcaacggacctctctaaaccgggtatcataccatcttcgacgtcggcgttcgggcgcacacagatcggaaatcacttcgccgacgggcctgacggcaaccgctttgctgacaaccaccgggatcctgggtttgggagggattctccccaaccccatggcccggtcaagggtaagctacctgagctccagccccatgatttggatactagtgaggatgtcgtacgggatacggaaggaatgggggctcgtgaggagcatcatggtggttggggcaatttgccacgcctgaattttccatcgtttga

SEQ ID NO: 2619 - DNA, 359 bp, Zea mays
ttggacacactgacagctgtcaatcatttcatggctttactgtttaagtgagcactgagcagtattgccaaattcttggatacttggaaagtagcttaactgtttaagtgtaaaatagtcgttgctctggtttagggtttggtgagtttcatatactgcatatatccccatcggggaccatttagtacatggtttttaaagcggtaaggcggtccaaggcgttggagcaccgcctggacgcctaggcaaggtaggcgggcaaggcgcctaggcgttagaccaccgcccggacgcctaggcgacgccttaagaacagagtttagtacacataattatccatcctcctctcatctttattt

SEQ ID NO: 2620 - DNA, 696 bp, Zea mays
  misc_feature (447)..(449): n is a, c, g, or t
  misc_feature (528)..(528): n is a, c, g, or t
  misc_feature (536)..(538): n is a, c, g, or t
  misc_feature (551)..(551): n is a, c, g, or t
  misc_feature (592)..(602): n is a, c, g, or t
  misc_feature (622)..(627): n is a, c, g, or t
  misc_feature (632)..(634): n is a, c, g, or t
  misc_feature (650)..(650): n is a, c, g, or t
  misc_feature (652)..(660): n is a, c, g, or t
  misc_feature (669)..(683): n is a, c, g, or t
  misc_feature (690)..(693): n is a, c, g, or t
ctaatgacaagatccacgataaattgcgggcatctcatccaaaatgcgacatgattacaatgatttacatcactacaaatagaattggcagcaatgtggctactaggtgagtcagccagcacgactgggattttgaagcaaaactgtccgggcttacaggcccggatgctgttccaccgttgctgccgttggcgccagcgctacaaacaggagcagattacaaagtcattacaatgcacaaaataagactagaacctgtatcacggaatggtacactggaattaccttccactgaaaatgcatgaaccatggcctgcaagaaatccacgaaaatttagatcagtctcactttattaacatggtaaaaaaaaagatcttatgtactgaatacccttaattttcagagattaatttaacaacaaaaactgagtttataacaataaactnnnaaagcacaagcataaccacaagacgctgatagctgttgtgaccatagattgtttctcttgtattgtgatttggacagtnatttatgnnngatgtaacagctngagcaatgatcctattttgactaactccggcttatatagtnnnnnnnnnnnatcacgatcaaaatatttcnnnnnnattcnnntgagctcttaattaantnnnnnnnnnaaataaatnnnnnnnnnnnnnnntctgaannnngat

SEQ ID NO: 2621 - DNA, 413 bp, Zea mays
gaccttgttagagcactggtgcatgttcgctgttctgacgtggcaatggaaggagaggaagattctgctgaagaaaagagacagaaggcattggtttccttgttggtaacctgcccatttgaatctctagatgttctgacaaaattgctatattcatctagtgtggatattggtcagcgcattttgattattgatgctatgactgaggcggcacaggagcttgctgaaactaaaactgtgaagatagaacagcgacgtggtaacttgataactgacacttctccttcttggctggttccgagtaatataggacctcctggggcaggcccttggagagaggtatctgaaccaggcacgcttctaagttggtcacaccgttatgaaagagaggttccatctaaatcgggtcaatt

SEQ ID NO: 2622 - DNA, 673 bp, Zea mays
  misc_feature (608)..(610): n is a, c, g, or t
  misc_feature (641)..(643): n is a, c, g, or t
  misc_feature (653)..(653): n is a, c, g, or t
  misc_feature (655)..(658): n is a, c, g, or t
acgtccttccttttgtttcgcccggggcttcggaattatctggatccgctactgcccccagcgttcggactcccgggtcgcaggcagccatgtctcgtcctggctctgggctcgccgcgctatcgtctcggccattcgctccgacgtccgtcttcaatagatttgccctactcgtgaccacgagaatccggcgaggagggagaccgctcgtgcggagtctataatggctgacgggcagcatattcaggttggtgtctggttcccccagctgtgaacctcgtgtttttgataacctcctgattgttctcctagtaaatatgtttaatcatagttgaggttagggtttgagtctttaatcacattttttggggattcaatttaatgagggatttgacctatgttaatttgtttgttttgttattgttgcaagtacatatgcttttatgtttaatcatagttgtggcatgagctatttgtatgcataactataacacttacctcaatgaaattcaaggttcttttctgtctatctaagttaacttgcaatttttttttgtgtttagtcaatttgtaggagagaggacgccatacatcaaagatgactaaannngaggaagatgaagaatacctcgaagaggaannngatgcccttncnnnngcaggggggaacaca

SEQ ID NO: 2623 - DNA, 221 bp, Zea mays
ggcgcgcgctctatttcctcgcgcggcttcctgctcgcctggccgctcgtccaagagctctccatcgcggcgcgcgcttcttccccgctcgctcctctctgcggctcgccctctcttcctccagctcatcctgctcgccatggccaccgcgccttgtttctctttcccctgcgctcagctcaccgagctctccctctccctggttccatgcaagtgcgtcc

SEQ ID NO: 2624 - DNA, 795 bp, Zea mays
gatgccggactccatgggctccactccactgcatgatgcggcagaggaaggtgctgttccaccctttccgcgggggcataaagttattcatctgtccacaaatttcctatgctctgtaggagtaagagccctttgtatgtttagatgatcggagtttgtgctaacattttgcctttctgcggccagggcattgtgcggctgtgaggatgctgctgtccaagggtgtcgatgtggatccacacggctgtcgtgggacgccgctgcacttggcctgctccaatgaccgggatcaggttgttaggatcctgctggaacatggcgcagatgtaagttcttattagtttcactctttctgagtcacaccatcatttatgaatcgaactggcatccatggcccatgggccagggggaacattgtttcatttgattgagcagttgtctattcagtaggttccccaggatttgtggcgctacttgttaaattcatttttccactatgatgattagtcatcaagagttcaaaactgatgtattttactctacagcccaacaaagttgtcggtcatgtcctcccaccactcatgatggcatactgtggcggttctttgagatgcatgaagctactgattgaggtctatttatttcttgacttaacttgatgtgctcataccaactcaattaccctgtttctatttaatatgctgtcatgatcacaagtgacaattctctaggctggtgcggatgtgaacttgattgctccttctggagtaattttggctcaggcagtttgtgatg

SEQ ID NO: 2625 - DNA, 300 bp, Zea mays
tttggtttgtgctgctcaggcttgtgggtggagctggtgacctgaagctgacgaaggatgggaacaccctcttgaaggaaatggtatgacttcatctttcacagaaacattctattgacatcctgatgatttatgtacttggtggtgtttttttttaatttgcagcaaattcagaacccaactgcaatcatgattgcgaggacggctgtggcacaggatgacacaagtggtgatggcacaacctccactgtgctatttatcggggagctaatgaagcagtctgagtggtgcatcgataaa

SEQ ID NO: 2626 - DNA, 381 bp, Zea mays
agactctggctgggtaccttcccaaccgcggaggatgcagctagggcctatgatgaggcagccagagcgatgtatggagacttggcacggactaacttccccggacaggatgcaacaacctctgcccaagctgctctatcatcgacctctgcccaggctgctccaacagctgttgaagctcttcagactggcacgtcatgcgagtcgacaacgacatcaaatcactcggacatcgcatccacctcacacaagcctgagcctgaagcctctgacatctcgagctccctaaaggaaaaatgtccagctggatcatgtggtatccaagagggtacacccagtgtagctgacaaggaggtctttgggccgttggagcctatcaca

SEQ ID NO: 2627 - DNA, 328 bp, Zea mays
tttccgattccttcacgtccacccatcccaagctgcccgcacgtcgtcaccttgctataaaacaagagctgagcccgcttcctccaatcttggactcagctaaacccgacacctttcctcgaggaccttgacgaaaacagccgccttttccttgccgtttcccgtttatataagtcgctgcgccgggttgaattccattgcattgcatcctcctccacttcctgccttgccttgccttgcctgcctgcctgcgtagctcgcacaccacaaccgccgcgttcttcttctctcgtccctaagcaaaagcgccgccgctcctcggttcttt

SEQ ID NO: 2628 - DNA, 346 bp, Zea mays
ccttccgtatccctgcctcgtctcgtccggagatctggtagtaggtagtctttgtctgtaacgctgtgtcggcacctcgaggacgaagatccaggggagcggggtgtttgtgtttcttctccgtccagccatatggtatggatcctagtgggcggcggtgcttcttcttctcttctgtcgtagccaaaactaatcatctgaggccagtgaggaagaagggtttcctcgcaggcaattgagttctgtcgtcgtgtacgtggagtctgattagcagcagtccagtatgcttggttggcgagtcaaactaactttttttaggggggagggcgcaaattatgtagtgacc

SEQ ID NO: 2629 - DNA, 226 bp, Zea mays
ttattattcaaagctaacacacgtaaataagaaaacacagcaaagcgaggggcaaggcatgatgctcgcgaacatgatactccccacgagtccacgacgatcacgcgttggcagtctatccctttttctgggagagcagcacctcgtggatgaccctctcgaggttagtctccgcaggcccacccggcagcgtcaccttcacggccttctccttccactcctctgc

SEQ ID NO: 2630 - DNA, 449 bp, Zea mays
cctggatatagctgctcggcgctacagagttccatggtgagttttgtgacgatggagcatcatccatttgctcattatactttgtattgaacgatatcttgcttgtcagggcgcagactgccattgacatccttgcgaagcgcgcatactcccacgagacgaagatcagcagtggttgctcggctaaggtggtcagtcggcagatccgttggtgtctgtctgatccccgcttctcccccttggcaggcgggcggtagcatgatgatctggttgggttcaacaaggacggcgctcgcctgatccatccattgcctatgcctggcctgggactcccatggtccatggatttcggtgcgtgtgatgaatgcggacgacgccagggtttcttctttgggcttcggcgagcgacacgggcgtgggagctgctgtttttgtgcttggatttccgt

SEQ ID NO: 2631 - DNA, 266 bp, Zea mays
ctcctcccccttctctctcaactcctgctagctctctctcacacacactagccggcggcgctcctcaattttcacacttcctaaccacatcaggcgcacacctacgcggccataccctcctccaccgatcacttctcggcagccggcttctcgtcctgcatcccaggagagatcgagagaatggagctgttcccagcgcacccggacttgcagctgcatatcagccctcccccagccacgaaaccaacggagctagggttctggaa

SEQ ID NO: 2632 - DNA, 480 bp, Zea mays
ctgggctatttgcgaaccttcttgctgagaacttgggttttggtcctgtggctccatttgatgcggccgcatgctttctggcgattggcatggctatcataatgtcctcatggagtgaaaactacggagatccatctgaaagcaaggacctgatggcccagttcaaggttgcagctaaggcaattgcgtcaggtatgcttaacccatctcatcagactgcgcataaccaaatatgcatatgaaacctgtgtttgccttgtaacgctgtccatttgatcttcagatgaaaagattgcattactgggagccatacagtcattgtttgagggctccatgtacacatttgtcttcctatggactccagcattgagtccaaatgaagaagacattcctcatggttttatttttgctacattcatggtgtcatccatgctgggtagctccatcgcgtcacgtctattagcccgaaatctcaaggtt

SEQ ID NO: 2633 - DNA, 382 bp, Zea mays
cgccctgacacctacattggctcggtggagaagcatacccagacgctctgggtctacgaggacggcgccatggtgaaccgctccgtcacctacgtccctggactctacaagatcttcgacgagatcctcgtcaacgccgccgacaacaagcagcgggatcccaagatggacgcgctccgcgtcgagatcgacgtcgacggctgctccatctccgtatacaacaacggcgacgggatacccgtcgaggtccaccaggaggagggcgtctacgtgccagagatgattttcggccacctcctcaccagtagcaactacaacgacaacgagaagaagacaaccggcgggaggaacggatacggcgccaaactcactaacatcttct

SEQ ID NO: 2634 - DNA, 480 bp, Zea mays
  misc_feature (30)..(32): n is a, c, g, or t
  misc_feature (344)..(350): n is a, c, g, or t
  misc_feature (353)..(475): n is a, c, g, or t
ttgagttcaaaactgcacgctcatcaattnnnagtaattctgaaaccaaacacgttgctgcctccatagtaataacgtcctgatactcctgctgaaccaccaactccaagtccatagccacatcattagacttcgtatgatcacattgcttagaagtatcctccatgactgtgtcttctgctgcctcctccgtcggggccaaatcaaaatcatgcttctcggaataatctttgttctcaccttcagtcttatcatccccatcttgatttcccgtaatatcattatcaatccacctcccatctttgagaaacttatcaactttgaaaaaaaatctcataaagccnnnnnnnaannnnnnnnnnnnnnnnnnnnnnnnnnnnnnnnnnnnnnnnnnnnnnnnnnnnnnnnnnnnnnnnnnnnnnnnnnnnnnnnnnnnnnnnnnnnnnnnnnnnnnnnnnnnnnnnnnnnnnnnnnngatct

SEQ ID NO: 2635 - DNA, 348 bp, Zea mays
ggtgcgcgtcgtcgtatgatgacggctcctcgtccgggatgaaggtgaaggcgtacgcggggacggccgaaacgaccgtggacgtcgatttccgcgacgccggcggttccaagcgcgggaagatcgagttcagggccaccgccagccccaccagggtggtgttcgttagcttgggctaccacaccaagtccgacaacagcggcacgctctgcggtcccgtcgtagacgacgtctcgcttgtccccataccgcagccgtatgctcgccgcctgcttctataaggcctaactcatgctgcgtctgttttttctttttattttttgtagaagtacccatgttgcttgggta

SEQ ID NO: 2636 - DNA, 458 bp, Zea mays
cggcggcaatcaagcagcagcgggatgatggagggaccgttccgattcttgccggccgaagtgaaagagatggaggagcgcctgttcccggtcaccaatcgcaggctggatcacatcctcatggatgagctcgctctgaaatttagctgcttccggcgccgtgctggcatggttcccgtcaagccaaagcaggtatgtgcatcgacgatgttccgttccacatatcaatttcaaattccctctcccatgaacctgcggtttcattccgatctggacatgcatgcatccaggtgctcaactggttttataacaaccgtaacaagacttctgccaaggtagcagccagggaagcacatgctccatgggagttttgggccaaccatcagcaagctagagctagaggaggctcatccatcagcaagctgaagccaaagaaggcgactacgcacgcaggatct

SEQ ID NO: 2637 - DNA, 353 bp, Zea mays
tcacccaaggatgtttttgttgttatatccgagaaagaatgaggtttatcagatcacagttgacacaaaagcaagctcctgaccagtgaccacacctaatgaagaacaggcagctgcgccgcagcacacacacacacaccgaccagcgcagagagctatttgattcagatgcgcatttggctgattcagatgcgcatttggcagaaggcaatcgctgagcgcgaaggagtaaaagcatgatcagatattcagatcttggatcagtctagactgacaccttaggtcgccctttacaaatatgacttaaaaaggatgtgaacagagtagtacagcacatgctttggaagtttgga

SEQ ID NO: 2638 - DNA, 440 bp, Zea mays
gtggtaggcattgcctacagtagtttgacaggtttgcaggaagctgctataagggcattggcaggccttgcctgcatggatgctgatcttgtctggcttctccttgcggatgtgtactactcactaaaccaaagggaatctttacttcccaaccaagatctagccctggtatcagatcttttgccccctccagtgtcttcgagagaatacctctttgtacagtatggaggtgagggtgtcaggtgtgatgtagatccctcatctgttcattatgtgttcagaaggatgcagggtgtgtgatcttgtgtgacctgaaaatcaggtagaatccacaactttccatctatatcgacaggtttctctttcacatttcattacttaagaattctacttttttttcaggttcctgatactgtgtatttgtaatcttgctgagtttc

SEQ ID NO: 2639 - DNA, 680 bp, Zea mays
ccggtgctgtcaggtactagaacctgctgatcccacgtctgttagagaaagctagctgttttcgtgcccatgctctatgctcagagccgttgatgcttgccgcaggcgtggcgatcggtgccgggtggcagtccttggtcgcgttcgtcaacgtcgggagctactacctcgttggcctgcccctcgcggccgtgtttggcttcaagctgaagctcgatgcaacggtaagacaagcctggaagatgtgatatgctaatgctgctcatttgatgcccttccttcctcgaaggcaatctgctgatcttgtatgggctgcaggggatttgggtgggcgtgttgatcggaacggtattacagactgtgattctgttcgtaatactcagcagaaccaagtggcagaaagaggtacagtacactctgtctcatcttcttcattttttttgtgtgcgcgctctcgttcttatactctgaaacgatttttatgctactattttcatattattttttctgctcttgttcccgtgttctggaacattctgtgcaggctatgctagcagaagagaggatacgggagtggggaggaaacgtcgagctgccacagactcaagaaacggggccaagtgaaagcactgccacgacagacgcaagaaaggggggccaagtgaaaaacatcgcggcac

SEQ ID NO: 2640 - DNA, 945 bp, Zea mays
  misc_feature (931)..(937): n is a, c, g, or t
gccgaggtggatcggtagcaaaaaccgatactggtacgttgccatggaggcagtttgatttggtggacctaacggccttccggatctcttgggagccagagcgatggcgcgcggcgctcgctttctccttgttctcgcgttgctcgccgcgctactcgccgtcgtcctccagctctaccgccacaggaagccggtctgtcctctgcttctcgctgccttgatgcttctcgaagtttatgagctagatctcgcttattttatctagtctgcggaagcagacaaggcgtttgcaatcagtggcaaccagtcgtcgcttaggcgtgttcatcgactaatagcttatgtggtcatatggagcaaacacataggaatatcgtgtcacattctgcaacttacataagtgagctcccagtgatttgatgcgatgtcttgtgaacagtaaaaatgaactagtagcggttcgtctgatttgtgggctgtggctctagcatgtgactaacattgtgccatttttgacctctgcaactgcaagttcccaataccgtaacacttatgtgttctctactactcgctccgtctcaaattataagacgttttgacatttctaggttcataacttttgctacgcacttagatatatattatgcctagatacatagtaaaagttacttaccaagtcttatttgtgatgcacagaggttgtggatggtggaagagctatctgtgtacaatggaaccaacgaggagttgcccatattactcgcgattttggggtacttatgcatttccttgccttcatatgccaacattttcttcccctctgacttgttttaatagtatgatacttaattaccgtgagaaaagggaagcttgatatgataaataagttaaaactcaaacgcatagcacacctttttaatacagttgatgnnnnnnntaaattcc

SEQ ID NO: 2641 - DNA, 633 bp, Zea mays
gaaacagtgtgcttccgggtagggttggacaaaaaaactcgcagctcgttaactcgctcgactcgactcgatagtggttcgactcgactcgtttataatttgtaacgagttgagcttgtatttcaactcgttatgataacgagccagctcgagctgactcacgagctgactcgcgagccaaacgagttgaattaattagtcaaatcacaataatctcggatccaaaatagttaatcttgtactctactatagttaatcttgttatttgttgagtgtggaatcttaagttgcaaactctattctttttttctaaatatatctctttcttttcttttgctacatatttttatatccgttcgtagacactagacatgatattatcgagctggctcgcgagctaaacgagccagctcaagttggcaaacgagtcgagccaagttggatctttagctcgttaacataacgagtcgagctgagccagctcgttattttaacgagccagctcgtcgagccgagtcgagccagctcgatatccacccctgctttcggggtacgtagttcagtcaacggctttgaaatgacaccgaaattcctcacatattttcggtaataacccggccaatccaagaaagc

SEQ ID NO: 2642 - DNA, 578 bp, Zea mays
agaatggatccacaggcagaaccagtttcaaaaggtattaatcacccccctagagtttatttggaacgcagttgttaatgctaactactcttttgcagttttttttgtgtgtggctgatagcagaaatgttaaaaattaattttgccttttgatttcatctagatgggctatcgggacggaataacacaagggcagaaggactctgcccaggaaggcttcaatgctgggttcaggcaatctgtaaacgctggctacaagtggggccttgttcgcggggttgccaggtgtatatccttccaagaactgatctcttgtattgccattctcctctagtcttgccctccgattttgatttcctttcctatctgtcgtcattccaactccaagtagtgcgctagccagtcttcctggcagtttgaaagaggaactggtgccggacgtccagtgcagagggaaactacaggatctgcacagctccgtgcgagaaatatcagcagatgacgctctccagatgttccacgagagtatccgccagagtaaccctccgtcagaggggtcaggatcatatgtagtagca

SEQ ID NO: 2643 - DNA, 904 bp, Zea mays
cttcatctacttgaactgcagtagaagtcctagtatcattcaggtgacatgaatttcttttcttttttccatgtcagctacactaatttatggaaaaagaaaagggcatgataattccactgcttgagcacaatatactaccagaagatctgcatttgattgcaaaatccagtctgaactcacagaaactcgttggcgagtccattgcgaacgcatgcctggtacctaatggaactaacatttaggtcgcactatcaagaaccaggaaccaaaaactacgttttaagaaaaccatctgtagtttctttttagtcaaagtacagaagctgtccattttttgttttttttaaaccaatcaagcaagagagctgccgattatattaaaaataagaaacccagtgtgagtaatacaacgagacaacaaaacctagggtctagcaacaacacaaccaaggccaccaaaatacccttgcatcacaaatgaaaaacaaaggattcacgagtcctgattctgcttctaaatttatggcagatatggttgagggagaagcagcagaaagtaggaaggctatccgcaggaagcaagataacgagcttgttcactgcaaacgacatggttttctgtggtacagaaactgggttaattaaggtcagtaacaaccaaactaatcttgagaactgactgacaactatgcttccctgagggtaatgtgaaacaaaaaaatttcttgcaaatgtacctacactacaggcatggataccgttgtgaagtgtagaagcaagaaggagcaggtggaaggcttaatcttgtaaatgtaaaggaaagctagagtgtacaggaaacatgaaaaagaggagcataccattgtacaagccctcaggacacaacacagcagccagcgcg

SEQ ID NO: 2644 - DNA, 332 bp, Zea mays
attttagtatcagatccatgttcatctggaactggatgtgtctcatgggctagggtttgtgatttcttttcttctgcaggaacaagctgatcctcattgattggaacctctagtgcccccatcccgtcatttagaacgccctttggagtatgagcctcattattgttctcttgaacaatctcggcgttctgtcctgacacgttttgtgtctggtcaaccttctgctcagaaggaatcttcagatcttcatacacctttacgacatcttccttctttaagctaaaaggaaatttcttgtccctaaattgaagatctatataaccaagttgatg

SEQ ID NO: 2645 - DNA, 324 bp, Zea mays
tgaaactgaaaattcgtatgatggtagatccttgagtactacctttacagttgttttagaagttttcatattatgttttaggaacaaaatgatagtatttgtcatgatagctagtgtgtgatctgctcatctgcattatgtctcatggaaatgtacatcacaaattatagcttattgataaaaattggaaggctggatggatgatacctatgacctaggaaaatattgttttcatctgccacttctcttcaaaaagcaaacgtcggtttactgcttttacttttcaacacagaaacacacatcgctatctgggatagcaacagt

SEQ ID NO: 2646 - DNA, 336 bp, Zea mays
gctgggaaacctgacgttcctggacctatccgagaacaacctcaccggagagatccctccggccgtcggcaatttgttggctctccacagtttaaatttgagcggcaatgccctttttggccgcattccaacgaccattggcaacctccagaacctgcgagttcttgatctctccgggcagaagaacctctctggcaatgtcccggcggagcttttcggcctaccgcagctgcagtacgtgtcgttctcggacaactccttctctggcgatgttcctgaaggtttcagcagtctctggagtctgcgcagtctcaatctctccggcaattctttcac

SEQ ID NO: 2647 - DNA, 983 bp, Zea mays
ggtatctcattttgcatgatagcatttccagattggacttcgaataacgatgccatttatttaagttagtgttttattattcgatattcagaattgagtgtcagcaagcattttaatcaattatagacatcagctcagagattcagtatggcatatgctttaacaatgaaaatgtcaatctggttttccctagttttcacctgggcactagtatcctactactgcaaagaaatataatgtgaattgctaccatgatctttgagggttgtgaatcaagtccattgctatgttacatttataagcttggaaaaatagtacatgcaatgtctcatcaatggaaccctctgtcattctaattattgatcacgtacattactaaattcgcatatgcttagtgtggcactgcatttatttaactgtgaacacagtttccaacaagccatcttaatgcacatatgtaattgatgtgtaatttgggtttccaaaggaagtaaatcactctgctcatgaagatagtgcacggtcctgttctgtgatcagggactatgaaaaactatcaacctgtttgatggacaaagtttacaaacttgaattggagaaggtatattaaaattcttttttccttaaaccgctcaagttctaagcaggtcatctttttttttcaatgttactttgatttgagtgcagaaactattggaggaacagtcccaagaccaacaaaatgagatttataagctgaaggccaatctggaaagctgtgagaaggccatagatgttcgtcactggttaagttcttttcagtcatttaattcttagtttctatcacctaatatataacttcattatctgtgcactaaaatattttacttatactcaggactgtactcttcaacatgaactggagaaggatgccattcttttagagctcctaaacctccagaaggaagtatctatcttgtcatcatcttctttgatgaaagaaa

SEQ ID NO: 2648 - DNA, 368 bp, Zea mays
ggctcggagacgagtacgatgcccatgaggccgcgaccgtggcggcgcttgcgctgcggtgcgtcagcgagggctccgggatgcgcccctccatgacggaggtggttcgcgtgctccaggagaagacgaccgcgctgatctcagccgcggggtgcaggccagccggcaagatggattcttgagctgtattgttacttgttagacgaagactgtaaatactagctttgtttagagagagtataaggtgaagataatggctcttttcttttttactcaaagtggattagtagttgttgaattggattacgttgaaaaattgatgtcagagttcgttgtagatggtctgtagtgtctcgttaatccaatcg

SEQ ID NO: 2649 - DNA, 370 bp, Zea mays
gggctcgcacgcgtacccgactacgcgcgccaggttcttgtgcctcaggcggctcagagtcgcaagctcggtgaggaagcacttgtcggacttggccgggaactgtgccaggttgagccgcttcacggcgaccaccttgccgtcgggctcgacgagcacgcccttgtagaccgtgctcaggttgctgctaccgatgacgttgccttcgtcgaatgaaccggtggcggcatccagctcgctgcaagtgaacttcctcagctccggcacgacgaagtcctccgcgaaactgtttgcaccggtagagcctcccttcttcttcttgtacctccggtatccgagaaagaggatcgtcacaagcaccagtagtaaa

SEQ ID NO: 2650 - DNA, 328 bp, Zea mays
  misc_feature (320)..(320): n is a, c, g, or t
catatagcagtatagaaggcgtgtgtctgcctgtcaatttgttgatctcgctagcgcgtgtggctttggcgcatgcaagcagcaggttagctgattgctatcatccgcatcggatccatgtcgggagctgctggtagggagttcaccggcggcggcggcggcggcagtagcagcagcttctcttctgtgagcaacgcatcacctacggaggtggaggaagagttcctgcggtaccacaccaatccgctcctcggtggccccacgacggagatgcgagacgacggcggcccctcggatcagccgccgctgactgtgaagangaagagaa

SEQ ID NO: 2651 - DNA, 390 bp, Zea mays
cctgcctcgcttgcaggaccagccagccacgtttaagctcgacacagagtgaaatattgttcagtgtacaaagttaacacacaagggcgccgctgcctttacgcccatgaatgccagagccaccgttgagtcactggcgttgggcagatggagattgctgcacctgcgcaggcggaaagaaccccatgcccgatgactgaaagaatccagttgatgttggtgattgctgtgccgcctgaggagactgctgctgctgctggggctggctctgagctggtggaagtggaggtggaggaggtggcccacttggtcgcggaaaacctgccggcagaatgttggacaatggaggcggaggtggcatagatccagccatcatcccgaaaggtcctc

SEQ ID NO: 2652 - DNA, 390 bp, Zea mays
  misc_feature (8)..(8): n is a, c, g, or t
  misc_feature (12)..(16): n is a, c, g, or t
  misc_feature (18)..(22): n is a, c, g, or t
  misc_feature (26)..(29): n is a, c, g, or t
  misc_feature (54)..(54): n is a, c, g, or t
cctgcctngctnnnnngnnnnnccannnncgtttaagctcgacacagagtgaantattgttcagtgtacaaagttaacacacaagggcgccgctgcctttacgcccatgaatgccagagccaccgttgagtcactggcgttgggcagatggagattgctgcacctgcgcaggcggaaagaaccccatgcccgatgactgaaagaatccagttgatgttggtgattgctgtgccgcctgaggagactgctgctgctgctggggctggctctgagctggtggaagtggaggtggaggaggtggcccacttggtcgcggaaaacctgccggcagaatgttggacaatggaggcggaggtggcatagatccagccatcatcccgaaaggtcctc

SEQ ID NO: 2653 - DNA, 362 bp, Zea mays
ctcgtaagggattctaccggacaccatctcccacaagagcagtccgaagctgtagacgtcgacctttcggttgtacgccttctgcttgatcatctcgggcgccatccacctgtaagtgccttcgtcctccacgagcacatcgcataaggcctcctggcaggcaatgccgaaatcagcgatcttcacgcagaggttctcgtcgaagagaatgttctcgggcttgatgtcacggtgaacgatcccctgagaatgtatgtactccaagccacgggcgacatcgagagcgatggatatggttctctctagagggatggggtggttctctggattgtttaggtatgaccttattgagcctccaggaa

SEQ ID NO: 2654 - DNA, 341 bp, Zea mays
cactatgaacaggaagcatgcatgccacggccacggttcgtcgatcgggcactgtaagaactccgcccaaaaccacgagacagcacgtcggcaattaatatacgtactaggataggaagacgatgaacagacagaaccagagtccatcagaaagcttatggaaggaggatcatcagtagtaaaactgctggttggtggagtaggtctgcccgaactgccaccacgccggcgccacgttgaggaactgtatgtactgcccgccggtgctggtgacggcgaagctgagcgcctgattagtgagccccgagagagcctgccagttagcgccccagttcctggac

SEQ ID NO: 2655 - DNA, 355 bp, Zea mays
aaagacaacccagttgaacttgaagttggtcagtcacttcgctttgctgcatctaccagaacctatatcctgcgaaagaacgcagctgctctattcccaactcctagccttccatcggatgttagtttgccatctcctccggaccccaatgatgaagatgctgttgtggcatacaatacagtacttaaccgatatggtataagtaaatctgacatattatccagttccaaagattcttcaggaggcgcctctagtgcaaatgatggtaaacatgcagttgaaaggctcttaaagagaggtaaaaagcgcagagtgtcatttagagatcaggttggtggagaacttatccaagtgg

SEQ ID NO: 2656 - DNA, 427 bp, Zea mays
acgacttcgttcacatcagattatgtcacagtgatccttcgagaggagcagaacatcacgaggacaccaagtctggcgtctccgcttcaacagaaagcgagatcgtatcgcccttcccaatccatgtatccaaccggtcatgcaaggatttcacttggtctatgcccaacacgggcaacacccttggtttaacccgtgaaacatggacaactccatcaacctgatcaattatgccttctattagaccagcctgaagaagggggaaaaaacagtaacgtcaaaagaccatgatgatactgccacaagaacaaagagagctaaacacggttttggacggtaggtcttacagagaggctcttcattaaaagatactccacatcttcaatagggagcttggtctgttctgctatatcccgcattgggatcg

SEQ ID NO: 2657 - DNA, 452 bp, Zea mays
gtcttccttgctgtctggaacccactctgctttgtgctaaccatattctgttcctccttcttcctcggcgagaatgttcacctcggcaggtaagtatgtagtggactttgcgatagcataatgtagctgacttgggtgatgaggtttactgaacagtgaattcactcgttggcagcattgtgggtggaatcctcttggtctgtggcctttatagcgtgttatggggtaaaaccttggaggttcatcagactgtggaatctggtgataatacggtcggtgaagtgcaaaatggacaagaagagaagaatcatcaacagaaggtgctggagaagggacgccaagaggaagcatcaatgacagcacccggtgtagtgtgatcgattgcttgattccataaagctagcaatctatggttcatttatgtcatgtctgtggttcttgtacaaattgcc

SEQ ID NO: 2658 - DNA, 375 bp, Zea mays
cgtttggcttttgttcgtcattgaggctggtgcacttctataatgggttcacgatcaaagaacgaagatgacaaggctcttgtcttgtgccaggaaagaaaacgatttgttagagaagctcttgacgggagatgtgcttttgcagctactcatttcgcttatattcagtcactgaggcacactggatttgctctgagaaaattcgtagagcctgaagtgccgacagattcgtcactgttcacatcaacatctgccactccagagcctcctacaatcatgcagaaaccgatgaccatatctccatccctttcacatcatgctagtgactctttctccccagttccctcaccattatcttcaggacgtttccatgtc

SEQ ID NO: 2659 - DNA, 404 bp, Zea mays
tgctcaaatgtaacttcatattctcttctcaaacttaatcatcatcatgtaactaattaattcttcatattttgctaggcattgaagctagaggattcatctttgggccagccattgcgctagccataggagcaaagttcataccactacgtaaacctaagaagcttccaggtgatgtgggtggagaagtaaatacaaacaaaacatctataaattagaccccacataattttggtctcgacagtgctgaggaagtgcaggggcttctgtatcttgaatgtcgtatttgccgcccgtaaactttttaactccgaaaatgaacatgacaacaaatgctacagactgtagatcgaccatactatcatgccatatatagctaccacattggcgaaagcaattacaaa

SEQ ID NO: 2660 - DNA, 344 bp, Zea mays
gccgcgttccgttcggccgcttgatccaacacgcttacacgccagcagctgctgccgcgtaaaacaccgggaaatacctggcttcctttctggtgtaagcaagtttcaactcccgaagtttgctgctttgggtaaatcttttctgacctttcaggtctcagcatcaccaggccccttttactaccaatctttctgtccgatcactgcaattttaagcttcagtcccctttttcggaaaatccagtctctgacaaagctgttcggcggctcatgcaccagtagcttcagctaagatctccccatgccacagactcctcctcctccaggaccgtcagccatggtat

SEQ ID NO: 2661 - DNA, 336 bp, Zea mays
ttgagatctggcaagcaaaggccaatggtccatggagacggagcagcaaaaggccaccgaatccgcacattgctggttccatatgtctctcttttgcctagcagcacatcactagaacccaaagagagagaaaaacacaagtgccagaatcagcaacctctgctgggatttaggtcccattattaggcctggactgtccctaattttgtttctaaacgctatataatccaacgatgtgtaaaacaagaacagatgaacagctccattcacgtggtttcctgatctttttcagattgtttgccgtcgagagagagagagagagaaaaggtcataatg

SEQ ID NO: 2662 - DNA, 336 bp, Zea mays
  misc_feature (195)..(195): n is a, c, g, or t
  misc_feature (316)..(316): n is a, c, g, or t
  misc_feature (318)..(319): n is a, c, g, or t
  misc_feature (321)..(324): n is a, c, g, or t
  misc_feature (327)..(327): n is a, c, g, or t
ttgagatctggcaagcaaaggccaatggtccatggagacggagcagcaaaaggccaccgaatccgcacattgctggttccatatgtctctcttttgcctagcagcacatcactagaacccaaagagagagaaaaacacaagtgccagaatcagcaacctctgctgggatttaggtcccattattaggcctggacngtccctaattttgtttctaaacgctatataatccaacgatgtgtaaaacaagaacagatgaacagctccattcacgtggtttcctgatctttttcagattgtttgccgtcgagagagagananngnnnnaangtcataatg

SEQ ID NO: 2663 - DNA, 378 bp, Zea mays
ctgcgatgtttctctctcatcttttccttgtttttttttccacctttttatttgccttttcccattctctttaatctcgcctttgtatccatgtgcttggttctttgttgcactgcactgcagttgttgcaccataagaatccaaagtcctccacgctcataccccctctgatatatatgaatgcttgctatccatctcttcaatctcccatacatactacatgttcttgcttcgtagtagttgtcagttaccttaacaatcatcattcaggtttgcagtggtatcatctaacgatgagcaatatgtgtccatcaccaggggctagggctagggaagcccatggaggagatgctcatggctggaaacgcaaatctaaa

SEQ ID NO: 2664 - DNA, 489 bp, Zea mays
tacgagcaggagcaggatatggaggtggaggcactgcaggccatcctcatggacgacatcaagggttttacttctccctcaaagccttttgttttggggactcatgctgtggattccaatttcttgtccaattttgatcgttgttatgttgtgtgttggtgctgatgcagagatcgacccgagtgagagtgggatcgccaccaccgcccggtgcttccagatcctactctctcctcaggtaactcctaaccgagtgcagcatgagtgtgtgatatggcagcactttgttagaactccatgtgttccagtgacgaatgtggcaaggttgagagctgcacatttgcgctttagggagttcggagagagttgaattaggctcttttggtgtttactttcaaaatatgctactgatttcctcgcaaaaaagaaggaaaccactgatttcctgtttactactattggcaggatgatgattttgatgagtcagct

SEQ ID NO: 2665 - DNA, 431 bp, Zea mays
tgaaagtggtggtagtctagttggttagctagcccctgtacaaaggcttgaatgaagatggcaataaaactcagctctcccctctgcttgcttggcactgcactccttgtgccttactgaaaacaagagcaaaaacagactcatgaagattaacaaatttcacggtgtattccttcctttccttgtgccttactgcaccacaatcaatccaactcaaaagtaataggtgacggtagctactttattacatcctgccttggtctgtcggcaattatgtgaaaactgaaaagaaaaaagcaaacctcaagagatttagtcgctggttaattcaccccatagacccacttctccgcattgctggtataagagaccagctccttgggttcaaaccacaaggcgatctcatcctttgctgtctccgggctcaagca

SEQ ID NO: 2666 - DNA, 616 bp, Zea mays
ctctgttcttctttgtctagcagagtgctatattatatgtatgagagtttctccaagaccagattattattctagactctagagttcacgtctagtgcactaatatggtagtatgtgttatgtgtatgagattttcttcctgggcatatttgtacccacaattcacgtcagttgcaccttttggttcaggtactggtggtgactacacacaagggagctcctgaggagttccatggagcaaaggtcattggctcgtggaggtaatctgcaacccaacatagacaatcttcaccctctctaggaataccaataacgtatagcaacaacaaccttactgagagcacagttttgggttcacattgaaataggttagtgcttccttgttgaagcaaaagagaggacaaggtgtaaatgaactttgggtctgtttggttggactgtggctgtgaaaaaagccgctgtgtgctgtgaaaaaaattgttatgggctgagctgttaaaaatcctaaaaaccgtttggtagaacccactaaaaatcgtttgaatttcttccatatgaattttcacagttccatccgaaagctgctaaaagcaagtccagatatgtttttagtttt

SEQ ID NO: 2667 - DNA, 351 bp, Zea mays
gtgacttcgtggagtcaaggctgctacacagaggcgaaggccacatcagattacgatgggacccaggatctgccccgtcaccatcagggcctacttgtaagcccccttgcggggtagatttcgtagtatgtctaaattattgtacttcaccccactgtaatgatcccgtgtaggggaatattccggtaatgtagtaggtaaccaggggtacaacagtacttggggacacaccgcccctcccagttacctataaatacccttacactgtacacggatgggacacggataacgagacgctacagttccctacctactgtctcgttgtgcacctgagctctcttgtctcccgag

SEQ ID NO: 2668 - DNA, 325 bp, Zea mays
gcaaattttttatgtggctggttgtgcatgatagatgttggacagctgacaggttggcaaaaaggggaatggatcatcccgtctgctgtccgctttgtgaccaggcggatgaaactattaatcacttattggtcgagtgcagctttgcgaagcagttttggttccttttccttcggtctggggacttccaggtgctctgtccctctacaggggatggctgctttgactcttggtgggagaagagtgccgaggtggtgggcaagcctttgtcggatggtttcaactcgctggtcatattgggtgcgtggtcgatctggaaacacag

SEQ ID NO: 2669 - DNA, 256 bp, Zea mays
  misc_feature (107)..(108): n is a, c, g, or t
  misc_feature (213)..(214): n is a, c, g, or t
tgaggccacagcagtaaaagcagtcacgagatgtgaaacagacgagaacaagtagaacatcagcaacagactgcatgagcttgcaaggggaatcattagagcctgtnnacgatccaatgtaatggaagcctctgaaaaatccaagtttctctccatctctttgccatagtccagagctcgtgatgctgatgcataggccacagaaatggctgnngcaatgagggcaattgatgccgggtcgagcaagtaggtcagc

SEQ ID NO: 2670 - DNA, 323 bp, Zea mays
tcctcaaataatatgccgaggtaaaaggatatcagataatccgcgagccccagccctacaccaaagatgagactcagccatgacccaatttatgaccttgctagccctaggctgctctccgttgaagacacattgattgcgatgaatccaaatggcccaagctcctaaaatgataagggagttcagccccttgcgcagcttcttatcggaggggctaataagggtcatgcttacattctcccaccaatcatcaaaagaagaagaatcgagactgggagagaggtgctgcaaaccgaccgttttcaggatattaaaccagactt

SEQ ID NO: 2671 - DNA, 603 bp, Zea mays
tctcctgtgtattgttctcatagcataggagatgattcacaacaatcacatggcgaggcacaagtggatatgttttggcagcagaacgtgccattgtcccccaatggatcaacatttccttcatctccttcaaccaattcagataattatcctgtttcttggttttgtttctctcctaagacgcatggaaccggcacatacattcccaatgtggtacggactctcatcacatgatcttgtttgtttgtttccttatttgcgctttttcagtaaatgatccagctttttgcatgatttcttgcgcgccaattgtaaatgggcagggtcagagaaaaaaaaattgcagataaaaggttttggtaggctacacagtggcgtagttttttttgtgtataaccagaaagcatgtgtctatgtttcttggtaaagctttcttcaagtggttactcattcaatccctgttcatgttttcatttccagagttatcaaacatacagggagcgtatcatgcttgaaagagataccatacgagcaagaaaacaaagacagaggttacctggtcgccggtattactcagccgagcaaggattttccggttcacaa

SEQ ID NO: 2672 - DNA, 394 bp, Zea mays
gatgggtcaggacatagctggcgcttgtggccagttggtggttagcctcccagatgaaagatcagctggtggagcaactcttttgtcagacatcgaagaccttcggatctgacctctctcccaattgttaattctaccattttctcaagatcagatcctcttactaattagcctcacatgatatggtaactggtgctatagtttcaagtcaagctttaaaacatggagatgtttagtttgaccattgttgtgttccccttttgttctgggatacacaattttgctgtacacaatggtgaagacccctgcagttctgctcttgtggataggtggccactgaaacggttggtaacttggtattgtaaatgggacaaccggacaatgttatctcaac

SEQ ID NO: 2673 - DNA, 370 bp, Zea mays
ccgagtgacaaagcaggccaacacatgagggtaaaattgcacaaataaaaaaagtagaactgcagaaaaaagaactcaatgtgatcgattgaagcgaacagaccgctgaaatttctgtcagttcgtactgagtaaaaatcaagaataaattatttttaaaaaaacttgaatgctagctgaaagtgtttccaaaacattaacggtgaaatggctaaaatatcagcacagcaagaacctggatcattgtaaatgaattggtatagcaagaaaaaaaaattaacctaacagatccaactgtaacaggtattaactccgaatgcaaggacatcataaagctgaataaggatacgtaaaaggatacggctgaatg

SEQ ID NO: 2674 - DNA, 918 bp, Zea mays
  misc_feature (913)..(915): n is a, c, g, or t
ggtagcactgcattttgattttaactgctctcctgtagtccattctatattattattacttgtaatcatttggatatattatttaggcagcttaatttataacaccccccttgcagtctactagtcttgggccatcatcatgttgaccagggctgctatgactctagttttaattcacttgccacacttgataatctctacctaattgctttttaaaatggttctgctgcaagtagttcaacatgggacacttcactggttcgtagttgaggaaaattattctgcttgctttgaaataaaattcaagaagccagtcttggttttcagtttttgtgaatggtgctgcttgaactgaggctgctgcctctctcatatattcatgtcataagtacatgaggccattcaagaattctagcaaataacagggtcaaactgcccatacctacctgctactgttctttgaacaggcagagatgaaaagagcagtacctgttcctatactcctatgtcaaaagaaagatgagtggagagcatctgattatgtaacataaccttgcattctaaggaaaaataaagacaattttgctacctcttttgtgtaatgctcagcgaatctcatggttaaattgtgacatgttttgcaggccctaaatccacagatcgtgagcaacagccctgttccgatctcttcacagcagcagcatatctctcagcaacaagctgcaacacagatgtaccctcaaatgcatgtgcaacattttccaaattttatgccatatcgccaactctattcaccagtttatcccatgcctatgccaaactattcgccaaatgtcccttatccatcaaatggaaatagttatcttcaaatgcccagtggaggttcgcatttaactgcaggaagcgtaaaatnnngag

SEQ ID NO: 2675 - DNA, 709 bp, Zea mays
cttctccggtgagtcaaagtcgatgctctcgtcagaatcagagtcttcgaatgggtcaaatgctgctcctgcttctctcatcgcaagaatgtagtcgtaggtcctcatgccctgtagtgaatgaaaagtaggcactgaccattttatttctttgaagaaaatcgctcgatttgaaagcaaaagatacttctaagcatgaatcacaatactgaactattattcacatggatatgatcttatgaatactcgcctttctaatgagaaccatgtggaaaaagaagagctggcccagtgctgcagtgctgtaaattgtgaagatgacaaaaaccacctgtgacaaaagtttgcagataaaatttgagtcaagaactaaataaatacaggagtcatgtttaattccatgtgctccatttgggagccttatgtacttactgatagtgctgcatgagctccttttgggagcctcaggtgcagcctgtgctccatttccattttcacccctttgctgtcgacaaaacagcggatgaagatcgcaattgctgttcctccctcaatgacaagctggttaagttgtgtgtcatcataagctaattagtactagtcagattcaagaaatgagaaactaaaatgatggcaaaaacgttagcgctcaccatcagcaagacaaagaacataagcagaataaacgttgcatagttccttcttccaa

SEQ ID NO: 2676 - DNA, 387 bp, Zea mays
cacgatcagcagtacacactggcagcctcacttcgatgcaaccttgcttaaccgcaatccttcgcataaatttgacagatatgaagaggggtgatctagaacttgatcagatttggtgtcaaaatttgatgtccctaataatgggggatatatgcttctaaattctacattcgatccgcctgtgaaatctggtaggatcccagatcacttctcttcaattttgctaaagcttgcaaggctgcccataaaaaagaccaacaagggggttccacaggtgcgcatgaacttgattctggcattttacctgctgaccgtgtatccagggattctccagggtgttcatgcgcatgcagtcactatatagtagtgaagggaacatgaccattc

SEQ ID NO: 2677 - DNA, 466 bp, Zea mays
tggcgccccaggaatccttggtgaccctcaggaccagcctagtcctgtatctgtgctagatggaccgtttattatacgtgataacagcaggaatgtactgtactcatctccatccccacgtaaggctgagagcccatctcatcaatcttgagcagtctagactctagagcgagacggtctcatctcaaatgcctttttgttttttttacatacatgtgcagaggctttgtcgaggtctcccttgatcggatcgtttccacggtccctgccagtgtcgtgggaggaccccccgccggaagccacgtcgtcgccgaattccctgagactctcgaggcttttctccaaggccgacgaggatctagactcgctgacgttcatccagaagctggtccgctcctgtggcatggaccgagcaagctgcgtgttggctggccctctggacccggacctgctcgagaaggtttca

SEQ ID NO: 2678 - DNA, 402 bp, Zea mays
tttttggtgatgttagccttgtttataattttaaaaaatcatttatagtggtagttttattaataaaactgctattattgtaaacctagtgtctgagaatgtaaatatttatagtggcggtttttaaccaatgtctggccttgcacacgtacgggcggttaaagaaaccatcaataagggctagtttgagaactccattttctcatggaatttctatttttccattgtaaaatgaactaatttttcttggaaaaatgaaaatccattgggaaaattaggtttccaaactagccctaaagatcagttttctaccgtaggtaaaagtcttttgtgtagtgttctgataatttcttaaacattcaattacacaaatagaagaactaagagcgttgcctaggcctt

SEQ ID NO: 2679 - DNA, 470 bp, Zea mays
  misc_feature (460)..(460): n is a, c, g, or t
  misc_feature (463)..(467): n is a, c, g, or t
caggaatggagtcaccagatttggggaaaccaatcaaatcttctgggaaaccaagcagagtagggggagcggggagggcggagaatgtagaacgcgatgcgatcgtcgtgctgcggaggaggacgcggggcagacagagagcagacaggtggagccgtggaggtggagtaggccaacagcggttcctcctccggccgtggcatagtatgtcgcctccgaagttggttcggaacttgaagacgaagatgcagtcggggtccttcacctcgtagatcttcgccagcctctctttgagctccgcctgcgcgaataatgaaataccgtcaagaccgcgacggccatcacggagggcagggaaccgagaaactaggagaggacgagacccacaaccttggagacgttggggcggccggggtggatgacctcgagcacgaactgcttgcgggagagaagacggttntcnnnnnact

SEQ ID NO: 2680 - DNA, 464 bp, Zea mays
ctgcgatgggtgcgagcggcacagcgtgggccaacaactccgtcatggactcccctgtcctcaaacaaatcgcccacgctcgcggcaaaaccgtcgcccaggtaaccaaactgtaataattcaagactgaaatatactgctagtagatatgtatatgtatgaccctgcgctgcacaagaatcatcacgctgagatgcaggtgtgcattaggtgggtttacgagcagggtgactgcgtgatcgtcaagagctttaaccagagcaggatgcgagagaacctccacatcttcgactgggagctcaccgacgatgaccaccgcaagattagcgagctccctgagtccaggggcaactacgatttcttgatccatgaatctgggccgtacaaaacagcacaagagttatgggacggtgagatcacagccggccaatctaaccaaacgccgctcgtctccgacgactgat

SEQ ID NO: 2681 - DNA, 457 bp, Zea mays
ttattaagtaattatataagttctgtaacaataattttaaatatacattttattggtgtagtgtgtcttaccatgtcatcaaatgggtcgactaatttcatttctaaaaatgtcttttgctcaatcttgttctgcatctcgttcattgtctgaatatgaagcttttggattgattggtattgttcaccgatactataaatatgaaagcattgtaattagtcttgatcagtttattaaatgaattgcaaatttacattgtactatattcaagcttaacagtgattgaatgttgtataattagatttcatcttcgtgttaaaccttagtatgtacaactcaacttccccatggcattatatcaaacacttttgttgctgctgctatatttattctataaataaatctcaaactaactcattgtagggttgtattttaaatactttgtaaggaaatgcaa

SEQ ID NO: 2682 - DNA, 457 bp, Zea mays
  misc_feature (12)..(12): n is a, c, g, or t
  misc_feature (23)..(23): n is a, c, g, or t
  misc_feature (55)..(56): n is a, c, g, or t
  misc_feature (63)..(63): n is a, c, g, or t
  misc_feature (113)..(113): n is a, c, g, or t
  misc_feature (130)..(130): n is a, c, g, or t
  misc_feature (173)..(173): n is a, c, g, or t
  misc_feature (187)..(188): n is a, c, g, or t
  misc_feature (227)..(228): n is a, c, g, or t
  misc_feature (313)..(313): n is a, c, g, or t
  misc_feature (336)..(336): n is a, c, g, or t
  misc_feature (347)..(347): n is a, c, g, or t
ttattaagtaantatataagttntgtaacaataattttaaatatacattttattnntgtagtntgtcttaccatgtcatcaaatgggtcgactaatttcatttctaaaaatgncttttgctcaatcttgntctgcatctcgttcattgtctgaatatgaagcttttggattgnttggtattgttcanngatactataaatatgaaagcattgtaattagtcttgatnngtttattaaatgaattgcaaatttacattgtactatattcaagcttaacagtgattgaatgttgtataattagatttcatcttcntgttaaaccttagtatgtacaantcaacttcccnatggcattatatcaaacacttttgttgctgctgctatatttattctataaataaatctcaaactaactcattgtagggttgtattttaaatactttgtaaggaaatgcaa

SEQ ID NO: 2683 - DNA, 729 bp, Zea mays
catgttccctggcatcgctgacaggatgagcaaggagattactgccctcgcgccgagcagcatgaagatcaaggtcgtggcgcctcctgagagaaaatacagtgtttggattggtggctcgatccttgcgtcgctcagtacgttccagcaggtacttattaacatgaccctatcgtcttgctgtaacacttatggtcttaccatggagattatatgctttcttgggtgccttattgcttttatcatgtcttccttttttaagtgaaaccatcaatcaatcaaatcgacatgtgcacatgaacacataacaatcgataaaattgtaaatggaggtgctttcttgttttaccaagtcttcccaagtggaaacaacaatcaatcaaatccacaagtgcacgtggacacatctaaatcgttaaattgtgaatggcgatgttccagtgatctgggttgtcgccataggtcgtggatatgaactgatcactttaatgtttactgtttcttcacggtataggcttcttactccaataattttgctgttgcagatgtggatatccaaggatgagtacgatgagtctggccctgctatcgtccaccgaaaatgcttctgagctagctatctgccacgcctttcatagcgtgtcaagctgttgagatctgcgttgttgagttgagtgtctctatggagtatcacatactttctgcatgaggggggaagagtatacccaa

SEQ ID NO: 2684 - DNA, 464 bp, Zea mays
gctactttgcactgaaaatgcgatccgtttgttttccttgggccacgcaattcaggtatttgtatccctaattatatgccacctttttctttaacatgagttgctgttgttcttatgattctatactccattcagggcacaaagaagataatcaataagaagaaattgagcagctgttgttgtttcgcctctcttattcatagttcttctaatgacattggacttatactcgtcttctccaatgggaaacttgaaataaggtgaggcaacaatttacttaaagacttctcgatgtgtctgtgcctctgtggatactaaagtgacgtcaatgtgcattgaaactgcagatccctgccagacttgtccttgttgaaggatgcctttttacgaggttttgtgtactcaagaaacttgaattcaagtagttccataacatgttcatctgatggagaagccatcttgat

SEQ ID NO: 2685 - DNA, 481 bp, Zea mays
  misc_feature (343)..(348): n is a, c, g, or t
  misc_feature (353)..(369): n is a, c, g, or t
  misc_feature (377)..(386): n is a, c, g, or t
  misc_feature (391)..(399): n is a, c, g, or t
  misc_feature (410)..(456): n is a, c, g, or t
  misc_feature (470)..(476): n is a, c, g, or t
tacttttaatcagcggtttcgcttcctgaacctttctaccactgaactcacctacaatcattgttccatcagtaaatcccttcagatatgtcattctttttgcttcagcaagcttctccttgtcgttctggcttttaatcttaagatcatggcaaaccttctctgctgacttgtctccaaattcaggaatgtggattattggtataatctcataaggaagaacccactcatctttcactccatactttgctctcaatgctggctttgtgactaaatcttgcagtgccatgaaatcatcaggtgaatcactagggacactagtcacaatgccagtacctttgtnnnnnnagacnnnnnnnnnnnnnnnnntgtgactnnnnnnnnnngtgannnnnnnnntgatttcatgnnnnnnnnnnnnnnnnnnnnnnnnnnnnnnnnnnnnnnnnnnnnnnngtgaaagatgagtnnnnnnntcctt

SEQ ID NO: 2686 - DNA, 348 bp, Zea mays
  misc_feature (196)..(197): n is a, c, g, or t
  misc_feature (255)..(256): n is a, c, g, or t
agacatgccagcatgggaagtacgagggctcctaggacctggaaaaatcatcggcgtctcatgtaaaaccccggcccaagccgagcaggcatggaaggatggcgcaaactacatcggctgtggcggtgtcttcccgaccacaacgaaggcaaacaaccctaccttagggatcgagggcttgaggaccgtgtgcttnncttcgaagctacctgtggtggccatcggcggcatcaatgctggaaatgcaggctcggnnatggagcttgggctcccaaatctgaaaggtgtggctgtggtctctgctctgtttgaccgggaacgtgtcgcgactgagacaagaaacctcag

SEQ ID NO: 2687 - DNA, 406 bp, Zea mays
aatccctgttcaatttgcctcaaagcaacatataagaaattacataattagcttctgaatatgtgcactgctcttggaatacattctaagagttttgaaaagccttttcttgagtgcatttctgaatttgatggtacagaaggtgttaaatatatacaacaatttgatattctagactacctgaagcatgtagaatcaaggttgcaagaacatgaaaggtgtacgtgaaggatcctgacaacctgtgtgtgctgagttgctagtcactcttgttacttatttatggcatattcatggtgtggtttaccatggtatatataagacaaatgaacctaaaaggcttaaggcaggtgaaagttgatgagtaattaagtcacagcagttagctagtttctgtcccttacaa

SEQ ID NO: 2688 - DNA, 356 bp, Zea mays
catatataataactactgtaggcagcggcatctcctgctgggacgaaggttcaagaagctagctaagagagaagggcataacgagataataagcagcgcgcgaagatgcaagactgggcgccggtgttcgtctcgctggtgctcttcatcctgctgtcgccgggcctgctgttccagatgccgggcaagtgccggatcatcgagttcggcaacttccagaccagcgccatctccatcctcgtccacgccatcctcttcttcgccctcgccgccatcttcctcgtcgccgtcggggtgcacatgtacctcggctcctaggcggcggcgcggggcgccgtaccttctctccctctcta

SEQ ID NO: 2689 - DNA, 343 bp, Zea mays
gctgcttcgacaccatctccctcagccagaaactctccttgcaccgcctcgcagtgcgccccatccagctgcatctacttgcctgggagaagccttctgctcccaacccagcagagagggccgtgcgttccccaaagctcaccatgccttcaacgctgctccctcacctacagcaaaaccttgtggagaccatagaaggcggagtagatgctgaagaggagtacgtggggaatttgtcgtttcggatcgatgatatctcatttgagagcagctgggtgtgattccaggtttcaattttgtcatacacgcagctgatgtgcatacatatgttttcatcttgtct

SEQ ID NO: 2690 - DNA, 386 bp, Zea mays
tgtttctgctggtgttgctgcggtagtactcctctagccggaggctgtacctgcagaagagtccgtccatggcttccaagccgaagtgcgctcgcagcatgggctccacgaccgccctaacggtgcttgtcgtctccatggctagccactgcggcaagtcgtcgtcatcgtccgacgccgactggaggaggaggcagcggcgcgagatgtcgaagagctgcatggttctgacggtgaaggagccttccctggcgatgaccttggctaggtcgtcgaggcaggggccgtagaagggcacgttgaaggcgtggacctgctcctcgtcgacgaggccatcggcggccatgtccatgagggcgtcggcgaggaagtcccagaggtagcag

SEQ ID NO: 2691 - DNA, 402 bp, Zea mays
gtagccgcagccgcagccgcgctttacatcttacttggcaagttggcatgtacatttccacttccgccaccttctccttgcctgctgtagcgtcctctgcttcagccatgtcgtccgtgtccggcatgccgaacagcttgcccatctcctccagcgtccggccgcgggtctccggaaggcacgtgaagaagaagacccacgcgacggcggcgatgccggcgtagaggaagaagctgccgccgattgtgatgcctttcgagagggacaggaaggtcatggagatgacggcgctggtgacgcggttgctggccacgcccacggcgaagcccagcgcgcgcacccgcagcgggaatatctccgaggtgtacacgcccgtgatggggccgagcccgatggagaaga

SEQ ID NO: 2692 - DNA, 444 bp, Zea mays
cttcaagtttgccaatcttcagcccaatatcgaaggacaaagtaacacaagattagtttcaccaaatgcttaaaacaaaaaagtagtacatacatatatagataaaaatccaagacaatgaatggtctataaacatgtaatgaaagcaatagatttagtttctaatgtggccattggcagaaaattgaataaatagaactaacctgtccagttcggaagaacaactttgtgtagccaacttgatacatctcaggtaaaatgttgaactgatgaagaattgcaactgaaacactgagtggatcttgagatgcaacatcctcaagaagaagaaagccatacctgattaaattaagtattaacttttttataaaaaaaaagttggcagaaatttactgcagttgttcagagttaacttaccgccgagcaaacttctggtgagtcatt

SEQ ID NO: 2693 - DNA, 399 bp, Zea mays
ttttgtcttctttgttttgaatgcccttctgaccttcaagcatgtaatgtaagctcgcactttatttctgtactatcgtattattatctgtggtcgcatgttacatttagaatccaatgtagtattaaccgatatccacattgattcaaccatggcccaaactaatctggtacgttgcaacagtcagcatgccccgattcttatcctctgatgcagaaccaacctttcacaatccctcctccgcctcagctagtttcttcatattctttggaaacaacaggttgtgcattcagccttgggtttgactctttcactacgatgtcccttggaccaaatatttgtgccaacatgacgcccatggaaagatctatatctgccaaagaacctgagaattcagag

SEQ ID NO: 2694 - DNA, 659 bp, Zea mays
tacgtgcatgcatcagtggttcgtcattactgatatgtgctgctaggtttctgaagaacttactatgtttgcttactttgatcgtctagtctgctatctgtacactggaagatgtagatgttatcaaggaaggacaggtcagtatgtttccataacaacacatactctgagactgaatcctgtgcgagtaccatgggcagatttcaaagaaattttcttcacacaccgctatgctttgctcgctgcaggctaggattgctggatatgcactttcaggtggtggccgtggcattgagagagtggatgtatcagctgatgggggtaagacctgggtcgaggctcgtagataccagaaagacaatgtggcgtatgtgtcagatggacctcaaagtgacaagtgggcttgggttctctttgaggccacattagacgtaccagcgaatcctgagatcgtagttaaggcggtaagtgaagtctatcttgacacactatttcaatcaacttagaacagtttgtgagaaatacatcttgtgtgggtacaggtggactcagctgcaaatgttcagcccgagaaggtagaagacatatggaatctgagaggaatcctcaacacgtcttggcatcggatcaaaatccagagatcttcgtgcgttgaaaga

SEQ ID NO: 2695 - DNA, 369 bp, Zea mays
gtcggcgtccggtctctcctcgagcgcaacgacttcttctccgccgactgcaatccgcacgccgacgccgtcatccccgccagcgccgacgccgccgcggcctacgactcgacgtagctcaggcccaacgaccggtccagttaggtgctgccacattgccagctactactcatccgcgttctccccgcaaacgttgcggcacacaattttctttttcttttttacagatgatggaagaggaaactttggttccggtggagctggatcggattatcgattccttgctttcttctctccattgcttccttgcccgtaatctgtacatgtggttgccgtggttgggagcaactgatttttgaactcgaagac

SEQ ID NO: 2696 - DNA, 328 bp, Zea mays
  misc_feature (319)..(323): n is a, c, g, or t
aaccagcagtcagacttcactccaaagagtagcgtcgagggggagaatggaacccctaaaacgcttctgtcagaaaattcccttccgccgctggccgacttccccatttccaacctgggtgatgcttgcggtgcctcaagctgtgacggtagcagcattcagttcccaagttggcccgagttgtttgatgaacagttcatgtgcgagtttgtatgaattctggcctggagtgagtgtgtttgtgttactctatagtttgtttttttttcagttatagttttcttcccttcttacatctgttttttgtgccatattctgnnnnnggtct

SEQ ID NO: 2697 - DNA, 254 bp, Zea mays
cagtcctttttatttgtaataagaatccaattgatgtgtgtgcacgcgcaatcctagctaataaatagatcttctttgtgccttgctttgtttgatatatatataataaaagtcttcgttgcaaataaacgtacatcttttttatttaggaaatgtattttttgttttcattactaccgctttccggacggcatgcatggcctcaagtgctgtaaacaaaaaaagtgctagttgagagagccgtttcatgtcac

SEQ ID NO: 2698 - DNA, 393 bp, Zea mays
tcagattaacatatgtgctttacaaaattttctatcttgtttatttcctagtaggaactccaaagcatgagtagaaaaggaattgatttggtttttgttagttattattgaaagagaaatcaacggtttgctagtaatgttgtgactcaatcatttctgtcggtgtacaatcatattgcacaaaattatttacagcctttgtaaatgcaagcatattagttctgtttgactaccttgatgggttctacacttgtactctgttgttattttacctttgatggaagtttctttgtaaggaaatttctatagtaacttctagcctatatgtcatagaacctctgttgcaataatacctttctttcatcagttacaaacccaaatgcgttctaaaga

SEQ ID NO: 2699 - DNA, 364 bp, Zea mays
caataggcagaaagagaagggcgataagaggaatcactagcccaagtagtatcatagtacgcttggaactgtaaagagttggatcgtggaaagaacaaacgacgagatatagttccacgaagataacgtagaacccaaagcaagtgactatagtgaagctgagtggaagcggaaacaaactgactgagattatgtacagaataaaagatatcaggacgagtcacaccaacgtaaacaagactcccaacaatgtgacaataatgattagggtcttcaagaggctcaccatccgtggcacatagatgaatattgagttccataggagcctcaactgtccgctatcagtaagagaggcccgatcaag

SEQ ID NO: 2700 - DNA, 312 bp, Zea mays
tctctctctagctgcagattggtgcctcacccctagcggtcggtggttggggccgggttccgacggctgctcgggagctcgactggggcttggaagtccaaagccgccgcctcctcgtggcgcgccgctccggaattcttgccttcttgggctccgaatctcgccgcccggtgtttgatttgcggcgttcctagcgaattcggggctgatttgccccccctatggcgaggatttgagtggactcgagaggaacaagtagaggtggagtcctgatttgggcccctgccgtgatatgtgccatgaggaagctct

SEQ ID NO: 2701 - DNA, 457 bp, Zea mays
ggcccaggcgatgtcggcggcgtccagggccctggaccgcttcgacgtcctcgactgccggagcatcgcgtcccacatcaagaaggtaaccctcgtggctcgtgccgtcccgtctccaacctatgaacctcgattgattggggttgggtgggtggctgtaggagtttgacgcgatccatggccccggatggcaatgcgtggttggctccggcttcggctgctacatcacgcacagcaaggggagcttcatctacttccgcctggagtcgctcaggttcctcgtcttcaaaggggcggcagcatgatgacaagccccacggctaacatcgcgagttcacgaccaggcaaagcaggtggaggatggggttgtttttttttatttttttcttttctttcaccggcctttgtggacggcttgcctcgctgtatacgatatcaccatggtaataccaaccag

SEQ ID NO: 2702 - DNA, 381 bp, Zea mays
tccgtctcgtgccggccgctctcttcccgtttacacgattgcttatattagcttattcatgtaccagctcgtacgtagcactcctggggtggtagtggtaccagtcgctcagatggagatgctgttggggatgcccttggcagtgagccctgcggcggcgccactgtggtcagaggtgttgggatagagcagcatgtaggggaactcggcggggccgttcctgttcctcagctgcgggtcgcggttctcgcccaccaccttgccctcgatcttgaccagcgcgtcgctgaacctcttgaacgccgccagcgcccgggcgtcggaggtccactcgggggtgtcgcgctggccgaggtacacctcgtcggaggagtgcttgga

SEQ ID NO: 2703 - DNA, 366 bp, Zea mays
  misc_feature (356)..(357): n is a, c, g, or t
catactggatggagaacatttatctttttaataacgagtaaaagcataatggcatgcttgtgtttagttctctttttgttgaccaatcgctatatttttatcttgaattttttttatctataacttgaatttcaaagattcaatattttttattcagacatttttctcttctctagatattcttttatacaaataatacggttacactagatcagccaacattctgggaaataagctatatggtcagagtaagaggttcaagagttgatagttcaacaactttaactgagagcaaatctacaagaaaaaggaaacaagcaacctggaacctacaactgcaggagcttgcttgaaanngaacaatca

SEQ ID NO: 2704 - DNA, 757 bp, Zea mays
  misc_feature (715)..(715): n is a, c, g, or t
  misc_feature (730)..(734): n is a, c, g, or t
caccgaccctaaggatgcccgcctccgcgagttcggtgagatacctccgcctacgcctcccgatccgccccatttcgcgctcggatctgcgctatgctcgattagcgcggtaccgtttggggatttcaaatcatttttgggctcaagatctgaagtctagtgtttttctgttctactccgatggttagggccgttgtttaggaagacggttgcagattccaatgcgccggtacaggagaaggcgctcgatgcccttctcgcgttccagcgagctgctgacgccgatgcatcaaggtgtgtgcattcagctgccaagtcattccattcacatctatgcttctgattatttgttatctgcaacgatttatggagttggctcctctcagatacgcgaaggaggtctgtgattcaatcgtggccaagtgcctcactggccgaccaaagactgtcgagaaagctcaagctgcattcctcctatgggtggaactggaggcatcagaggtcttccttgtaagttgatcatcaatcccctgattgttatgattgtgagctgttggtgaaatgcatgtgcatacataatgctacttttttgttcacttggttttcacaacatgcggtgaaatgttccatgtagttgcaggtattattgacagtttggcattgtctaatagaccaactatcaatattgttacaaatgctaagcctatgacatagnattatgtgctgcatnnnnnccgccggatgattttcactttca

SEQ ID NO: 2705 - DNA, 368 bp, Zea mays
  misc_feature (342)..(361): n is a, c, g, or t
cagttttccagcaaacacaaggagagcagcagtttccatgggtggttacttctttaactcattgtataggtatgcagtcttggtgttggcagtttctatgatcaaaggcagtttccaacgttaggtggctgcttggatacaacaacgggctgctgacagttctgtgatcaaagaacatttatcctgggctcaggcgctcagcgacactgcaaaattacagttacctcaagcaaagttttcgtcactttcattattctagactctacacagtgttggacccctgcttggggacaagcaagctttcaagtggggcagatgtcacgaccctgaattgaagatagnnnnnnnnnnnnnnnnnnnngtaataa

SEQ ID NO: 2706 - DNA, 1151 bp, Zea mays
  misc_feature (597)..(597): n is a, c, g, or t
  misc_feature (906)..(907): n is a, c, g, or t
  misc_feature (988)..(990): n is a, c, g, or t
  misc_feature (1070)..(1070): n is a, c, g, or t
  misc_feature (1076)..(1079): n is a, c, g, or t
  misc_feature (1110)..(1120): n is a, c, g, or t
  misc_feature (1127)..(1142): n is a, c, g, or t
gctttcattgaggagaggggcaagtttgatgaagagacacttgtcaacgtgaacagcatcaagaggaataaaggaggcagccaaagatcaagtggttttagcaacgagtacattgtggtatgtaacagatgacaccaggcttgtcaaatagtaatcttatgtccatgcaaggaatatctttttgctgatacagttcagatgccaatagtgattcaagaattaagatttttgtctaaaaaaacactgctttacaaactcatatccctgtgttggtggggggatgatttctatcatgtgtactgtgtatgtttgtgtgattgaatgtttctgattacctgttttgctagtatcactcagtacagcagtgaccacatgatatctaagcctttttaatttcatatttgcagataaccatattggttgctgctgagggagtacataagctgccggttataaatagcagcaatgacttaaagacagctctacaaaagatgggtgccataccatcaagcaaaatactggtatttcttgctcgtttctttttttttctcttgtaatatcatcaagtttaaattctagtcctaccatccctactcnggagtcattccatgttgattgtattggggtaaaataattttaactgacagcaacctggttttcaccaacatctacagttcggtaaaatggtatttgctccaaaatttgatccagccttgtccaaaaacagttccgtagtccatttctgttgtatgaggctgtcagatctagtcagcaaatttaaaattgcagcaaatcaatgttgtgttgtagtgacatactgacatttaataaacatcttgctagagtacaaaacgtttagtccaagtaagctgtagtaacttagagatggaaccaacaagagcctcnngaattcactctaaaaaacaaagggaaaataaaaaaagggaaaagaagagctacatgaaccacaatctttgtatcctatttnnntataaaattcaggttgtttgcattttattcatactggtatgccatgataacgatgtccggttctttttaatcttctttanaggcannnnaggtcctgtggactccgcaaaatgagaatgnnnnnnnnnnngagcgannnnnnnnnnnnnnnnacccgctct

SEQ ID NO: 2707 - DNA, 309 bp, Zea mays
agtgggtgggacgggcccaggccaatgaataaggcgaagggacggtgagagtgccgggaaggggaaggattggttaggcgccgcgccggatcggttggtgacaacattattattttttattagtagtataggaaaggaaaggaaaggaaaagaaaaaaaaactggggctggtgcagacgtttgcactacatgttgtactactacggttactccctgggtgggtgggttagaaatgcgtgatgcagccgcacatcttttacctgtggtgatgactgatgatgtgcaccttgcacgcatgcaacttgtacc

SEQ ID NO: 2708 - DNA, 449 bp, Zea mays
gtagttaaaactaactgcatggaaaatccaaatcgataagcatagcgttcgtttgcagcggggggtcttcttctaacttcgcccccgtccctgatccttggcccagctcgccaacccgtacatgcccttcggcggcgtcggcgacagcgggatggggtgctaccacggcaagttcgggttcgactgcttcagccacaagaagggggtcctggtccgcggctttggcggcgaggcgaacgccaggtacccgccctacacgacggagaagcagaagattctgagggggctcatcaacggcagcttcatcgcgctcatccttgccctcctgggcttcccgagggagaagcgttagatgggccttctaactgggcccagtacaagcgttttgttcgtgttcgatggatggcacagccgcacagtatatacaccgccatgtgctgccaaataga

SEQ ID NO: 2709 - DNA, 374 bp, Zea mays
  misc_feature (354)..(369): n is a, c, g, or t
ttgtgtccttgatttaactctcagtctgaagccaagtttttctggaacaggtgcgtgaattttatcttgtgaggttcaagaaatactcgtcacttttcatcttgccggccgtggcatgctgtttcacattgctatttttcgtattgcagaccttggtaagcatgttccacgacgtacagaagaggtgagaaattattagggtgtgcaagatatcatttttatgcaatgggtgccgtcatgatatttttgctatcctgacgtgcaggaaattctcctgtacccgggatttgagaatacccctgtgaagtccggtatgtcccttgcgttaatttgctgtgtcttttttttttggannnnnnnnnnnnnnnnccccc

SEQ ID NO: 2710 - DNA, 489 bp, Zea mays
ctctcttctttcgctttcgcttctcagaaaacagaagcgtggcctttgtcaagacaaggacgcgcttattaatacaaccaaacatacaagctaagtagctaacctcaactgttcgttctgtgtggcagaaatgctcgccacagatcagctcgaccactgggaatggaattctatcgaggcggcggcagttgcttgctccaagaacctggatcggctgaggagctagctgttcatggagtagcgctctcatgttcgggccttggagattttgttgcgtctatatactactagtacggatcagacggagaaagcacattgggccaatgaatgaatagtcacacttcaccgacagagctccaagcacgctttttccacagcgctcttggaacatgtaagattgtaccgaaagaatggcgttagaatgaccatgtaaatgtaatcgtagactgagttctcggatgtgtgggtaaacagcatacttaggtgcgt

SEQ ID NO: 2711 - DNA, 710 bp, Zea mays
  misc_feature (605)..(614): n is a, c, g, or t
  misc_feature (647)..(662): n is a, c, g, or t
  misc_feature (668)..(672): n is a, c, g, or t
  misc_feature (676)..(682): n is a, c, g, or t
  misc_feature (689)..(697): n is a, c, g, or t
  misc_feature (699)..(699): n is a, c, g, or t
ctcagcaaatcaggatcaagcttctatagagaaatgcaatgctccaaagaatttaccaatacctgataattcacttctcgatgctcgtattctctattgtacctctcctgccctgggtcataacaaagtaagcaattcaggttcctgtttcatagtagaatacattcagttgcatgaatgctttgctactcattttcatgagctgcctgttgactcaaactttaatatttcgtatgattcattcttccataaagcatacctcatcttaaaattcatatttgaataatgcctttcgacttttttgaggaggggcagggtgggggagggggaggagcagtgattttatgtcaacaatacatgactactttatgtcgtcatggttgaaaacttaaatactgagttgctgaacaatatgcaatagttctagaccatctatgtaaatggttgttaactaaaaaccattctgtaccttactatgcaacaatttttttgaaaaaatatacatagaattatagaagtcacgatgtaataggtggtcctatctgtgttgtgcattatatcataatattttctgcttcttttttttgtatccaggaagcacaccnnnnnnnnnncaaaagagttcctgtgatagttgatactcttgnnnnnnnnnnnnnnnntcccannnnntacnnnnnnnactacannnnnnnnnanctattttttgg

SEQ ID NO: 2712 - DNA, 371 bp, Zea mays
cccctatcttaacaaactatcctatagcagatttatcccttcaggcggcctaggactcgccatccttatcccttctcttgtatgtctgcccgaccataacacactaactccacagttgcaaactctatggagttttcagagctgcagtacatatttttggagtacctcttttgctgctccggaaactctaaaaaaacaacctagacatggagtctggagttatttactcaccactgccagtcttccactggttataagaaaaccatttaaatctggaacaaagctgctccacccgagttttgaagtggagcagagccataatgccgaacacgcccttaatttattctgtgccacgtttaacttgtggttgt

SEQ ID NO: 2713 - DNA, 354 bp, Zea mays
gagcttggcggccatggctggagcaccgcagcgcgcgacgcaatggagaagaggagcgattggcgcgtgtgggagatagagcagagatgcgcgggcctagctgggaggccgcggcagggggagaagacgagggagcctagctccggctgggctgcagtcaggcgcggggagcagacgaggaaagcagccgagcgaaacaattaatatcagggagagttttgagcggtgggggagataaggactgcacgcgacttagaaaaaaatcagagagctggcgcttggggaagagggcgacgcggttggagaagctccacgcgcgcgtgcgcagggacgagcagggaggacacaagctcc

SEQ ID NO: 2714 - DNA, 401 bp, Zea mays
ttcttgaataaggcgtatcgttgagttaatcacttgattctcaccttagccagccctgatctttcatctccaacaacatataggatcacaaagacattctgattcctcatcacccaagatcccgggtgctagctatcacactatgtgccaatggccagctgtgctgctctagttacaggatgcattcttgtggcctgcccaccttgtgtgaatcgtgttaggagaaagatccagggcagtatgtttctccaatctcagcacaaccgtgttagaccacattttctgggctcacatataagccaatggttcggctgtgctcctgtcggtggccatctcacagttgcccacgctcaaggtcggagctgtctatttcgttttgcaccaaagatgactattcaagg

SEQ ID NO: 2715 - DNA, 677 bp, Zea mays
gaaatgagcgaggatgctaaaaaacttgcagccaaggcccttgcagctgccaaaaatgctgctgctgtggcatctggacgagggaaagtggaggtaatccaaactgtcagcatcacgaagcctttatttttgttattattacataatgtaaaataaaacttgctaaaaaattgtaacagaaaatggtttatatgtagctggactctttttgcatgtctagtgcattttcatgttcattttatttaaataatttttactgcgactggtttcataaaatttttaaacataaaaaaaatagtagcacaaaaacgtggtcactccctggaattatagttctggatatagatggcaaagctcgactgcttttgcaatatgtttgtaagctttaatatcagaatgctgaacaactggtactcttcacacgatccaacagatcactgaggtaagggactttgctgggaaggacatcgaaatcaagaaactggttgatgctaattcaaaggaggcaatcgagaaggccagggcaggtggtgccgccccatcagctgtcgataacatcctagagcaaatacggaagaagcagaagctgagcgtcctggacaagacgaagaaagactggggagagtacaaggaagagaaccggggcttgggggaagagctggacgcctacaagaaga

SEQ ID NO: 2716 - DNA, 1047 bp, Zea mays
  misc_feature (289)..(291): n is a, c, g, or t
attcgctagctccgtcgtgccgaggtacgccccactgaccaggtgattggttgaccatctctattgttcttcctcctctccaattatacgttggaagtccgtcgagccaccagtgtcgtcgcgccgaggtaccccttgactctggtgattgattgggcgtcactactgctcctcctcctcctctccgtttctacccaaggggagcgaggagacaaacgtgtggcctgccacggcgaggcggtggggatccagtcctccatcccttcaatttggccttctctatctgggnnnctctctatttagccacccgttcgacacacgctgctacaagctcttcgtgatcagtcaaaaatagtgagatcgagttgtttggggggagcactgcatgagccctcctccgacggacaccctctccgttctctagcgatcgagatgtgcgagattctgatgtgcgagatcgagggccaccacctcacgtcggcagccatcgtcgaccatgaaggcgccgcctgggctcagagcactgcattccccgaggtcaccgctaccttcatgcgaaccattcctctgccgtaaagtccgacggcagccacgtggtaccaggccacagctggcccacacgtcatccacccggctaccacaacgttcacggatgttacggtagaggatcctgccggcaccgtcacattcgattccccttgtattacataaacgttgttgtctgtgtgaccaattcgatctgatcccgctagctgacacctaacatgtgaagggatagattttgctgtgacgtcatccacccaattcaagcctgagatggccaacatcatgaaggatttcgatgagcgggggcaccgtaccttgcctcgaccggcctgttcctgggagccaccaagtacactgtcatccaaggcaagcttggtgctgttattcgtggcaagaaggtatttaactgcccatcgaacgtcgcaacgcgactgctccatcctctttgatccgattcattcccaactgttgctgcctttgttgttcccagggattcggtct

SEQ ID NO: 2717 - DNA, 368 bp, Zea mays
gaagagagcagacagacagctctgcaaatcctccctttgccatgtttcccgttaattagctccccctctacggtcatctatgcttcatgtcgtcgtctgccctgaccatttcggccctaggaggactgctatcattgtctgtcccgctatgcgtgctcttgtgttcagcttccgtgcctccgggagggtagtattgcgggtcggcgaggaaggagagcgccgcgacgacgtcgctgatccccggccggctggcagcgtcctcctgcaggcacatggacgcgacggcgagcgcctggtacagcgccttcactgggtacctgttgcccagcaacgggtcggccagcttcacgaacctcctcttgtctctc

SEQ ID NO: 2718 - DNA, 286 bp, Zea mays
tgcggcgccgtccatggcgagagagagagcgtctgcaggccagccgagagcccgagaccagtctgctgtctgctcgtgccggtgtgggtgacgacgggcgttggcgtgtgtgggggtctctgtccaagtccaagagcaaggtacgccgtacgctgaagctgctatgccttttggccctgcgtcgtgtctttcgacgttggctggtggccctggcaccacgccgtggagcggtggagccgccggtgggccgggacgggaggcaggccgccgccgggtgctcagctca

SEQ ID NO: 2719 - DNA, 446 bp, Zea mays
cgttctgcccttggacttcccctgattacggtgaacccttgcctggatggaggcttactctctcggcattacttgctggggacaagagatctgatggggacttgcaagtggatgttcagaccagccttctcgatgaggtagaggtgctttcattgaatcaagccttgcatctctagaacacaacctcacagtttgttttctatgattcaggaggatgaccctcttacctctgttaggaagcttttcatgacaccacctccgaaaaggcggaggatacagcaatctgaaaagagctgagaagtgaactgtatccacatgttgggaaagctggggtcaaacccatacggttagacaatatcatggggcagatccagaatgccatatgaattgaatattggaactggaaatgtttacgctgcacatctgtgcgatgtacaaattcttga

SEQ ID NO: 2720 - DNA, 1626 bp, Zea mays
  misc_feature (285)..(285): n is a, c, g, or t
  misc_feature (289)..(289): n is a, c, g, or t
  misc_feature (291)..(291): n is a, c, g, or t
  misc_feature (308)..(308): n is a, c, g, or t
  misc_feature (311)..(312): n is a, c, g, or t
  misc_feature (325)..(325): n is a, c, g, or t
  misc_feature (358)..(359): n is a, c, g, or t
  misc_feature (370)..(372): n is a, c, g, or t
  misc_feature (390)..(392): n is a, c, g, or t
  misc_feature (394)..(397): n is a, c, g, or t
  misc_feature (407)..(425): n is a, c, g, or t
  misc_feature (427)..(427): n is a, c, g, or t
  misc_feature (430)..(434): n is a, c, g, or t
  misc_feature (439)..(440): n is a, c, g, or t
  misc_feature (445)..(448): n is a, c, g, or t
  misc_feature (450)..(451): n is a, c, g, or t
  misc_feature (462)..(464): n is a, c, g, or t
  misc_feature (466)..(468): n is a, c, g, or t
  misc_feature (470)..(470): n is a, c, g, or t
  misc_feature (474)..(478): n is a, c, g, or t
  misc_feature (480)..(495): n is a, c, g, or t
  misc_feature (497)..(504): n is a, c, g, or t
  misc_feature (507)..(507): n is a, c, g, or t
  misc_feature (512)..(518): n is a, c, g, or t
  misc_feature (520)..(534): n is a, c, g, or t
  misc_feature (537)..(547): n is a, c, g, or t
  misc_feature (549)..(551): n is a, c, g, or t
  misc_feature (558)..(564): n is a, c, g, or t
  misc_feature (570)..(578): n is a, c, g, or t
  misc_feature (581)..(587): n is a, c, g, or t
  misc_feature (589)..(589): n is a, c, g, or t
  misc_feature (593)..(604): n is a, c, g, or t
  misc_feature (606)..(606): n is a, c, g, or t
  misc_feature (614)..(624): n is a, c, g, or t
  misc_feature (626)..(635): n is a, c, g, or t
  misc_feature (637)..(640): n is a, c, g, or t
  misc_feature (642)..(654): n is a, c, g, or t
  misc_feature (656)..(664): n is a, c, g, or t
  misc_feature (666)..(668): n is a, c, g, or t
  misc_feature (671)..(673): n is a, c, g, or t
  misc_feature (675)..(677): n is a, c, g, or t
  misc_feature (679)..(686): n is a, c, g, or t
  misc_feature (688)..(693): n is a, c, g, or t
  misc_feature (695)..(716): n is a, c, g, or t
  misc_feature (718)..(725): n is a, c, g, or t
  misc_feature (730)..(739): n is a, c, g, or t
  misc_feature (741)..(746): n is a, c, g, or t
  misc_feature (754)..(762): n is a, c, g, or t
  misc_feature (765)..(778): n is a, c, g, or t
  misc_feature (780)..(782): n is a, c, g, or t
  misc_feature (784)..(797): n is a, c, g, or t
  misc_feature (806)..(809): n is a, c, g, or t
  misc_feature (811)..(815): n is a, c, g, or t
  misc_feature (818)..(829): n is a, c, g, or t
  misc_feature (832)..(844): n is a, c, g, or t
  misc_feature (847)..(849): n is a, c, g, or t
  misc_feature (852)..(866): n is a, c, g, or t
  misc_feature (873)..(889): n is a, c, g, or t
  misc_feature (891)..(894): n is a, c, g, or t
  misc_feature (896)..(909): n is a, c, g, or t
  misc_feature (911)..(920): n is a, c, g, or t
  misc_feature (922)..(926): n is a, c, g, or t
  misc_feature (928)..(931): n is a, c, g, or t
  misc_feature (935)..(941): n is a, c, g, or t
  misc_feature (943)..(952): n is a, c, g, or t
  misc_feature (954)..(961): n is a, c, g, or t
  misc_feature (968)..(983): n is a, c, g, or t
  misc_feature (985)..(987): n is a, c, g, or t
  misc_feature (989)..(991): n is a, c, g, or t
  misc_feature (993)..(1020): n is a, c, g, or t
  misc_feature (1022)..(1025): n is a, c, g, or t
  misc_feature (1027)..(1030): n is a, c, g, or t
  misc_feature (1032)..(1047): n is a, c, g, or t
  misc_feature (1049)..(1052): n is a, c, g, or t
  misc_feature (1060)..(1064): n is a, c, g, or t
  misc_feature (1066)..(1068): n is a, c, g, or t
  misc_feature (1077)..(1089): n is a, c, g, or t
  misc_feature (1091)..(1093): n is a, c, g, or t
  misc_feature (1095)..(1109): n is a, c, g, or t
  misc_feature (1115)..(1129): n is a, c, g, or t
  misc_feature (1132)..(1133): n is a, c, g, or t
  misc_feature (1136)..(1137): n is a, c, g, or t
  misc_feature (1139)..(1148): n is a, c, g, or t
  misc_feature (1150)..(1153): n is a, c, g, or t
  misc_feature (1155)..(1155): n is a, c, g, or t
  misc_feature (1157)..(1160): n is a, c, g, or t
  misc_feature (1162)..(1163): n is a, c, g, or t
  misc_feature (1165)..(1174): n is a, c, g, or t
  misc_feature (1176)..(1192): n is a, c, g, or t
  misc_feature (1197)..(1221): n is a, c, g, or t
  misc_feature (1224)..(1224): n is a, c, g, or t
  misc_feature (1227)..(1233): n is a, c, g, or t
  misc_feature (1238)..(1245): n is a, c, g, or t
  misc_feature (1248)..(1255): n is a, c, g, or t
  misc_feature (1258)..(1263): n is a, c, g, or t
  misc_feature (1265)..(1266): n is a, c, g, or t
  misc_feature (1273)..(1274): n is a, c, g, or t
  misc_feature (1277)..(1309): n is a, c, g, or t
  misc_feature (1311)..(1311): n is a, c, g, or t
  misc_feature (1314)..(1315): n is a, c, g, or t
  misc_feature (1319)..(1321): n is a, c, g, or t
  misc_feature (1323)..(1331): n is a, c, g, or t
  misc_feature (1333)..(1342): n is a, c, g, or t
  misc_feature (1344)..(1347): n is a, c, g, or t
  misc_feature (1349)..(1358): n is a, c, g, or t
  misc_feature (1361)..(1369): n is a, c, g, or t
  misc_feature (1371)..(1373): n is a, c, g, or t
  misc_feature (1377)..(1382): n is a, c, g, or t
  misc_feature (1384)..(1384): n is a, c, g, or t
  misc_feature (1388)..(1396): n is a, c, g, or t
  misc_feature (1399)..(1404): n is a, c, g, or t
  misc_feature (1409)..(1416): n is a, c, g, or t
  misc_feature (1418)..(1425): n is a, c, g, or t
  misc_feature (1431)..(1434): n is a, c, g, or t
  misc_feature (1438)..(1449): n is a, c, g, or t
  misc_feature (1451)..(1466): n is a, c, g, or t
  misc_feature (1470)..(1480): n is a, c, g, or t
  misc_feature (1483)..(1483): n is a, c, g, or t
  misc_feature (1486)..(1487): n is a, c, g, or t
  misc_feature (1489)..(1491): n is a, c, g, or t
  misc_feature (1493)..(1508): n is a, c, g, or t
  misc_feature (1512)..(1527): n is a, c, g, or t
  misc_feature (1530)..(1536): n is a, c, g, or t
  misc_feature (1541)..(1543): n is a, c, g, or t
  misc_feature (1548)..(1551): n is a, c, g, or t
  misc_feature (1553)..(1565): n is a, c, g, or t
  misc_feature (1567)..(1575): n is a, c, g, or t
  misc_feature (1577)..(1589): n is a, c, g, or t
  misc_feature (1591)..(1601): n is a, c, g, or t
  misc_feature (1604)..(1607): n is a, c, g, or t
  misc_feature (1609)..(1623): n is a, c, g, or t
gtcaggcagcttgcattacttagacagttaagatgtgtttcagcacagatcagtcgacctcttctcagagcagctggcagagaagcttggctgagcgtgcaccacatatgtgcaacaaaggttgaagacgaccggccggcaccggcctccagaagaaagaataggaagaattaagaaaaggctagggagagaaagggagtatcgacggatcttgctctttttcttcttttgtatggtcgtgtcgtgcatctggtggcacgactgattacaaccaattcaatcaanacangncagagagggaaaggagntgnntcggcatcatcangcagttcccgggtccgacgatccgcggccgggnnggcgacaccgnnnacgtccaggttcaagaannngnnnnggatgtacgnnnnnnnnnnnnnnnnnnngnacnnnnngccgnngcggnnnnannggggggggggnnncnnnantcannnnntnnnnnnnnnnnnnnnngnnnnnnnnttncccgnnnnnnngnnnnnnnnnnnnnnngcnnnnnnnnnnncnnncccccgnnnnnnngttaannnnnnnnnacnnnnnnnanactnnnnnnnnnnnncncattcctnnnnnnnnnnngnnnnnnnnnnannnncnnnnnnnnnnnnncnnnnnnnnnannnccnnncnnnannnnnnnnannnnnncnnnnnnnnnnnnnnnnnnnnnnannnnnnnnactgnnnnnnnnnncnnnnnncaagcctnnnnnnnnntcnnnnnnnnnnnnnncnnnannnnnnnnnnnnnnagcagagannnngnnnnnatnnnnnnnnnnnnccnnnnnnnnnnnnntcnnncannnnnnnnnnnnnnnggcaagnnnnnnnnnnnnnnnnnannnngnnnnnnnnnnnnnnannnnnnnnnnannnnncnnnntcannnnnnnannnnnnnnnntnnnnnnnnccccccnnnnnnnnnnnnnnnntnnncnnnannnnnnnnnnnnnnnnnnnnnnnnnnnncnnnntnnnncnnnnnnnnnnnnnnnncnnnncttttttnnnnncnnnccgcccacnnnnnnnnnnnnngnnncnnnnnnnnnnnnnnnccactnnnnnnnnnnnnnnntgnntanncnnnnnnnnnncnnnncngnnnncnnannnnnnnnnncnnnnnnnnnnnnnnnnnacccnnnnnnnnnnnnnnnnnnnnnnnnncanacnnnnnnncattnnnnnnnncgnnnnnnnnaannnnnncnncacacanngcnnnnnnnnnnnnnnnnnnnnnnnnnnnnnnnnncnctnncaannnannnnnnnnnannnnnnnnnngnnnngnnnnnnnnnntcnnnnnnnnntnnncgannnnnncntaannnnnnnnntcnnnnnntcttnnnnnnnngnnnnnnnngtcacnnnnttannnnnnnnnnnnannnnnnnnnnnnnnnngtannnnnnnnnnnttnccnnannncnnnnnnnnnnnnnnnnactnnnnnnnnnnnnnnnnatnnnnnnncttcnnntcgtnnnnannnnnnnnnnnnntnnnnnnnnncnnnnnnnnnnnnntnnnnnnnnnnnctnnnnannnnnnnnnnnnnnngcc

SEQ ID NO: 2721 - DNA, 407 bp, Zea mays
  misc_feature (398)..(400): n is a, c, g, or t
gggtcttggcggccatgcatggggcaacgatcgagatcgacccggggcacgacggcggccgacggcggcgaggagggagacgatcgatccaagaggaggtgtgtccgtgcgtacgtgtgtgccgtgtgcacacggcagcgagcagctagggcatatgcatcatttcagaagagaactagctactccgatcaagatgagcgacgaaggattgtacgtatattgctgagaggagatcgaagagacggtgatgagttgcattggcggaaaggtcgatgcatgcgtggatgatcagccaatcgtacgtagtacgtgtgtaaaaggtcggccggagcgaataatggtcgtcgtcgtgcatgtctcgatcgagacacctctctcgctcgctcttcctctcctannncttaaaa

SEQ ID NO: 2722 - DNA, 360 bp, Zea mays
ggagttttcttttctgctgatacaatgctgaaggtggggtcaatgtcactgcagtgacttgggtgacctataagcactgctcatattgtgaggttctcttggatattcaggaaggagccgcagatgttcccgccaagatctgggaatgtggcacacccagacagaggattcaccttgcccctggaatcgatgctgacggggtacttgagcaggtggcccttcatctcggtcacatggctggagatgaatttctcccagttctgctgtccgatgtgacgcacctgcctcgtgcactctaggctctccggtctggtgaagctctcctcaatggctccgatgtgctctgcccatagagacatc

SEQ ID NO: 2723 - DNA, 357 bp, Zea mays
gactgggtgtggcacacggaggacgacctgttcatgaacggcgccatcttcaatccgtccggcggcgcccccaagcaggtcgacaccaacgagtgggtcaagcccaagccaggaacctacgttacaaggctcacccgcttctccggcacactgtcctgctgcacgggcaagccgtgctgaaggccggccggtgggcgtcagaggctgcttcttctagctcatggcctggccatgccaggtcgcgatggctgcgtttcatttcatggaagaaagcaaggatggatcacaggttgtcgttctgctaattaatctacatacgtttgccttcaagtactgtgttgtggcattgttacacat

SEQ ID NO: 2724 - DNA, 449 bp, Zea mays
ttctcatctcaccgcaccggtaatggagatcaagcagagcagctagagcgtactactaacccgagcatcgcgaggacgaagatctgccagaagattggccacgtcatcttgggcctgaccttcctgcacgcagccattaattttccacagtcgcatgcatcgtgatcagtcatcatcagtgcgctagctttagctcgatagatcgccagaaatcagaaatcagcgacgaggacctctcgaggacgagggcgaagggggcgatggagagcgtggcgaaggcgtggcggtagacgacgagcacgtagtggctcatgccctggttcagcgacaccttggtgagcacgttcatcccggcgtagccgaactggagcgagatcatggccacgtagggcttcgccttctccacgaacccggcgcaccgcgccatggagatccttgcttctcactcg

SEQ ID NO: 2725 - DNA, 364 bp, Zea mays
ggattcttggtgtccagggcttctctgctctgcccctgcattgtttgcagctgtgctacggattctttggatttgcagtggcagccaatctgatgagggacctcttgccaccaaagtacggcaaatgggttccattaccaatggcaatgggggttcccttcctagttggtgcgagctttgccatcgacatgtgtgtggggagcttgatggtcttcatctggcacatcattgacagaagtaaagcatctttaatggtgccagcagttgcatctgggttgatatgtggcgatgggctttggatcttccctgaatccttgcttgccttggccaagatcagtccaccattgtgcatggcattcaggtc

SEQ ID NO: 2726 - DNA, 457 bp, Zea mays
  misc_feature (385)..(432): n is a, c, g, or t
  misc_feature (441)..(454): n is a, c, g, or t
agaggatggtgttcggtcaggtggtgatcggcccgccgggctccggcaagaccacctactgcaacggcatgtcgcagttcctctccctcctcggcaggtaagtacgccgtttagttcctcaccgttgctttggttgcccctcaagctgctctagttaagtcgaacacgcttgaccttgatttgacccgctgcgtgatgccgtgattcgattagtagttgcttcggttgcccctcacaagctgatctaggactctaggtaagtggaatacgcttgaccttgacttgacccgctgcgtgattcgattagtagtcaataatagtgccctcctctgctaaggttgatcgagaatgttaactgataccatattgcttgtagcagaagttnnnnnnnnnnnnnnnnnnnnnnnnnnnnnnnnnnnnnnnnnnnnnnnntcactcacnnnnnnnnnnnnnnctt

SEQ ID NO: 2727 - DNA, 373 bp, Zea mays
gatcgaggccagcgactgtgttccaaaactaccttggcgatggcagtcggttcgtgccatcgaggaggtcacagatttatgggccaacactgggtgcagatggtcgcttgtggatggaaggcttcaacattgtccagtgtggaaattacgcacaatcagtacctacggccataccagttgctcaggtgcctcagctactttaccagtcagaggatgaactagcggcgaggcgaacacgcagtcacatcacaatctcatcgtcagttgggtcccctataaacccgctccagcgctctccgatcagagcgactccattgcgagtcggttcatacccccggtcgacagaggtgtccgtctgtactgctgtgaatat

SEQ ID NO: 2728 - DNA, 351 bp, Zea mays
tagagtaactcatgcccaacccatattaggccggtatcctcatggttaaagtttgttttggtatattcttacctaaagagtcaatatcttccaaaagaacacggtgacaatggactttgaaaaaaaaacgattcacttgtgctagtatcaaaatttcctacaagcttagtttatatgtaacttttttctgtcattacatctcggtaacccttaactcctgaaaagtgatcatgggctccgcaatcggcatcgtcatgaatggtacgctcttgggtcagatagtactgtaccagaagcccgctccaaagaaacagaagaaagaagattaagcaacatggagaagctgcagaa

SEQ ID NO: 2729 - DNA, 788 bp, Zea mays
taagtagatgtttgtggtattgctggggtttgtggtatctttgttaatatccattgctcatgttccttccttggcttctgaaggttcttgaacaaaaggaagaaaggatcgcccctgggactctatatgggtcaagccatacgtacgtctccctaaccacaaaaccttttgcatgctccccctgcttttgtatttattttaagcataaaaagagatgtatctcatgccgtgagtgctcgctttacaggtatgtgttgggaacacaagataaatcatcagctccgaaaagggtgagtgttggagctgcctccttctacccccatgggtgctctttgcaactaggtcgtttccctgatatttgatatacttggtcttcgtataaactcgtgttaaaaaaaatcggtggcaggtggatctgcttaagaatcaaaagtcagacaaggtggatgtcaccatccaacccgaggaactggaagccatggatgatgttctggcagccaagtaacgactgatgtctttgttcagttgagatataagtgtttttttttgttcttccgaagtcagacctgttctcttccgataatgcaacaggtatgaagaagctcgagaggaagagaagcttcggaaccaaaaggaggacttcagtgacatggtggcagaggtatgtactattcttccatgacacttctgatttggaatagctgggctgattgacacgagtgagcgctctctgcagaatgctcacaagaggaagaggaagcaagagaaggaaggcaagtcgaagaaga

SEQ ID NO: 2730 - DNA, 341 bp, Zea mays
ttctcagcgcgcggtggtcatcttcagcacgagctcctgctgtatgtgccacacggtgacgcgcctgttccgcgagctcggggtgaacccgacggtggtggagctggacgaggaccccagggggaaggagatggagaaggcactggcgaggctgctcgggcgcaaccccgctgtgccggcagtgttcatcggcggcaggctcgtcggctccaccgacaaggtcatgtcgcttcacctgagcggcaacctcgttccgcttctgcgcaatgccggcgcgctctgggtgtagccgtgttgcatatatatgtagctagccgtgttccattccatatgcatgctat

SEQ ID NO: 2731 - DNA, 362 bp, Zea mays
acacagcagttgacagttgaatcaaacctctaacattctactacctctgtcccaagataaatgttgttatcgttttcaattagtcaactatttttaactttaaccaaatataaaaaaattattaatatcaacagtatataattaatatcattagattgatgactaagacactagtataaaaaaatgtcaggtttgttcttcttgcaacgacagaaattcacacaggtttgttctgcttttggtttagtcattccttgggccattgcaaccaacctgtgagaagttagaaaagcggagacaagaactgagtcagatctgtccactcccttttctcccaccggttccctcgaggcggatataaa

SEQ ID NO: 2732 - DNA, 502 bp, Zea mays
gcaatattcatgagatcagatctgaatttatctgcagaagaatgaaaaagaatattttcatgagattgatgggcatggtggcatattcctgagagaatccatgagatgcaagataaagtgaatttgaatccatatgagattaaatattactcaagaataacaaattattattgacgtcaaatcctacatgctatgcaaaatacaaatttattgataaggaaaagaatggctcaaataagatggtgtcttatgaacactgaaaaactatgctttccaaccatgagattgagaaaataacttacctgtattttctttgttgtccatggtcttttttagcaaagaatctctggcacactcgagagccattctgtaacctaaaattttacaggatgaattaagtgctggagacgttgaatctcatcataaaaaacaatggttgtagctttgcagcagtgatctagaatgcatactagtagttcctcagaatacacactagctatct

SEQ ID NO: 2733 - DNA, 374 bp, Zea mays
atgagtacatacataaattaatagcgactgcatttttttcttatacaggaaccatattgaaagagaaggttgcccttaagtagatatcaacagcagaaaaggaaatatcatcctctaacaagattaacttttcatggtccggtatcaggagaaattgtagatcaattttcataacaacaaataacttgttttttattcaattgactacagaacaacgtttaggagaaggctgcaagggagacaaaaccacaccaacatcaaacatgtcagcattataccatggacaggcatgtatagctctgaagaacacacgccgtgctgcagaagagttgcagactatttctgcctcataggctagataacagcgccacaat

SEQ ID NO: 2734 - DNA, 309 bp, Zea mays
tttttttccatattctaagtttatacccgatgtataaatctacagatactttcttacctttgtttagttacgataaactttatccatcaattattttgtatacttttctaacctatgtaaatttagaggttaatttggactgtttaatatttaaatgttgtgggtggattaaggggttatttagtgttttaagtacaaacagaggaggacaattcatgcacatactttagctttttattgcaatgatagataatttatatgaagtttaggacttattttggatataatatgtcagaatgacagagattc

SEQ ID NO: 2735 - DNA, 501 bp, Zea mays
gtcatttgttttcctgatagtgtactgcgcagtaacattttcgctaggtcagatagctgttggcgaggcatgcacagtggatcagagggacaagatcacaacggactgcagagagttcatcaagctgaaaggccccgtcacagccccgtcgtacactgacgactgctgcgtcgccataagagcggtgcccaatctcgacatggagtgcatcattcgcctgctctccaataaacagaagaagaagtacgacgtggacaagatccggcggctcggcagagttctctgcaatccacatccggtgagaatgcgctgtgctgcagaaacgtacaaaagcatatcgtcaattgtttctgatggttgatgaaatatacatgcattgttcatccttgcttgtagctaattcttgtccttcaaacatgtcgtctgcaggtgatgacgtaaaatggggtgtggcagtagtttctgatggagtgcatcgcgtcaacaatatggagcttgaac

SEQ ID NO: 2736 - DNA, 506 bp, Zea mays
  misc_feature (146)..(147): n is a, c, g, or t
  misc_feature (373)..(375): n is a, c, g, or t
  misc_feature (490)..(494): n is a, c, g, or t
tataccctgattaccgctacccgctgcgagggcaagagaaaaagaggaagattgctgcttcggtcaccccagctgagcctgtgccgaagagcaaaaaggtgaaggttctgacccaccggccgcgttatattgaaccggtcgtggtnnctgaatttggcgcatggtcctcttcagcagccgaagcaacacaaactgctccgattgcacagagcgctgaagaggcgaccgtagtgccgaaggtacccatagccgagccagtcgaggataaggttgataaggctgaagagccaaagtttgaagaaataataaaagtgcctaaaattctgagccctctaacagagacaaaactgccgaaggtgcaaaaggcttctgnnncaactcctaagaggaggaggatggccaacgtgctggatgctgtgctggagactacaaaggccttgagccctgctcctacaaagaaaattgttgaggctgccaaagcgcaagctannnnnaaaactgggcaa

SEQ ID NO: 2737 - DNA, 480 bp, Zea mays
ctgcaccaaaatggctgcttgcaagcaactatgaactaccccatgtcttctaacctatttacgctgacttttgtcacgatgcatgcattttatggatatgcagtgtgcagtgtgaatggcctggagttgatgtaaccttctctgttgactccggctcgaacccgaactatctggctgtgctcatcgagtacgaggactgcgagagcgatctttcagccgtcgacatcatgcagagctcagcagggcaatgggtgccgatgcagcattcgtggggtgcaatctggaggctcgactctggctctgctcttcagggcccgttccacctccgcttgacgttcagctcaggccgggtactcatagccagcaatgccatacctgcaggatggaatgcgggtgtggcgtaccgggcaggcggagtggcggtgactagggccaggcccaggagtggtggcagccaggccggtgaggctgctgctggaa

SEQ ID NO: 2738 - DNA, 377 bp, Zea mays
aagaagggcgcgtccatggcaactaacgctcgcgtgtcgcccgcgctccccctttctatgtcccgacgcgatgggagtggaacaccgctgccgccgaggaggcgagaaagccgagacgagacggacgacggatgagagtgagacaacgccttgtctctcgcctttatcggtatgccggccacggccaggccagcaaccactccgcacaacctcagaagcgaacaagcggtacggtgccgggccggcagttggctgcgcaaccaaaccactcacctcccgagcgcgggtgacgcacgcacggcggagcagtcagagcaagcaatgggggtgggaacgggacgaggctctctggctgctcactagaccctgagcttaaa

SEQ ID NO: 2739 - DNA, 596 bp, Zea mays
aggctcctcccattcctcctctcccacgagctctcaccgctcctcgcggcggcaaaaacccccttgaattccctacgcgcccgcctccaatcccgccagtccggcggcgacccagggatccatggagaggtacgaactgctcaaggacatcggttccggcaacttcggggtggcgcggctgatgcggaacaaggacaccaaggagctcgtcgctatgaagtacatcccgagggggctcaaggtgcggcgcgggcggcctccgattcaagttctcgcgtttgattccggaactttcgatcttccttacgggttaatttctctgcccgcagattgacgagaatgtggcgagggagatcataaaccaccgctcgttgcggcaccccaacatcatccgcttcaaggaggtgagccaaacagaaagggaattggatttcgcgtacggagtgtttcctgcacacctcccctgctgccgctgaagcacgttttttttctctaccttttttcttcttcttattgttcgtttcatcatttaggacccctgtttttttcccctaggtcgtgctcacgcccacgcacctcgctatcgtcatggagta

SEQ ID NO: 2740 - DNA, 336 bp, Zea mays
accgagacctcgccagctacaggatcttcgactcaaccacagagaactgggctctaagcaaggagctgcaggataaatgtggcaaagagataaaagatagcctgcagggcatatcatttgaccggagcgtcctcatatggcacatcgccaccgatctttgcttccgctgctctgacgtcgtcgattatggccaagaagaggtagaagatggaggaggagcagaagggccagaagaagaagaaggaggaggaggagtcggaggagctggacagggaacggaggacaactacgccgtccgagcattacggctccaaatcaattgcacagaggccatat

SEQ ID NO: 2741 - DNA, 625 bp, Zea mays
tcattcacaccaagagacaacttcaatgtattgtagatgatctcgaaccaacactgcaagaagaagttagatatgcattggagacacctcttttcagaagactcaacagagtacaggccaggcaattcatctcaacatacgagaaaagcactacgcgtatcaatatgctcctggagttctcaaaattagacttcaacatcttgctcaccctatactgtgaggagctaaaagatcttacgctgtaagaaccgtcattaatagcataccaatcttgtactacttccgttcttgaatatttgtcgctcgttagtttatttttgtactaaaccgtgataaataaaaaaaagatagaagggagtactaagttctctcaatgttccacattaattagttcactcacatttccatattattttgtactaagaccatttacattgtatttaacaggtggtggaaagagttccaagcacaggctaacacgacaatctatgcacgagataggatggtggagatgcatttctggatgatgggagtcttctttgagccccaatactcctattcacgaaagatgctcacgcagttgtttatgatcgtgtctgtactcgatgacttgtatgacagccat

SEQ ID NO: 2742 - DNA, 771 bp, Zea mays
  misc_feature (735)..(736): n is a, c, g, or t
  misc_feature (751)..(754): n is a, c, g, or t
tgctcgaaaacaccttgctccctggggctctgtacacatgaaagaattgcagcgtgtcacagcaacattggtttttagaagcaatactaattgtactccatacaaggttagcaacattttcactgttctcagttatgatatgccactgtgtcacggaattgggcaactgctggaggtagaattgtagaaataccatgtttctgtatggcatctttggtttgtagctgacagtcaatttgagctgagactagaaaagtctttttgagaatatgacgactcaaccaaattagattttgtttcctggcttgagcatgaattttgaaacttacatgtattgaacgttcatcggttatttgggatcgactcctggtggagtactgctgctgcactacaaatgttttgcatacctgaacctgatactgttttctatttgttagatattgtttgagcaagaccgctgggactatcttgttgacattttcaagcaagatttttgcaagttatatggcatgacactagagccgctgctgaacatatatctgcaagcaggcctgacagctctcaagaccccgtatcctcgcatgtgtttcacttacttttgtctatggtcttttattgctaaaatacagtttgctagtattatttttgttatggtatcctgtattgtccttgaccatttatttaaaggttctgctctgagggtagctgtcccaaagaagaccccttgtctctggnnggcttcaggaaactnnnngagcctctgcccttctc

SEQ ID NO: 2743 - DNA, 361 bp, Zea mays
  misc_feature (353)..(358): n is a, c, g, or t
aactaattaaagagtatgaaattatcattaaaatcgaacagttatgttctctagagctcatacttcaataagaaatccaagaataacagcagaatacatagaattagcccaaaaatcacaatatgagagaaaactctacagtcaggaccttccatagtcttttctacttcagttcaggaaaaaaaaagatgtacagaacgaattcagatgagcgagtcatatcaaccgttagcatgtaagaataaaaaaggctattcactaacaaagctatataactcacgctgattaatgtttgagatgttttggcagtggaccctgcagccagtttcaatataggacctcattctgacagnnnnnnttg

SEQ ID NO: 2744 - DNA, 464 bp, Zea mays
acccaacgacactcagagacaacaaatcatcccctgtattcacacgcaaacgagggcattcaggcaacaacatgttccatgagtttttcaacccaacatgtcatcggtgttcccctggtttagaggatctgccactcttctcctgcctcgccagaggcgtcaaggtcgtagtcctcgttggccatgctactgccagaacaacagcacagcccatcatcctgtttatacatttgcttcgatggctggactgactgcatgacagtaaagagtggcgctccattggctttctctgccaactcagatgcccgagaacagaaatcatcgaaatcgtctgcgtaaaaagatgcaaataggaaacatagggattagagcttgaaaaaaccaactggatggcatctgagaaactacaacggctcacctttgtcgcgacagtaaaaaccaatggctagggatgggtctatttg

SEQ ID NO: 2745 - DNA, 464 bp, Zea mays
  misc_feature (255)..(255): n is a, c, g, or t
acccaacgacactcagagacaacaaatcatcccctgtattcacacgcaaacgagggcattcaggcaacaacatgttccatgagtttttcaacccaacatgtcatcggtgttcccctggtttagaggatctgccactcttctcctgcctcgccagaggcgtcaaggtcgtagtcctcgttggccatgctactgccagaacaacagcacagcccatcatcctgtttatacatttgcttcgatggctggactgactgnatgacagtaaagagtggcgctccattggctttctctgccaactcagatgcccgagaacagaaatcatcgaaatcgtctgcgtaaaaagatgcaaataggaaacatagggattagagcttgaaaaaaccaactggatggcatctgagaaactacaacggctcacctttgtcgcgacagtaaaaaccaatggctagggatgggtctatttg

SEQ ID NO: 2746 - DNA, 519 bp, Zea mays
gggacgcggaacgagtgatgccgccgaagtgagcagctgactggctcggaatctcaacctccgccgtgaatatgctgtacacaggcctgtgatccgagaaccgagactcgccgcgcacgtagcatagctgggacaggcctcgcccgtaccatagaatccggtcacaccttcagaaagcaacacgtatcaggaggtgaacattttcccatgcgagcgatcaaaggtgactattatgaccaaaaaaaaagttcagtttttttttgtgtgtgtgtgggaattttaccatgctggagtccttcgcttctcgttcgggtgcatgtcgtcgccagcgtatctatcggagttgtatgagtacttgtaggtgggaggaaagtaaatccttccttctttccagcctgcaaagacccgaccaaatctctgctctatgcgaagctgcagcagaaatttcaatcatcagatcaccaaacaaaggcgcgcgtctccataacaagaggcgataagttcacatggcaatagcta

SEQ ID NO: 2747 - DNA, 610 bp, Zea mays
attgcattcataattcaatccatctgaagcaagggcaagtgattctcgacgattcaactcagtgtatttcagaaaagaagcagcacgccaacactgaaacaaataataaagaaatttatcatatttcgtaaattcaatgtaaaagcaaacaaagtaacaccggttggtgcctagcttaccaaggctatgttgaacgcatgcagtatgctccgtggctcccgcacaactaaatgattatttaaaagatattcaaggaactggttggccagaaagagtacattatcctgcagttgtgaataatgaaaaaatagttcagaaccagaggatcagatacttccacaaataatgatatcagaaggacactaaatgcaacaataggagcagagagggagggaaaaagttagcaggaggattatacatactggtagctttaacaccgtatttagctttaacagctcatgcttaagttcggcgtgaagacttttaggtgtcctcatgttttccactccttcagaatgaaattattagaaaaatgtaatatctactcctacagaacaaaaatactactttcaaattgtaatttcatattgttttacctgtctcaggaagt

SEQ ID NO: 2748 - DNA, 323 bp, Zea mays
gtcggggaagtggtccactttggagacttcacaagcagcagtccgaggttcggtgcatattgggtcaataaagggcggatcgcgggtgcgtttcttgaaggcggaagtcgggaggagtacgaggccatctcgatcgctgttcggcgggaagctgtggtcacagacatgggtgaactcgagaaacaaggcctggcactcgccattcaggagagccagaaggaggtgcctgacagtgggcttgctgttgtcggaaaacctacttatgcgtggcatgccacagccggtgtcattgcagctgtgtcgattgctgcaattgggtattg

SEQ ID NO: 2749 - DNA, 342 bp, Zea mays
agcagcacgtagaccacccagtgatctgagacacaaacaaccacttataaacaacctgtcaagctttgctaaatgctcaaacactccttttgttggaagtgtagttaattccatattatatttcaattctaaattcctcagtgaagtaaggccaccaaggcaaatagctaaagcttcatttgtaatactgcatgaacaaagagaaagactacagagtcctgacggtagaactagtggcatctccatggccctcccataaatgaaacttatcctctgctcatggcaaaagagccatgctttgatgatgttttctttcatccataccttttctcctccttcctc

SEQ ID NO: 2750 - DNA, 354 bp, Zea mays
ttgttgctccatcatcttttgtgaaagatcgaaacaagaatgaccttaatgtccagtttttttatgaagtccagttagtggtatccgtggcaactaaagaggacactttccatcttagaaccaatgaccattcaaaatgtgaggaaattaaattaatcgaagattaacttattattgactatttgaaaccaagtcagacatttatgatgcctcatatgaactatcgtcacacatactactaccaaccaacttttatcacattagaaactcttgaatcatatggttttcagtcatatggtccaattgtcaattcaagagattatttcttggtgtcatgtccatattttctggtga

SEQ ID NO: 2751 - DNA, 354 bp, Zea mays
gcacgtcgtcctcgttggcgagatgacctccaagctccaccagacctcgcgctccaccgacgactggaggcctctgccccttcgggatctccttattcacaaggcgtcgaggccgccgtcgaccacgtcatgccgctacgctaggaggaggcgtcgaccaacatcggcttcgcagtggcctaggcgtgccgtgctgatgtgctccgccgtttcgcccgcctccctccccaaagctgcttctaggccgtcgcgatggaggcaatcagcaacaccaggttaaccctcgagatcctggtggccgacagcgtggtcctcgtcggcgagatggtgacctccaagctcttccaaatctgg

SEQ ID NO: 2752 - DNA, 369 bp, Zea mays
taaaaatcctgcagactaaaatctccaaaagggagaaacaaccaaataccatcttatctgcctacaatcattttttttctagcctaggaaaacgtttggtctcgtcttgagccaatgcaccatctccttgtcaaggggggaattattcaacacggcatccatcattggactgccaaagtatctcggatcactcttgaacacccatatcctatcctttggccatggtctctgtgcctgtttttcctgtaatcaaccaccaaatagtcaagggaaaacaattcgtaagatgatggcagtcttcacaatttacaactttttctaggcaaagacagtgatcactgggatgtaaagtaaaagaagcacgcatgt

SEQ ID NO: 2753 - DNA, 604 bp, Zea mays
  misc_feature (45)..(50): n is a, c, g, or t
  misc_feature (530)..(534): n is a, c, g, or t
  misc_feature (591)..(599): n is a, c, g, or t
ctttgcgttcatcggcctcgtctggatcgaacaggtagtcatacnnnnnnattaacacagcaaataacatgatcagtcgagagttgtgtgttcatgaccccgtttcgaaatataggccgtttttggtcttgtcctaagccaatcctttgtgactttgacaaagtttatagagaattaacatctgcaataccaactaaaatgcacttaccaagacatttaatggtggatttagctaacaaatttgattttggcacattttctacaaactttgacaaagctagaggatttttttgacttaggacaaaactaaattcacatgcatttaattttggaacggatatataatagtagagatgttcagcaaagagagggattcgtttcacataacatacgttagctcatcaccagcgcaaacttttttcttcgctattagaacaatacgactttcatcatgtccaacactcataatccttgcatagcagtttggtgtgcactgcatgaaaaaaaaaggtcaactgagcatctatttnnnnngtaaacatatatatggaattaggcatatggtccttacagaatgattgatcagtcgtnnnnnnnnnccttt

SEQ ID NO: 2754 - DNA, 504 bp, Zea mays
ggatcatcctggccgattcttccaggttttgggaatgacgaggtcctgccctcaagtccagttgactggtgaagcctttgattggttgatggacggctgctgctgctggtggtcgggactaggtggctactgcgatttgggtcgctgggatctccagaacctcggctgcttgacagaagagccttccttgatgtgcttccattccgagatgatgaatgctttcttttatctgaatcaacagcctggaatacgttgtgaaaagtgttatgcgatgagctctttagtcaatcaccgtgggattgtaaataaattctttggtaaccaccatgccctgaatatgactaaagacggaggaacaaagaaattcaattacttcaagcacccatattatctgctgactagagctacatattttcaaggcactaaaagaaaaatttagggctaagggctagtttgggaacaccattttcccaagggattcctattttcccaagggaaaatgaa

SEQ ID NO: 2755 - DNA, 346 bp, Zea mays
cgacgtcaagcatctcatgaagttctgtggccctggcctatatggtgggctgagcagacttgggaagctgctcaaggtcgagcgtgttgggaccggccatcaggctggttctgattgtctgctgaccctgcagtgcttcatgaagctcaagcagttgtacttaaaggagtctgtcaagttgtatgatggtttgttgtttgggcttattcctggggaagtggagatcaaaactgctcccccgcccattggatgagtaatggtagttaaataacaagattctgattgagaaaaatagggaacaaaatctatcatcggcgaatatatgactgatctgaggatttcctgt

SEQ ID NO: 2756 - DNA, 668 bp, Zea mays
tggatggtgaggatgacgatgatgaagacgatgatgacgaggatgatgatgattatgatacaaaggtatggaaacttttttctctaatgaggaatatcatttctacatcctttctagattctgagtatgttttgacatttttttatttcccctttggaacagaagaacaagggaactgctggaggggaagggcaacagggcaaacgacctacagagtgcaagcagcagtgaggtaatgcacatcgagtgtcagtagacattaactgtggagcaattaatttggttctacttgatgcaatgtcattgagttgattttgtggagcccttgagagggcgcttgttggttttacgaaattggtgggggatgtttcgggtacatggtgttatatgtgggtagttttgtcacttgttgtgttgggtttcagatactgtgttcttatgcttggagtgaagatggttgccactctggtgtgtcttattgtgcataccagaaatttagctctaggtaaaaggctagccttgtgcctaaatgtttttgcaaattgcatcttgcacatgggtcttgcattatctgttgtttcacaatgaggagacgttggtcagtgagtgcgctaggcctcatgggggtaattgtgtgaagattttatttttgtactgctctagcattc

SEQ ID NO: 2757 - DNA, 556 bp, Zea mays
gaccacaacactgcagaccttaaaacttcaaaaggtcgcttccatctccaagaagcttgcaaggcaaaagacatttcagaagcgagctgcattagcagagtaaagcagagcaatagcaacaactagcagatgtgaagggaacataatagcaagagatggaacatgttcactacccggggatcagctcgtactcccgcccggtctcctgcgcccggcgtgtggcgatctcccttcgcacggcgaccatgggcgacccggccggcacccgtagaaccactgatgacgttgccttccccttttcctgctagtcccaacacgggaaaaggagattttgcgctagccccaacgtggaggccgcgacatcgaacgcccccgttgagtgcgccactggaagggcaggagcagggccagcgactggagcatggcgaggagctagcgcagcgcgagcagtgcgcttatccggcctgttggatccgccgcgtgcatgctcccagccctagccatctttgcaatcgccgcctctccctcctatcccttcatctccctccatgtgtgt

SEQ ID NO: 2758 - DNA, 374 bp, Zea mays
aagcactaatggttcagcaaaagaaatccctaatgacaagcctgccgtcactaagcctagtccctatgaagaactgattggagacatcaaggctagcctaggaagtgctccgacccctacccagctcaaggctgtgctggcctcatcaacccttcctccccaggacgtgatgaatgctctcctggaggctctctttggtggtgtgggtaagggattcaccaaagaggttgtgaagaacaagaagtaccttgcagttgctgtgccagatgagggtgcccagacccttctggttcaggccattgaggcttttggtgggaagtgcaaccctgaggcgctgaaggaggttcccgttgtcctcaaagccctctacgatg

SEQ ID NO: 2759 - DNA, 447 bp, Zea mays
  misc_feature (59)..(61): n is a, c, g, or t
  misc_feature (392)..(394): n is a, c, g, or t
agaggaaggttgccagccatcgaagacgtctccagtcagaatatggtttatccactccnnntgatggtgctaacagcaggcgatcttctggtatgtaagaaggcagggaaagatacccgcttatttgacagtatcatttctgttgtatttgaacttgcagcatcattgacttccacaactccatatattactttgggcactaacaatgagccatgctgtacccctcaacttcattcagtcttcgctgctcctatattttgcaagctaggcgcgcattttaaacagtactctattttgcagaaagaacatcatcgtcgtcggagcggaaagagaggcatggcgatgcacatgatcatcctaggaaacggcgccggagccagagtagaagctgnnnccctccaaggaagtctcaggagagggatcgagagcacaatcgcggtagggacc

SEQ ID NO: 2760 - DNA, 196 bp, Zea mays
ccgcacaccggatccaccgctccctcccccgcgatggcctggttccaccgagacaactgcggggctagggtttggattcgtgggtggagcccagtgctagatccagcagggggagggaggtagaggaggaggggagggaactgctggtggtcggcagtgggcgaaggcgccaacgacaatccaggatatggattcc

SEQ ID NO: 2761 - DNA, 646 bp, Zea mays
  misc_feature (597)..(600): n is a, c, g, or t
tctcctgaggaggaccagcggctcagggactacatcctcaagcatggcctcggctgctggagtgctgtcccggcaaaggctggtgagctgctgctctcctttctcctctcctctcctctcctctccttccatgcacattgctggtgcatgtcaggctcctttctcctctcctctccttccatgcacattattgcaactgcattgttttcccaaaaaaacaaaaaaaacttcattcttctgatcccgaatggacttggcttctcaaaaaaaggtctccagagaaacggcaagagctgccgcctgcgctggatcaactacctgcgccctggactgaagcgtggaatgttctcccaggaggaggaggacgtcgtcatcgacctccaagccaagctgggcaacaagtaaaactctctctctctctctctctcccatccctgcctaagtgcctagtgaatgttttccaaatctatgcttcgtaatggatgtgttcaattcatgttgctgatgaattggtacatacatacgtacattacgtcaggtggtctcagattgcgatgcatctgccggggaggaccgacaacgaggtgaagaactacnnnnctcgtacctcaagaagagggtgatgcagcaggcccagggcgcgtcg

SEQ ID NO: 2762 - DNA, 442 bp, Zea mays
gcagactactccatagttgtctccacacgctttaccacccctgtcctcaccaccgctgccatcctccactacagcagctcaaatggtgctgcaagtgtgccgcctcccccggcgcctaccgttgagatcgatttctctctcaaccaggctagatccatccggtaaagactactttgttttggctatcatcatcagactacctaacagcatcagctactgacgcattgagtcgttctgttacctaccttttgagcaggtggaacctgacagcgagtggaccaaggccaaaccctcagggttcctaccactacggtctcgtcaacaccacaagaaccatcaggctcgccaactcgcgggcaaccatcaacggcaagctgagatacgcagtgaacggcatctccttcgtcccggccgacactcctctcaaggttgctgatttcta

SEQ ID NO: 2763 - DNA, 705 bp, Zea mays
gcgcggacggcgatttccttggccccgagcacgtcgagcacctcgacgtcgacggaccagaagcaccagcaccagtacttgccgtacttggttggacgctccgggtggtcgagcgagcacacatgccacgtctcgccgccgtccagcgtcacctccacccgggttactttccggccgccacctggcaacagaggcaccaccaccgtgagtttctgttttagcccacaaggaaactaggaaaataggcttggaaggcccaatagaagcctcaaacgttgttgtttctttactgggctttaacatggagaaagcccgagctcaaacaaaattcggatcgctcttccttgactccgactcagatctaggggggcgtgggtgatgcaatgcaagatgggatgatgaaatgctgcgttgttggactcactcaccggagtatgcgtatcctttgatcgtatacggccgctgcgtcgtgagggcgttgatgggcagcacctcgtcgtgtcctggtgtggtgatcaccgagttgatgttcagctcgtttatcatgcactccggcttgtaccaccacgctgtacaacagagagaaacatttattagcgtcgtcgccctcgcacacgttggcgagcagaagaaacaaaactagaccgatgtacaaaccttcggcattggcgaggtcggcgtcgacgtgggacggcagcacccggt

SEQ ID NO: 2764 - DNA, 954 bp, Zea mays
  misc_feature (939)..(942): n is a, c, g, or t
cctaaactctagcgacatggagttctagaacattgcatcatttcaagaccttcgtctgtccaagttcgctgccaactactatgctactccggttcgtgatggtcacaggggtcgcagtcattctcgattagttggtattggtccttgtgactccaaattttctttatccttctgatccatgaaatcactgttttatattcactatcttgttttatattcacaattttttccatcctcaaggttcatgttgcaaagtatagaaaacaactagtttctaggcatggtctactatctgcagttttagttttgttgattactagattcagcccttttttgttggcaatttgctttgaactgccaacgatagtcactaaaatatactttaggtgttgtgtacttaaggtgttgatagtagagctcttgtttgatagtgtactgcagttgcactgaccactcttgttttcagttatgcgagtttacagaaatgcagtagagctgaaatgttgtgcgagttatgcagtagagctcttttctctctagaaatgtcgtgtgagtttacagttatgcagtagagatgaaaacagtggtttcgttatatccgaatggtaatttgatagtgtttcttgatggatgaatcaaatgtagagttgaaaaatattggctgttgtttgcactatgtatttttcattggacatttatgtttgctctgctttttcatatggtattttctcatttttctaattttatggtcatgaattttctcattttctaatggtctaacatttttaggattttatcttattgactcgggttaccctaaccatgaaggatacctagctccttacaagggaactaagtatcatgtgccagagttttgaagaggccctagccaaatgggaaggagttattcaacttttgtcactcgtctcttcacaacgnnnncgagcatccgtt

SEQ ID NO: 2765 - DNA, 541 bp, Zea mays
tacttgtcccagctcgttttcctgtgagtagtttctcactgtttgtgctcatgtttaggtattatttttacttaactttgtgttcgctctatactatgttttcagagacttgtcatataataacctgagtggtccaataccgggatctttggcaagaacattcaagtaaggcttaaactttgtgtctttccctatcccaagtgctaatatatgacagtaggacaggaaatgcaagattaagaactattctgggctattgatgttcttgcagcatagttgggaatcctctcatctgcggcaccaacaccgaggaagattgctacgggactgccccaatgccgatgtcctacaagctcaatagctcgcagggtgctccgccacaggcaaaatccaaaagccacaagtttgttgcagttgcattcggtgcagcaattggttgcatcagcatcctctccctcgctgccggattcctgttctggtggaggcaccgtagaaaccggcagatccttttcgacgtcgacggtaagcggacctccacgtt

SEQ ID NO: 2766 - DNA, 463 bp, Zea mays
tgattcatgttgccaatagtcatactaatagtaatacaatcagaaatagtaagagatatttatcagtcacaggcatttaaaaataatatcagccaaataagcaaaaccttcaggtacacatcatgcacactgcacagcccagatgaagagaacaaaagacactccacgatcagtgcaaaacttgggacaataaagtgtaaaagctaaacagcacgaatatttataaactagcactctagaagagagcaaggcaggcctggagcagtggtgagaccgtgagagctatctcaccgagtcactaggtcacgggtccaaaacagcctctccacatttgtggggaactgcttgtctcagttttaacgctcacacggaagcctatggcactgggtctgccctttttagcactctagaagagagcatacataaaggagactccaaatcaataacagtcaacagaaggcca

SEQ ID NO: 2767 - DNA, 557 bp, Zea mays
  misc_feature (546)..(547): n is a, c, g, or t
agcgaggaggaagtggccaggtacaccgccaggatgatgccggtcctcgccgtctccgtcatgcttgacggccagcagtgcgtgctctcaggtgttgtcaggggctgtggccgccagaaggccggcgctttcatcaaccttgccgcctactacctcgccggtatccctgccgcgctcgctttcgccttcgtgcgccgtctcgcgggaatggtactctcctgctctctttgcaacttcgattgggatccttcagtttctgaattacatcagggaagttcttgtgccaactctgaacacaacagggcctctggttcgggatcttgtgcggcctggtggtgcagatgctctcgctgctctccgttaccttatgcaccgactggaacaaggaagtaagcacgagttttaaggttccatacgcgctgtcattggatgttttgttctcctcctgtgttctgaatgttgctcttgggtctccactctgcaggcactgaaggcgaagaacagagtcttcagtgcggctcttcctgcagacatggaaacatgagnntctgtctggg

SEQ ID NO: 2768 - DNA, 732 bp, Zea mays
gggaacgcatttttcaaggatggcgacagcaggagctaatttcacgtctgaaatctaaaatccctaaagaagctcatgattcgttaattgaggtatgtttcattggcactggtagggaaaaaatgattcttttgtcattccattgttgttcactgattaatttgacttggttgaatatggaattattcttgttattttaaaattttaattttctttgtagtttctcttgttacatatgacatcctaaatattcctattgttctataaagcaaacacatatttctcatagtaacatttttacatttgatttgcaccatttatatttttccattttcagtcatttcatcccttgttttggctgtccttgtctggtgtggtgaggcaagcagagctgataatccaaactcacatacgaagggttatccaagcatatttgattggtctggtgctcaatggcaaactttttctctctcaaatacatccatagcaaaatgctttcatatcttgctttcaaggacttctttttctcgaaaagcgtaggagaactgcgcctcattatatattaagaagaaacaaaggtctatagaagacccagatatatgaattatgattataacatcagactggaaagatgaatctgtggtaggcgtgcatttggccattgtgattctctgttttgatatcaattttgtgaagaattataaatatcagaatggaaaatgaagttgttag

SEQ ID NO: 2769 - DNA, 470 bp, Zea mays
tgcactgtgttgttagccaaagctttacagagagtatgagcccctcattcatcatgacaacgtttgagtccaacaaaccaatgaataatacagataaaggggtgactatggtcgggacaacagaagtcactgttatcgattgtggcgcaaaatatagtggatgcacaattggtataggaggacctctccttgggtgtttcttccgaaaaatttgaattggtgtttgtccaaaatttgcaatttggtcctcaatagcggacttttgtaacatatcatccatgttctccaaatcaacggcaccctcatatgtcagataataaaatatgtttgctgcctgttccaaataatagatacagatttagcaaggttaagtttgagcacagagaacccactgacccatgggagtttttaacaaaatatgatatacgtacctcaactgcaggcttgcctcgctgcttgtaaccaaatat

SEQ ID NO: 2770 - DNA, 379 bp, Zea mays
aacgaccccgggtggctcgtcggcgagcagaggcacgccattttcttgttggcggcgccggcaggtctcgggattctggcggtggcgggggaagggccagagcacggcgcggagggaatatggttgctgtagggtgctcgactgctccctgtggtggccgtggccgtggccttggccggggacggtgccggcttgcttttatacgcgagtacgcgacgcgagagcgggcgagggtatctgggcatgtgcgctgacgcaggatcgcatcggacgtagtggaacgcgcgagtgacttgcttgcttgtttgcattaggggttatgcatgggctgcgccctgcccagctgcatcggccgtgacacggaccaccctcctttcgt

SEQ ID NO: 2771 - DNA, 686 bp, Zea mays
tgacagatgcactccatgaagagtctgtcctttcacatctctcattaggtacttattatcattacggcctgcttctcttgtgatttgcatagagcaatgtccaaacgttcaaaaattccgtacctttggcaggaaagaacaacccaatttctagcaatacaatgcttaaccttctatccaaacttgcatctctcacaaggttagcagaaaatgtccatatcagttgtatagttactaaggtgttggcaagtatagaccagccatgcatgttgttcttgcaggttttcagaactaagcctgactggtataaaactgaataagttaatggttgataagttgtgcctccttgcacaatcctcgtgcctatcaggacttctgctaggtggaacttccattggaccggtaatttgctttccattttcttttccaaagaaaggctttgcgttcgagaaaaaaaaggctttgctttccatttgtggttagtgtttgcaacctgtacacaagcaatggtactactgtttatgcaggtggagacaactaggcttactgaggcattgtcttgtacatctcaagatttcctaaggttggagttgtctaattgtgggctcacaacacctgatttcacacaaatctgtacaaatctctcccggatcaatattcttgagttaaaccttggaggaaatcca

SEQ ID NO: 2772 - DNA, 838 bp, Zea mays
ggaagtctgcatccgccgtgtacaaaaggttatccaacccaaccgccctttgcagttgtctacatcaaatataagaatggatatcaatgagcatgcatggctgaatgcaatttgcatttgcacaaaaaatattttttgcagaaacaaaagtaatcatcatttaagcttacgttatgggtggtgtgcattcaaatttgtcaggtctaaaccaaataagtaacgaagttataaaaaatagtgaatacttcagctaccttgatttctccaaatcttgaagttcagtgacccatccgttgtagcggagctggacagtgacaacagggacaccatctaacttgtagatattgtcaaacatttcccattccctccattctgatggaagtaatcttttgatacccggaacatcacaggctgtggaacaccaagttaagtgtgtatggttggacatgctagtaaaagaagaaagacaagacaaagggaaaaaaacctgcgacgtatgcatcagctttgattatctctctacttgtagcctaaaaatgtccaaatgagtgaaattttagtaatagaggctacataatcgtacaaagcagagcagtgatacactgataagaaagcatgccttggtgagtagaaggcccttaacataggtctctccatcaggtgatttctcatagagaacctctctgcatccccaccttaagtgaaacctgaaggatttgccataagatgtaagtcttgaattctacagcagtacacagaagtttcacaagaaaaacttggtctctgtaaccatacctaccacccctgtctgttatatacttctttattgggccactta

SEQ ID NO: 2773 - DNA, 574 bp, Zea mays
tccccgctttgatctccgtacgtcctgtcatctcatcgatctgcttcgcatccacgcctgagcagactcatggtggcgttcatggcgagcagcggggccatgaaggcgtcgagcaggccaaccttcgtcacccctcgtagcttctttaactggggcaaaagcgcgagagaaaccgagacgccgccgccgcagctgcagttctcctaccacgacgtcgagccaccgttccccatgtcgctcgtggcaaaaacacacctcagaggtaattatcatatccttttggcgattaattggttattaagaggccgattgattggctcgctgtggttacttgtcatgtcattgcgaatcacttcaattgtcatatattttgtttttacatttagcgcacaatgactaactttgttttccgttcactgttcttgatgataaattgataatatggtggcgcagaccgtgagctcaggtgctgctacaaggccaccgtggacggcttcagtgctacggacttccaccggcggtgcgacttcaagggcccctgcgtcgtcgttggctacaccgacggtggcttccg

SEQ ID NO: 2774 - DNA, 684 bp, Zea mays
tggctagctagcactgcgactgcgacgacggaacttcgcgtcgtcgctagctcggttttttttccccccggcagtaataaaagccacctaccaataccatgcattgatcatatggcacagagggtctgttcaccggccgtctcagtcggccacagctacaacctgacggacgtaagagggcggaggatcgtcaacgtcgagaccgcctccgggaaccggttcgccgtccgcgaggccggcgccgtgcccttcttccacgccaacatgtaccggcatctccaagtgaagcaggtaaggggacgagatcgaactgaagccatgcatcgagttgattcgacagttcgatggctgacgagagtgaacgaactggcactgcgtcgacaaggtgccggacgagaactcgatgagcagggagaggagagctgcgcagtgttcgtcagcagtggatgtggactccaaagaggcggcgctctcgctgctgggagacacagctgacgagaagtacccgatctacatgacaggtgatattctgaatctctgttcaaattaacctttgctctttaatttgttctgtatgcataatgaacaaacaggtggctttgaaaactactttattttcaggtccgaggttgtacactctgtgcactgttttggttgacctggacgaggcgaccatgaccatat

SEQ ID NO: 2775 - DNA, 375 bp, Zea mays
cccggaaagagacgcgtttgcagcgcggtatgtatgtacacaaagaaggcggcgtgcagtgcaggccatgccatcgatcatttcctgtaaaaaacaacgggacaaacaacgcagagcacattctcagtgtgtttgatttcgaaggttgagaagaaaaaaaggataaaatattcgatcaccggacgcaaagatctctctctctctctccctctctattttttggctgaacattttcacggctcagtgtggattctgctcctgacggagcgacgcttaacaattcgcttaagccgccgggatacggaccaaagcttgagcgagtccttccagctcccatgcttgtcgaagtgggcgtagatcttgtcgagccggatg

SEQ ID NO: 2776 - DNA, 620 bp, Zea mays
  misc_feature (107)..(109): n is a, c, g, or t
  misc_feature (117)..(117): n is a, c, g, or t
aagcccagcttgaccggctacgcatgatctcgggagaagggatgcatgatcgattgcgttattacctgttcccccacagggcgtggagctggagtatgacgctctcnnnctgaagcnaggcaagatcacgccgcaggaggagagcgtcatactccagctccacgccctgtgggggaacaggtaataacgcaatcgatcatgcatcccttctcgccgagatcatgcgtagccggtcaagctgggcttaattaatttccttgtgtcgtacacaactggatgctctgaccacagatggtcgacgatcgcgcgcagcctaccggggcggacggacaacgagatcaagaactactggcggacgcacttcaagaaggccaagccgtccaagaacgtcgagcgcgccagggcgcggttcctcaagcagcgacgcgagatgcagagccagctgctgctgctgcaggggcaagatcagcatcagcaggaggaggaagaacagcccgatcatgacgacgacggcgccagggaggcaacgccgggtgttccactggaggaggaggaggagcagcagcagcagcagcaagaggacctgcggatgatgctgcagcaggacatggacgacctgc

SEQ ID NO: 2777 - DNA, 384 bp, Zea mays
agagcggtagctgcataaatcagttttgatgtgatcacaaactgaacatgaatagacctcccaacccttgacataagctccgctttccagccaggcaagagagaggctacccggtcaacaatagcttgaacttggtctctgggtagcttcttaattgagaggcaaaccaagatatttgcaaggaaaactcaaaatggaacatggcaacaactcttggacacatgccagattaatagattatcatcattacagcggatagggagcacattactttttttgcacgttggtcttaaggcccgaggccacgccaaagagagtaagaatgtccaaggctaagttgatatccgaggcaactggctttagaaacaacactgcatcatctgc

SEQ ID NO: 2778 - DNA, 364 bp, Zea mays
tgaggaactgcaggaaggccatccctccgagggaaggaggagggaaggtgataatcatcgacatggtggtcggggctgggccggcggacccgaggcacatggagatgcaggccctgttcgacctctacatcatggtcgtcaacggcatggagcgggacgagcaggagtggaagcagatcttcgtcgaggccgggttcaccgactacagagtcacgccggtcctcggcgtccgctccatcatcgaggtgtacccttgaacgaacgaacgaacgaacgtcgtctggtgccatgtgtgtgtgtttgtgtggagggagggtcatcctctattttcttttttgttttgtttctgcattctgaagacacg

SEQ ID NO: 2779 - DNA, 373 bp, Zea mays
gagagcagtcagcgattctaatttgtggaaatgtattgaactagatgatatccgatttgaggtagctatggttacagcagatggtgggcctttgttggatgtaccacctccagagggtgttgtaagaattggtgttgctttccaacagttcaagtccaacacctcagttgagcaattgttttttgtgttaggtttttatacttactttggtcaagtagcagaacgtatctcaaaggtcagcaacgctaacaagtctgagtcaatgaagtcatcggctgacaagtcggagaataaactgccaagtgatacagctgtgagtttaactatgaataatctccagctcaatttcttggaatctttgtcagcaagtgat

SEQ ID NO: 2780 - DNA, 599 bp, Zea mays
gatcctgccctaccccatgaaggccaaaaatatgcggccacgagagaaggatgctgaatttaatgttctagcaattcaaatgtccttttcttctcaaacaacaatgtgtcattttgcaaaaacaagaaccatttcaaacacgaattccgttccaacacgtattctactcccaggctcgctacatcatcatcggcatgttaaacaagtctgccagacgaagaagatttcacccgcatatgcctcttcgtctgcattagacgcaggtgtcaggttgcatacctgataactgatgccacggcgaaagataagagcatctgacatttacctttactccccttggtttttgagatttccaacaagggaaaaggccatggcatctcgattttccaagctcagagcatctgtgaatcagacacggtaagcatgacgactttcagagtattttccaagctcagagcatctgtgacaaaatcaaatatgcctagctgtattgactgattatatgtgtgttttaaaatttgaaggtcaggataaaggctaaaattagagcatgtaataaaaaaacataggttaggacttacacgctctctttgtcgcaa

SEQ ID NO: 2781 - DNA, 515 bp, Zea mays
gcacgcgaggtcgaagcgctgctgagaggcatcatcaccaagcgggagaccgccatgaagaacggccatgccgacgacagcgacctgctcggcaagctaatgcagtccaacgttgaagaggcccatggaggcggaggaagctccaagccgatgatgaccatggaagacatcatcggcgagctcaagctgttctacttcgccgggatggagacgacctcggcgctgctcgcgtggacactgatcgtgctcagcatgcaccccgagtggcaagaccgcgcgagggaggaggtcctggaggtgttcgggaagaacgagcccaacatcaatggcacaaatagtttaaaagtggtgggtaatcttcgtaaaggcgcgcaactactaccattctccatatataaagagttgttatcttgctagttagtttgaagagcatcattagttcttaatctttgctcctgtgcggcaggtgaccatggttctatacgaggtccttaggctgtacccaccgatcatag

SEQ ID NO: 2782 - DNA, 385 bp, Zea mays
cgtgggacttagcgataacagcgagttggagcgttggtcagctcagcagacacgatcaagaaaatttacgagcacacgcggggcgagcaattgagtgacggtggcggagcttgctggtctgacacggaaaggaccaacaaggtcgacagccagtgcgactagataatggagcgtagtccagcatcaaactgacgacggccaccagaagggcaaagacgaggtcgagcaaggtaaaacgggttcaacggctcgacgccaaacgcgagcacgcgtgaaacccgatggacgaagagcgagtgcaacgcagtgataacgagcagacgcgcgagcgttaacgcgagccagcggcaagcacgagtgctgaggtacaactgacaacactcgt

SEQ ID NO: 2783 - DNA, 287 bp, Zea mays
tatggacgaagctctcggggttgctggcagagagaccagggcggcagggcctcccctccagctccagtgatcgatcagacgatcacccgctgcccgtgagtctgagttggcgtcgtgtcgtatcggctgggcctgcgcaattggcaggcaggcatggcgccccgcccggccggcacatgttttgcactgcgcacatgcgcatgtccggcaggcggcaggctccgcggctgcctgcttgtgtatgtgtgtggtggactggtggtgcctgctgcctgcccctttttttt

SEQ ID NO: 2784 - DNA, 370 bp, Zea mays
atctctcgctggttccttctgggatttttcgaaatcccattgaaacttacttggcaatttgtgttttttttaccgttgatgtttgcagcgagataaaaatggatgatcatcgttatgatatgctctctattagtgccacgtaaatcaccaaaaatattttaatgttcctgtaaaaatatggaaataggaccatagaagtggcatgttgcaagattattttaaatcctccggtgaataagtgtcaaccaagagagtctgcaacaaaaatgttgtaactttaaccagtgatacctttatgaatatttacctaggccattgggaaagtcatttatagatttgattatctgactcaaatgctcttagtttcatc

SEQ ID NO: 2785 - DNA, 351 bp, Zea mays
tacgagccgatcaaacgattcgtcatacaggcacgctcgtagcactgcgaaaccgaagcttgaggtagggttatgcgcaggaggggcggaggacgcgagaggagagcgcgcgagatagcactcacccccattgaacggtgagcgcctcgtaatcccagtactccttggggcgcagcacgttgacgtcggcgtagaccctggccttggacatggcgccgaccgatccggcgtgccggcggcgaggcggggctagggtttcgacgatggggaagggaaaagggggcaaggaatctccgtttttctctttttctctttccaggggaaaacgttttgggaataaagctaggtggt

SEQ ID NO: 2786 - DNA, 424 bp, Zea mays
  misc_feature (234)..(237): n is a, c, g, or t
  misc_feature (281)..(315): n is a, c, g, or t
  misc_feature (319)..(347): n is a, c, g, or t
  misc_feature (352)..(376): n is a, c, g, or t
  misc_feature (394)..(417): n is a, c, g, or t
gttaggctagtcctgtactgctactgtacatgaaccagaaactgatgatcaagggcatatctagactcatgttctaacagtttggacttgagggaggacttgtcaatagaagtcatttcttttttgtgccagcatacatggctctttcccactgcgcgacatcttcgacccgcgagggcggtggcggtaggacctcacgctctaccaggtcccagccgtcgaatatgctatctnnnncgccaccatgcttcaccaacttaccggtgtacaagaagctctgnnnnnnnnnnnnnnnnnnnnnnnnnnnnnnnnnnngctnnnnnnnnnnnnnnnnnnnnnnnnnnnnnaaaannnnnnnnnnnnnnnnnnnnnnnnnaaaacaggaattttaccnnnnnnnnnnnnnnnnnnnnnnnnataaaac

SEQ ID NO: 2787 - DNA, 394 bp, Zea mays
ggggttgcatggcatgcattcaggttcatcatcaggcagggctgtcatctcatctcatgtagtgtaaagcagccaatctaactgtgtattcggctcgcgcgcggtgatccggtaatcgggcctctgccactaaaaagaattttgtagcggttaattgaaatcctaattctttggaataagtagctgggactggaatgtccagagagtagcggtcgttgttggcttagggattgctgctggtggatgcaaacctcacagctagctggtgactctgaaaccacaggaactccttttcttttccttttctttttacttgtatctgtatttgctgctacataagtaaacagaagtggggtgtacctagttttctggttctcgagtgtcttgaaagttg

SEQ ID NO: 2788 - DNA, 832 bp, Zea mays
agctggagttctagaagcgaaaccaattaaaggtactatagcacgtggcagaacaccagaggaagatgaatgcttacgtctgcagttgagatacaggcaagtacactatattgttttctagatgtatcttggctctaccactctttttttcaggaaatattgagcttgggatgctgtttctttgctttccctgatttattttatttgctgtttttattattttgagttaagtttcttcacaaatgttctcgcggaagaagttggtaaaaataactggataagtgtgtcaggaatcaagaaattgatattgacattcatcataagcttggctcaacactctgttgaagcaatatggctgctagtgctaattcagttttcagttgacatatctacgatagaaaattacatggtcgtataacatttactgtaagcataagtcaactagtttctgtggtgtgtcattggaagtttctacagtcacacctatgttcttattgatgtattcctttcctggtagttcagtttcattgttatctggatgttctaaatgctaatcctgtttcacagcgctcatatgctactgctatattttcccttttgcatgtgctcaactccaccagcgaaaaagaccaggccgagaacctgatgattgtcgacctcttaagaaacgatctcggcaaggtctgcgagccagggagcgtgcatgtcccacgcctcatggacgttgaatcatacagaagcgttcacaccatggtgagtaccgtctgcggaacaaagaagccagatctaagccctgttgattgtgtgaaagcggcctttccaggcggttcga

SEQ ID NO: 2789 - DNA, 475 bp, Zea mays
ctcaacttctcacacccaaagatctcagagaacttcgatccacacgcttgtgggtgggctttcgggatgaacatgtttgacctgaaggagtggaagaagcgcaatatcactggaatataccattattggcaagatttggtaagtagtggaatgagaaatgtactgctgattgcattgcctcgttgcatatagcccatcatttagtgaacctgtaatgaattttgttgtttcgcttactaatagaagacctattgcagaatgaggaccgtaagctgtggaagctgggtacgctgcctccaggtttaattactttctacaacctgacatacccgttgaatcgtacttggcatgtcttgggcctgggctatgatccagctgttgacattgctgagatcgacaacgctgcggtagttcattacaacgggaattataagccctggcttgaccttgccatttccaagtacaagccattctg

SEQ ID NO: 2790 - DNA, 527 bp, Zea mays
  misc_feature (410)..(415): n is a, c, g, or t
  misc_feature (419)..(421): n is a, c, g, or t
  misc_feature (425)..(428): n is a, c, g, or t
  misc_feature (431)..(434): n is a, c, g, or t
  misc_feature (446)..(446): n is a, c, g, or t
gaggagatcagattcttcgctcagaagaagaacctggtgcccatactgttcgacaccgagcccgcagagatcgccgggcttttcgatggtagactggaggataaggaagcgaaggaggcgttcgaagggctgatgcggtgccacgaattcaagctcgaggcgaacgagagcgattcaagaggctgtgtgtcgaggacagtcacactgcttcggtccaagcttgggcggaagaacatcgccgagaaggagagcgaagcctctgatggcctgccttttccgcgcaaccggcattttgtgggaagggagaaggagctgagcgagatcgaaggcatgctctttggttcgaccgccgcgggtatccaggaagtggattgcccgagggcttccagtacaaatgagagaaaaaaatnnnnnncttnnncctnnnnagnnnnagatttttatangtattgtggaccttacagcctttgcacatggtcagtctcttgtgtatgccctgttggttttaattcagcattgacagatac

SEQ ID NO: 2791 - DNA, 654 bp, Zea mays
ggtgagtacatgggtgagcttgagcgcaaggttcgtgtgctgcagatggaaactagtacgttatcttcaaaagcagcatcgtcgcaggtttgttctctgaggctatgaatgtgctgatcatttcggtgtacgttggcccaagttttggcactgctttactgccttaatatctattcgcagagggaatgcgaggcacttagaattctgaacaatgagatgaagatcaggctgcaagcaatggagcagcaagcacagctgaaagatggtacgttttacgaggagattggatggaataattctgaatgagtttctttacatgctattgcttcaacgtagacggacctggcatccatgctattgctttgtctctctcaccgttctctaattgactgtatagttcactgacatgtcaggggaatttccattgatctattacaagttcttatgatttatgtgtgcaatcttgttttcttagcgtattcaactactgattgtattattgctacattgttctgtatccagctctgaatgaagcactgactgctgaagtgcagcgcctgaaacaaattgctggtgaggccagtgatcctcatgtgccgaatatgagccgcaagattgtcgaacagcagctgcagaagcagccatcggaggccc

SEQ ID NO: 2792 - DNA, 386 bp, Zea mays
cgcctcgggtgggcgaccaacatggcggacctcgaccttgcctgcccatcggctgtggtggcgcctatggatatgggtaccacgacatcgatatggtgccaaggtgcacatgtctcttcaaggggcaagtatggcgatgatgtgtacggaaaaggagatgtgctagggttgtacatgagtacatctctctacctcatgggaagaggtttgagcttcaaatgtctgaaccacaagggcaagccttttcttgtaaagggcaggatgcacgggctcatattctaggtcagcactggctcatgttctaggatcatgttgcaacttgtaaccccttaatctagagaacctctgatcggataacctttgctagtaagggtacgtgcgtccta

SEQ ID NO: 2793 - DNA, 488 bp, Zea mays
  misc_feature (479)..(485): n is a, c, g, or t
aatcgcaccccaaaggtagtgagagggcgaggacctcgacgttatgaagctgctgcaaggaacaacagagaggttgttggatcccaacgaaaacagtgagttgtaactatcttgtgacataaatattttgtgattggctcactgatgcatttttgcttgtgaagtcctcttacacagttttctcattgtttgttcagagcagctagatttcgagaatctgctccaaatgctgtagcagccagagattccgggcaagtttcacatgcacagccagaggctgcccctcccaaaaggaatgtcatgagttcaagcctaaattctgcgtccccacctttttatccctccagtgcatctactcaagattttccggtagcagctcaaacgagggacatacaagcaggaggttctaataagatccctccatcttccatgaagatggatgataactcaaagctacaatctggttcaatggttagagnnnnnnnagc

SEQ ID NO: 2794 - DNA, 391 bp, Zea mays
agggagcggcgtgccgcacaggcacttgttgtgcgcgtagcactctgcctcgtgcatggacatgaaccttcccgccgggagctcgccgcagagctcgttatagctgacgtcgaagtgatccagcctcacgtccatcagcgacttggccactctgcccctgaccctgttgtggctcaggtccaggaacctgaggtggtgcgggaacctgacctccgtcaggtcgaactcgagctggttccacgacaggtcgatcttgaccgccggcttcgtgatgccgaacaggaacgacgaggggtcaccggtgagctggttgtgcgagaggtcgatggtgtcgacgtcgccgtcaccgtactctccgggtatctcccccgtgagccggttgttggacagg

SEQ ID NO: 2795 - DNA, 361 bp, Zea mays
ctctcagtttcatcaaacggtcgtcggtcaattggtggcagcttgatggggaaaaaaagaacattctccagttttgcgcgagcatcaagccaaagttaggtggatgtcaatttaagggtagacaaacggtcatctggttaaaactgaggcattgtaatatgcttactacaggctagtgaagttcctctgccaaccgagtcagtcgttcactcatttgttatctttgagtaagagctgctgctatattgttggtggcgaaatttttttgctattttgcctcttacagttttgttactatgtcattcgtgtgtctatgatttgtgagacatctgcttcaataatttgtgggtccgatggtaaa

SEQ ID NO: 2796 - DNA, 332 bp, Zea mays
gtcaagtccggcgcctccaaggtggccgtcaacgacgtcgtcttcaagaacatccacggcacctccaacacgccggaggccatcacgctcaactgcgccaacaacctgccctgccagggcgtgcagctcatcaacgtcgacatcaagtacaacaggtccgacaacaagaccatgtccgtctgcaagaacgccatcggcaagtccattggcatggcgaaggagctcgcctgcgtctgaacctacttgcatccatcactcactcttcgtcacctctctctttctcactctcgccagtctttttttaggcctctggcaatctgcgaactttctta

SEQ ID NO: 2797 - DNA, 362 bp, Zea mays
ttgaagacttggtgaaaagtgaagctactgagccaccatgtatctcccacaatgatgtggcagggagtcacccttccactgttgagattgatggtcttccaaatcatatgaacatcaatatggtgaaaccaggtcttggtgatatgcaattgaaatttactgacgtgtctgctttaggttctcattctgttctcaggtcaaaacgtggttctggtaaccctatgcagggttgttttgatgtgaacaaaaactgttctcaggaaatgaaaaaacatggtacaaattctactagcagtccacctgccatgagaaccagacctgaagagactaaatttaaagatgcaccagttaaaggcaagaag

SEQ ID NO: 2798 - DNA, 379 bp, Zea mays
gatgcacagcaaactacatctaacttaccagtagaataccatctatatcaatggtggatgattcattagtatcgctgcatgaagcttgtgctgtcaggctctgactctcacctgggttttgccagaagttcctgcgtacaccacttgagctcaggctatttgctgcaaggctgaggtctgacagcaaaggctgcagtggggcactgccttcaagcaggctaacaacttttgacatctttggtctgagtgtaggcgctgcagttgtgcatagcagggcaacattcagcatgaggagcgcctcttctgtcgagtaattggatcctagatctggatcaaccaattccagtagagttcctctctcatgtagaacacaagccca

SEQ ID NO: 2799 - DNA, 578 bp, Zea mays
ctacttccatcataaatcacagcagccaaggcagcattgggtacagatcagaagagcacctgggagatgcgtatggacacgatctgcccgtccctggccgtgtcccgcatcgcctcaaacgtcgatagcagtcctgtcacccaaagagcacgacacgcatcacatcagaactcgggattggcactgcgctggaacgaggatcgcaattggttttgctgtatgtacctccgttgctctggaggttggtgtggatggcagcggcggttgcggaagcacagtgcctggtcatcgggtcgtcgtgctttccggtccaggccctgttgaggacagctgaagaacaaggcaacatcaacgccaaccatgttattcacgaatcaacgattcaccaatccatcattctgtccactgtcgaaaacgtacagtacagagtacagacagataactgcaactgggaggaagagacagcactggaatgatggttgccgcccggacgtacatgcagtggatggggaagcgaactgcttcgcgttgacaacggcacagaaggcggcggccacctcctcgtcctgaaagtgctc

SEQ ID NO: 2800 - DNA, 360 bp, Zea mays
tacgtacacagctgccaccccaccacaaccaattcaccatacagcgggggggaaatcgtgatggttcactttccaaaccacggaaacgagtttcgtcgtcctacggatttcctcgcggttttggtttgctacgagtacgacagcggaacagatcagaattatcattagttccctgttcttgccccctttattttcagacccctttttttaaaattcccccaagaaccaaccagtctcatctgccgtttgggctcaattgtcaacgatggccactgatgctatcatttgatattcatcacaagctgtcggcttgttgctcgagtccatgcaatctgaatgcgtgtaatcaagctattcggt

SEQ ID NO: 2801 - DNA, 398 bp, Zea mays
tgacttcggcacagtggatgacattttcaaagcttgcccttcaactacagtgtccagttatatcattcagaaaacaacaagaaaggctccattcttttcaggcaaataaaaaccatgcaatttcatggcccatccattagtagattctcttctcaattaatagcaactctttattgaccattttataaacaataacactaatgaacaatctgcacaaacaaattgggatgtgctttcaaactcctcttgtaaaaagtcacaaactcacaatagtaaataggagtaggaagcatggggttattaggtcagtgatcagataaacagatctagggggtatttgaatgcactagagctaatagttagtggctaaaattagttgaaacatccaaacaccctag

SEQ ID NO: 2802 - DNA, 367 bp, Zea mays
tcggggtgggcgcatccaaccgtgccgcgaaggtgaaggcgaaccaccaggccctggcgaaacttctcaaggaggaccacgccgacgcggcggccacactgccagcatggcaggccatcgcgctaagcaacgcgccgaagccggcgcaggaccaggaagcgttcgtttggccctggacgggcgtcctcgcgaacgtcccggccggacaagcccaggagggtggagctacactgatggagcagctagctgagttcaaacccgtgcagatcactgccgtgtgcggtgccgatgggtatgccggctacgtcgttgttctgttcaccaaggattggatcgggttcaagaacgccttggcattccagaactg

SEQ ID NO: 2803 - DNA, 418 bp, Zea mays
  misc_feature (343)..(366): n is a, c, g, or t
gattttagtagatctgtcgaggttgccagcgtcttcatgcttacgagttaggactcaggagatacaacacttgctgaacatccaaagagtacccccacatgctaacaacttcagtgctgcttcataacgatttgaaggagggaacatacggggtaatataaggacaatcgtgccctaaggagcacagaacttgcacttgcctgctatccatgtcgtatgatatcagtttctagtctgagcaatgaacaaaaaagatcaaattccgatctgaatgaatgccaacaatattatagttaagagtgtatttaagatttgttgcttcgaccagctggcaaaggctcannnnnnnnnnnnnnnnnnnnnnnntgtatttaagatttgtagcttcgaccagctggcaaaggctcaggctatgctt

SEQ ID NO: 2804 - DNA, 388 bp, Zea mays
tcgccggtccactttccgtctttcctctggcgctcacgatccttttccctgcgtacgccgagctcacgcaggacaggagggagcggaggagatagacaaacagaaagagcccgtgtgcgtgacgcacggacgccgtgactccgccgcaaagagagggagagtccacgctctgaagaagcaacggcgacgcccccgacgacgagcacagctgcccagcaaactagcagcgccctcgtcagttccgtctcgttcccaacctctcccggattcgattcgattgacccgtccgctccaaatcgaatctaatcagcagttttggagttgcggaagggagaaagagagagagagagagaggagaggggcatggatcaggtgctaaaacaaggtg

SEQ ID NO: 2805 - DNA, 351 bp, Zea mays
ctattgattactatatatttataatgaataagtggaagcaaactaacaaagttatgtacagtaaggcaaaaaggagcaactagaacctaatttatttgaatttgatatcttgtggaaatgtttgcttcatcagtttgtaactttgtataacagtttccagtcccagatttatttatattgaaacatcaatagatgaacattgggggtatagaaacagctgtttttttcttcttcattgacattgctggacgtgtgcttatggtttatgctgcttgatggaatggtgattcccaagagctatatccacgtaccaaattctcttatgaaagcttcacaaacacactcagggtt

SEQ ID NO: 2806 - DNA, 472 bp, Zea mays
gagccagcttctttattggtacgtatccatccatcccttcagcctttttatttagtgtttgaactaactaaattccatggatgacaactttcttctgttgcagggtgtcgagcattgagagcaagtcaagccacccaatggcaaccgcactcgtcgagtacgctcagtccaaatccatccaacccgagccgacaagcgtcactgacttccgtatctaccctggagagggcatatccggagcgataaacggaaggcaaatcttcattgggaacacaaggatcatggcaaggtcctcctgctacgcagcaggagcaggtccggagatggaaggccagcaaggtgcgtcgatcgggcatgtgatcgtcgacggcgaccacgtggcggcgttttcgctctcggacgactgtaggaccggcgcggcagaggcgatccgtgagctgagatcgatgggcatcaggtcggtcatgctgac

SEQ ID NO: 2807 - DNA, 330 bp, Zea mays
gaaaacagacggggcatgtttggctcgctgcctaacttgccacactttgcctaacttttctgcctaaggttagttcttcaattcgaacgactaaccttaggcaaagtgtggcacagttagccacgaaccaaacaggctcctagtgtcaaaggcttccaccacatgagtggggtggtctagggaagggataaaccgaggcaagccttcccctacagatgcggagaggctgcttagaacctgtgacctggtgactcagtgagacactctcactgctgcaccaggcctgcccttgattgatagaatatcaggaccactcaaatttctcatatg

SEQ ID NO: 2808 - DNA, 522 bp, Zea mays
gagtctcgtttgagacaacttactttaaaggtaccttgagtttcttaattttgtgcaccatgacttcaactgttacttttcttggttagatatctggagttaacataaaagcatggttgtattatatttactgaaaaatataatttacttgtggtgtttgttcttctaaaatgcagattgagcgggatactaaaggaattttgcagtgccatccgtacccatgcgagtattcagatcccacaatagagtgtgcacattgtgccttctacatgggcttatcaaggaaagaggggttgaaaaaacgtggtcaacagtttgatatccgtgggacagtagatgaatttatgcgtgaaattggcatgtattcattgtggaagcctgggatggatctggctgtcacccatgttcatagggagcaggtcccatcttatgtatttgagcaaggatacaagaaaccctgccctacaatgcatgcaaaccaacaagagcagtctgatggagatggaacatttagcccatatc

SEQ ID NO: 2809 - DNA, 196 bp, Zea mays
cattccacgtggattgactttgactcgttgaaatccaacccctgcagctgcagcacagcgaccgagccatctccatttgaatttcaaattcccctctcctccctcctctgtctcactcacccaccgcgcaccctggccattcaatttcttccctcctcttccctttctttttttccccagcaccaccaccaccacc

SEQ ID NO: 2810 - DNA, 350 bp, Zea mays
  misc_feature (342)..(344): n is a, c, g, or t
gatgcgactttgcagcgcttctccagcgatgcaaaaacctatctttccgtatagtcgcccaggaatgcgcatgtgcagggtgagctgatgattttggatatcgataccatcccgagctggcatatgtagcacagcaggttgttgccattgtgattcgcggggactgcgtcctgaagaactttggttttgacgccttgtatttgtacggcaatgattgggatgaacatggccggtgagaattttttattttacattttctgtcctcgtttgccacgtgagtgttgtctgattctgatgtaaaacagcaacgagtaaaaaaaaagtataagtggaacctgtaannngggatt

SEQ ID NO: 2811 - DNA, 436 bp, Zea mays
  misc_feature (349)..(357): n is a, c, g, or t
  misc_feature (359)..(363): n is a, c, g, or t
agggcagaaggtatttgtgctatcaccattgtatgatccagtaaaaggggatacggttcagaagcatgtgcaggaggtggagctgcaatacttgtatgagatgctaggacaaggcctgaagccagttgccagcgtgggtgcagggaatgtggttgcaatccagggtcttgggcagcatatattgaagagcgccacattgtcgtccaccaagaattgctggcccttctcgagcatgatgttccaggcgtctccgatgcttaaggttgcaattgagccctcaaatccagctgatttaggagctcttgttaaagggcttaggcttcttaaccgggcagacccatttgttgannnnnnnnngnnnnnagcacaaataccttctgccctgcatgaaggacgccactgaagaccctcgcaaatgccataaagcactcctctg

SEQ ID NO: 2812 - DNA, 571 bp, Zea mays
tgcttctttcctttgaggctgatgcaccagaaaatggtcaaggcctttttagtcctcagttttcagagggcgtaaagaattctcagtcagcccatgcaaagcgccgtggccggccactgaagaaagtgacagaatctactgatgataccgtaacacagccaaataaagaacaggtcagtcttagtttcctttttttctgagagtgtattcatgagcctcagacccacacttatgtttttataatatgaacacaccttttgttcttgttgagcaggatttcctacgatcatcatttgtcacagaaaatacaaatatgatccaagggccatcttctgcctcccatcttgaaggtcctcacatgggagtgcaaggaggcattgatttaatggtacacagtaatttattttgtttgtcactgttattaatactgtatatattttaaaaaatcgtgctgcaaacttacacaggatggaataccaaatctctcatttggtaatcattttggaatggatattaatcaccaacatcaagtacccaaccaccaaaggatgcagcagaacaatttcataca

SEQ ID NO: 2813 - DNA, 464 bp, Zea mays
acagagagtaatgcgaataagcaattctctattacatgttgaccgatgcgaagcaaccaatttgagttgatggatcgcagtccctgccccgctggctgccggtgccgggacgctctcagtcttcgttcagatcgacgatggtcgcccgcattttcatgcatcggaacggaggatccattcaaacaatgcctagaagaatttattatccaatcaaagaaccgtgcttgcttgtctttctttatgttatttcccgccccgaattcagttcggggggtcactgactgcactgtacaagatgataacacgaacaagctatggtattcttgatcatctcagcagcgcgtactcggcccgcggcttggtcttggtgccgcggccgtcgtcgtcgtggagctcgaggccgtagagcacgccggcgcacatctccaggctgccttccttggggaagtagagcctggccatct

SEQ ID NO: 2814 - DNA, 371 bp, Zea mays
ctctggcatcagctgaagcccagcgatcgttatgcgaataggaccttgacatcggtggtctcttcgactcatcgtagtcgcgtgtcgggcggccgctacggtcagcatcaccgccaccgtcatcgttgcatttacgccttccatcaaagctgtggctcctcctgtcccaccccgacctcttggcttccctgtcgtcgtcccaccttgagccacgcccctggtcctcggctccacttccactccgcctccacctcgggccgtcgtcctcgtctctcttcctcccgtaactagagggagctagagtcggaggaggagcgggagcgggagcgggagcggggggctcagggcggtaaatgggattgtgatttggg

SEQ ID NO: 2815 - DNA, 309 bp, Zea mays
caagacaatgtttctaaagatgaggacaacaatagggcttggagcagttctttgcctgtcactgaaggtggtacctggggcaaatcaaaagacgacaactgtgatggagcaggtggtgcaggaggttgggatgcttctgttgccaactggaacaaatcatccgttgtggctgatgcacaggatgagggttggggaaaaggaaattggtcatctgctaagtctgaagaaacaaacaatgaaattggaaattggaacaaagctggagcttcggaccaagctggaccgaaatcttttggtggtgatggttgg

SEQ ID NO: 2816 - DNA, 398 bp, Zea mays
ttgagctgcctgcctcggacagtcggacggacctcggcttctttcttcttgcgtagcgtagtgctgtgccagctgccaggcactgaaaaaaaggcggccgtttccccactatataggttcgaagttctactagcttcgttatatcaggtcaggtgtatttgttgcggaaatggctgcaggtgcttcggtgtttttcctggaagagaactactgtgatgtgatcactctgcaactaatgtttcaagacctgtgcaacccttttgtcaaagaatttcctcggaaggtgatgcagaatagctaaagcctgcgtgcgtgtgtgtgtgtagcagagctcatgtcactgttaaaccctgtggtctagtgcgcacaagtgcaaaacagatgtggtgtgttcatgg

SEQ ID NO: 2817 - DNA, 1333 bp, Zea mays
  misc_feature (496)..(497): n is a, c, g, or t
  misc_feature (508)..(511): n is a, c, g, or t
  misc_feature (725)..(727): n is a, c, g, or t
  misc_feature (750)..(752): n is a, c, g, or t
  misc_feature (756)..(761): n is a, c, g, or t
  misc_feature (763)..(763): n is a, c, g, or t
  misc_feature (765)..(766): n is a, c, g, or t
  misc_feature (791)..(799): n is a, c, g, or t
  misc_feature (817)..(817): n is a, c, g, or t
  misc_feature (824)..(825): n is a, c, g, or t
  misc_feature (831)..(832): n is a, c, g, or t
  misc_feature (839)..(840): n is a, c, g, or t
  misc_feature (847)..(849): n is a, c, g, or t
  misc_feature (856)..(858): n is a, c, g, or t
  misc_feature (860)..(862): n is a, c, g, or t
  misc_feature (864)..(865): n is a, c, g, or t
  misc_feature (870)..(870): n is a, c, g, or t
  misc_feature (874)..(877): n is a, c, g, or t
  misc_feature (881)..(883): n is a, c, g, or t
  misc_feature (889)..(894): n is a, c, g, or t
  misc_feature (900)..(900): n is a, c, g, or t
  misc_feature (902)..(904): n is a, c, g, or t
  misc_feature (906)..(906): n is a, c, g, or t
  misc_feature (909)..(909): n is a, c, g, or t
  misc_feature (923)..(924): n is a, c, g, or t
  misc_feature (927)..(929): n is a, c, g, or t
  misc_feature (933)..(934): n is a, c, g, or t
  misc_feature (936)..(938): n is a, c, g, or t
  misc_feature (945)..(952): n is a, c, g, or t
  misc_feature (960)..(962): n is a, c, g, or t
  misc_feature (967)..(967): n is a, c, g, or t
  misc_feature (969)..(980): n is a, c, g, or t
  misc_feature (982)..(985): n is a, c, g, or t
  misc_feature (989)..(999): n is a, c, g, or t
  misc_feature (1002)..(1002): n is a, c, g, or t
  misc_feature (1005)..(1014): n is a, c, g, or t
  misc_feature (1018)..(1019): n is a, c, g, or t
  misc_feature (1023)..(1028): n is a, c, g, or t
  misc_feature (1030)..(1034): n is a, c, g, or t
  misc_feature (1036)..(1052): n is a, c, g, or t
  misc_feature (1055)..(1055): n is a, c, g, or t
  misc_feature (1059)..(1060): n is a, c, g, or t
  misc_feature (1062)..(1062): n is a, c, g, or t
  misc_feature (1064)..(1068): n is a, c, g, or t
  misc_feature (1070)..(1071): n is a, c, g, or t
  misc_feature (1076)..(1080): n is a, c, g, or t
  misc_feature (1088)..(1107): n is a, c, g, or t
  misc_feature (1109)..(1111): n is a, c, g, or t
  misc_feature (1120)..(1141): n is a, c, g, or t
  misc_feature (1143)..(1145): n is a, c, g, or t
  misc_feature (1148)..(1149): n is a, c, g, or t
  misc_feature (1151)..(1158): n is a, c, g, or t
  misc_feature (1166)..(1172): n is a, c, g, or t
  misc_feature (1174)..(1185): n is a, c, g, or t
  misc_feature (1187)..(1197): n is a, c, g, or t
  misc_feature (1200)..(1204): n is a, c, g, or t
  misc_feature (1208)..(1227): n is a, c, g, or t
  misc_feature (1230)..(1236): n is a, c, g, or t
  misc_feature (1241)..(1250): n is a, c, g, or t
  misc_feature (1268)..(1268): n is a, c, g, or t
  misc_feature (1270)..(1284): n is a, c, g, or t
  misc_feature (1288)..(1289): n is a, c, g, or t
  misc_feature (1291)..(1302): n is a, c, g, or t
  misc_feature (1305)..(1305): n is a, c, g, or t
  misc_feature (1308)..(1321): n is a, c, g, or t
  misc_feature (1324)..(1326): n is a, c, g, or t
cgtcatggacccgcagaaggcagtggacatggtggacgagaacaccatctgtgtcgcggccatcctcggttccacgctgaacggcgagttcgaggacgtgaagctgctcaacgacctgctcaccaagaagaacgcggagacagggtaaatactactggaaatagacaagcaagcaccctcgtaaaatatatatgctggtgcgatgcgatcctcgtgggcctgaactaaaacgtgcatgcagctgggacacgccgatccacgtggacgcggcgagcggcgggttcatcgcgccgttcctgtacccggaactggagtgggacttccggctgccgctcgtgaagagcatcaacgtcagtggacacaagtatggtctggtctacgccggcatcgggtggtgcatctggaggaccaaggcggacctgccggaggagctcatcttccacatcaactacctcggcgccgaccagcccacttcaccctcaacttctccaaaganntctgtggactnnnntatttttgctagagtttgtagttcacaggatgcaaaagtacttggactgagccactgaggaagcaacacctcaaaagaagacataaaagaagattaattgaagagcaacaagtaccaagcgagtccaagacatgaaggaagtgcagccactcgcaaaccatctgcctgagtgcaacggacagtccggtgccacccaacggactgtccggtgcannngggaataggagtcgaacgactannncttnnnnnnantnngaaggaaaaccaacggactatccgnnnnnnnnngtacgtgccaatggtcanattgcanngatcanntccaacnnctatgtnnnccgaacnnngnnntnngactncccnnnngccnnnactggnnnnnnccgttngnnnanagnaaaggggttgtctnnctnnnacgnnannntcaagtnnnnnnnnataccttnnnccttnannnnnnnnnnnnannnnatcnnnnnnnnnnnttnttnnnnnnnnnnggcnncacnnnnnntnnnnngnnnnnnnnnnnnnnnnngcncctnnancnnnnntnntgcannnnntccctatnnnnnnnnnnnnnnnnnnnnannntattacctnnnnnnnnnnnnnnnnnnnnnntnnnctnntnnnnnnnnatcctccnnnnnnntnnnnnnnnnnnngnnnnnnnnnnntcnnnnnctannnnnnnnnnnnnnnnnnnnccnnnnnnnacctnnnnnnnnnnctctccccctcccccccncnnnnnnnnnnnnnnntacnntnnnnnnnnnnnnccngtnnnnnnnnnnnnnntannnccccctc

SEQ ID NO: 2818 - DNA, 442 bp, Zea mays
ttgacgagatgatgccggtggaggaggcggcggcggatgactggtcggagtgcgcgttctcgctgacctgcgaggaagactgcgccgacctcggcaacggcgagctattcccgctctacagtgccggcgacgaggaggaagatgagtacttggagcagctggtgttcaaggagaccagcttctgctcctcctccgactcagctgccgactgcgacggcgatgaagaaggagacgaagaatactcttcgctcacctcagaggagtggttccgccaagctcgcctcgccgccgtcaagtggattcttgaggtgagtcccgatttccttagctctaaccccttcgcggcatcaggctggcacgacatctgattgcgtcgttcgcccattgcagacccgcgggtgcttcggcttcggccaccggacggcgtacctcgccatctcct

SEQ ID NO: 2819 - DNA, 512 bp, Zea mays
tgcggtcaataaggttgcagttcctaaatttgagccaaagaaaggggtgaatattgtgacagatgagaaggctactaacctttctagcgcctcagttgatgatgttgctgttattaatgatcttttggccaaactggaagaatatgccaagggcctgccaccagggttccaaatgaaacctatccaatttgagaaggtaagtattccaaatgaaactcaatttgagaaggttctttgagatggttccccaacatgcacttttcttttattaggattttgtttgttcgagggtcagatggatatgaaaaggccaggtataacatgcgctgctttctttccccaggatgatgatactaattttcacatggatttaatagctgggcttgcaaacatgcgcgcaaggaattacagcattcctgaggttgacaagttgaaggctaagttcatcgccggaaggatcatcccagccatcgcaacttcaacagccatggccacaggtctagtgtgcctgg

SEQ ID NO: 2820 - DNA, 398 bp, Zea mays
ttttgagtcatcgggtcgatctgacgatttgctatgggtgctctgagtactcgacctgggaactgtggggcgcttgtaggcggcgcagagttgggtctcgtcgttgtaatgattccatcggctcgttgcgtagggtttgatctgcctgtcgttttcttttcttttaattaaatttctgatgcacagtcatgtattgatctggtttggtgttcctagatgcgtgtaataaatggggaaaaaaccatgtcgtaataaaatcaatttatttttaataaaaaaaatctgaattctggctctagtgaataaatggatagagcctggctctaattctggtaaaataaaaagacaacgagcttaacttcttaattggtcaattggaagggttctccgatctaatt

SEQ ID NO: 2821 - DNA, 428 bp, Zea mays
tacagctccagcggcgatgggcccgacgtcgtctatggcgtcgccatgtgctacgccgacagccagtgggacgactgccagcagtgcctgcacagggcgctctcgtacgttttcacgcagtgcttgtacagcagaagcgcggcgatcatgtacagcgactgcgtcctgcgctactcccacgatgctttcttctccaacgagacggagtgggggcatgtgttcaacgtatggtctaccgcgttcgtcgacgacgcggccagatggaaccagacccggtggacgatgatgaaccagctcgccgcggaggccgcggtctcgatgccgcggttggcgacagggaacgcaacgtataaagacgacggcacggacatggtgtacgggctgctgcagtgcaggaacgacttgtcggcgggagaatgcagcaactg

SEQ ID NO: 2822 - DNA, 344 bp, Zea mays
tctttcttctttgagaattctctcaacatcctttcatggtacttggccaccccacgattacgagttattcgagcatcacgaatggcccaatgtgcctccaaaagcttcttgcgccactggaaaatggatttcagctgtttctctcttgaagctctctgcatctgctgaacttgccttacaagctcaacacgttggcgttcacattgtctgacaaactttctgtatatcctatctggcattgccatgatttcttgttgttcatgctcaacttcatcccttagacgagcctgatgctctaggagtttgagcttcttttcttcgatctgtagcctcaagacaagatc

SEQ ID NO: 2823 - DNA, 704 bp, Zea mays
  misc_feature (683)..(686): n is a, c, g, or t
ctgaggactctgtaagtatagccataaacttctgttattattttttagtttatacagacctttaaatttcctttttacaatgcaataatatacagttctcttgcgtgtttgaggaaaaactatagtgatatattaatgcttttgcaagaatataaattggcatttgttggttagattagagtggcaatttgatattctagtatttgaccagttgctacatccatgacacaatgattgacacctagctatccacttgcagtgtactctccaataacttattcagtggatcaatacctaaggaattgagtgctcttacaatgttggagatactggatttaagcaacaacaacttgagtggggaagttccacaagagattgcagaaatgcaatcacttaggcagttgtaggtttctgagtgattaattttgtgaaagttttcatcagcaataagtacaatgtcattatattttgtcgcttctgcagattgctttccaataactgctttcagtggcctctgacccaacattcctatgggaactacgatcaggaaaatgatttcaatatttatgataatcttgggaggggtaatatgaatcgaagagctgagaatgggtaagagaaaaaaatagttctataaatttccttctaagttatcacccatttttcttcttttttggaaattnnnnattatatgcagatcctga

SEQ ID NO: 2824 - DNA, 1136 bp, Zea mays
  misc_feature (792)..(793): n is a, c, g, or t
  misc_feature (955)..(957): n is a, c, g, or t
  misc_feature (1007)..(1008): n is a, c, g, or t
  misc_feature (1012)..(1016): n is a, c, g, or t
  misc_feature (1018)..(1018): n is a, c, g, or t
  misc_feature (1020)..(1026): n is a, c, g, or t
  misc_feature (1028)..(1028): n is a, c, g, or t
  misc_feature (1030)..(1030): n is a, c, g, or t
  misc_feature (1032)..(1032): n is a, c, g, or t
  misc_feature (1034)..(1034): n is a, c, g, or t
  misc_feature (1036)..(1038): n is a, c, g, or t
  misc_feature (1040)..(1041): n is a, c, g, or t
  misc_feature (1045)..(1048): n is a, c, g, or t
  misc_feature (1057)..(1059): n is a, c, g, or t
  misc_feature (1086)..(1092): n is a, c, g, or t
  misc_feature (1103)..(1112): n is a, c, g, or t
  misc_feature (1120)..(1129): n is a, c, g, or t
gatagtttatttgcagcctgcgctttatggtactccaataagggacctgtacttctgaactatcttaggaatgggtgattgtcacttattataagactcatgcagtttcagggtaacttcaagtgtgccattaccaaacctttcagtgtaattactgccaaaagtttattccattaggcaataccatgctattctcacaggtttacatctttactttccttttcagttgccagttttataaagatatctgttcaaagttagaaaatgaatttaggcgatctttggagagtgaggtagccttttctctgtcgtctatgattttctccttacttgatcattgacattttttaatttacaatttaataactcactgcaaaggtcagtgatatgcatggagaagatgctataactcccttgccttggtatccatgcagtcttgcatggcacctgaatttctcccggaaggaattgaggaaaaatcaggcactcgaaaggtaattaattgtagcatggtgtttaagtcttgccatgacatgaatcttgcttggtctatgtagcgtaaatacgagacacttttgcctttgcattagtgaatatatggtagggatttggggtggggtggagatgtctgagatggtcttgaagtgggcttcaaactgagttgtattgggtcagaagaatcaggatatccaataagcatcagatactggtactgcagattggtagagcatctgattaaacaggaaatatctgttccacatttatgttattaaaatttatctaatttcaggnnaaattggcttatgtagtattggcttttatgagcagttagttttcccaaaagcttaaattgttatggggaagtcggctatatatttcttctactttcaaagtattattattattctgaacaattaatttctgtttctatattgatgtgctatcgattaatctnnnctattgatgctatattgtccccgaggaggagggctccccgccgcgggggnngtgnnnnncntnnnnnnncngngngngnnncnnttannnnagcggcggnnnccgctctgggagatgacgccgcggggnnnnnnnatataattcgnnnnnnnnnnggaggagnnnnnnnnnntgtcgtc

SEQ ID NO: 2825 - DNA, 380 bp, Zea mays
aatcaatctattggtttcgacgagatatgtggtggtgaattcggcgggtcttgagaggggaaagggatttttaaaaaaaaaaccctgaaattttgtcagcggttccttggcctggctgcccgctttaataatggccgcgcggctggttggcttgccccaggccagatgcattgctcaggaggcaggagcgcttgggccgtgcgagctgcgggatttgggagatgcgtgcagttgaatgcgtgggattcgccgtgatttgtttatgctgatcgccctctcctcccgacccgtgctccctccgcgtccgctctctccctttttctcgtccccagttgccgccgagccaattcagcgccgctttactgttatataagccgcgc

SEQ ID NO: 2826 - DNA, 380 bp, Zea mays
  misc_feature (37)..(37): n is a, c, g, or t
  misc_feature (61)..(61): n is a, c, g, or t
  misc_feature (68)..(73): n is a, c, g, or t
  misc_feature (85)..(85): n is a, c, g, or t
  misc_feature (186)..(186): n is a, c, g, or t
  misc_feature (248)..(248): n is a, c, g, or t
aatcaatctattggtttcgacgagatatgtggtggtnaattcggcgggtcttgagaggggnaagggannnnnnaaaaaaaaaccntgaaattttgtcagcggttccttggcctggctgcccgctttaataatggccgcgcggctggttggcttgccccaggccagatgcattgctcaggaggcagnagcgcttgggccgtgcgagctgcgggatttgggagatgcgtgcagttgaatgcgtgggattngccgtgatttgtttatgctgatcgccctctcctcccgacccgtgctccctccgcgtccgctctctccctttttctcgtccccagttgccgccgagccaattcagcgccgctttactgttatataagccgcgc

SEQ ID NO: 2827 - DNA, 379 bp, Zea mays
ttgggagtgttttcgaggaaccacagttgcccaatattgatcctcctgctggtaaagatgcaagagaagttgaagaagtcgaaatgacgatgagggatggtaattatcgagatgctggcacagatgcatttggtgataagaatgaggcatctggaactcacagttcagatggtaataacgcgaaggtcaagagcaaggatgattctgctgacaagctggtttcttgtcacgatgagctgcgaccagttgtgacgcttgtgacctattcagactcggaagatggtgaaacgctctaggttaactgagcaacggattgcgtaggtggaggtacttgtaaactgccagcagaaatgatgccagcatgaatggatgcccatga

SEQ ID NO: 2828 - DNA, 352 bp, Zea mays
cgcctctagtcgatgtaaagccgaagagaagtgaagatttgacacagagggaggctaaactagggctaaactggaactactcataatgcataaggtaaaaacgttaagtagatttgatttgatcgattgtggggttcaatcgcccgtagcccttcatctatataaatgggaggtctggacccgttataagtcggttcacgagttaatctcgcagatttagctaacaaatcccgcaaaaaaatcgaaaccataactgattctgcgcacgcgcgaatcgtccgtgccaccaccgcataccgttcggaccgttcggcctacatgccagacagtccgtctccccaaaagtgggctc

SEQ ID NO: 2829 - DNA, 773 bp, Zea mays
aagcccaacaacgactcatagacaatctgcctgatgagtttgcaaaggtatgtattttttggttcttaacttctctagtcagatgtccttgcttatgttaggaacttaggatggaagcttttctctataagatgttctcttaccacatatgtttttttttgctttgttggcgtatcatggcctcgtggcttgtttcacctaatcagcttgtaccttaagtttcgactattttactacttttggtcattctaaaatagtgacagtaagagacggttaattttatggatggtgtgaattatgggctcttcctgtttcatttcagttatacagttctctcttcttttactggatgacatgtgaagctttcccttacatatcctttccatatgattttcatgctctaagcaacaactgctgtctggtggaataggtgcaacgggaataccatcttccgtcgggagattttccttatgtggagcacttcaaagaggtcttgagcgggtacagctttgacaagtttgagaaggtgaagcccaagatgatacaggccgtggatgatatgcttggatatgacattcctgaacttctcaagaacttcagaaacccatacgagtgaacccatacaggcggttgaaagatgacttcgatctgcaacagaatgagggattgattgtcaggcgatgtgaatcatagtggtcaatgtctcttggggcgttcattgccatccatgcttagccattgttatataactttatgcataagaatcatagagc

SEQ ID NO: 2830 - DNA, 471 bp, Zea mays
  misc_feature (329)..(329): n is a, c, g, or t
  misc_feature (331)..(331): n is a, c, g, or t
  misc_feature (338)..(341): n is a, c, g, or t
  misc_feature (346)..(351): n is a, c, g, or t
  misc_feature (400)..(400): n is a, c, g, or t
  misc_feature (402)..(402): n is a, c, g, or t
aattacaggttcttttgatggcaacttgaagattcttgagttgagaagaaatattggagaactggaagagatcctggtggcagagaagactgactttatggttaagtagttttgagtttctttgtataatgttttattcaattgtccactgtcctatgcatgtctgcacaaataaaatttctatagtgaagctgttctctgattatttgagtttttatctcccaggagtcattaaagaatctactgaaaacagatatgagaaaggaacagccgttcattgatattcttgatgtcaacaaactaaggaggcacttattatttctgtgatntngtcgatnnnncacannnnnnccaccgaacagggaatgctgggattactaacacactgtgccaatcaacnantttcaaatcaacagtacatatatctgagtaagaataatcaaaaacaataacctgtaatcatcatccaca

SEQ ID NO: 2831 - DNA, 391 bp, Zea mays
  misc_feature (381)..(387): n is a, c, g, or t
ctgaactacaaaatgaaagaagcaaatatcatgaaacaggcgctgtgaataacactagtgctgggtcactcagatcacaagcaaggaggtattcgactgcagcgagttttattggtgtccaaggaccaaagaaagaagtcacttctgagttaccgagtctggataagttcttggtgaagcatctttcaaaacttgaaagagaagttcaggaagcaagagaagcaagcagaaaatccacattagtaaagtctgtcacacaaggtgcccacatccaatttacaggcagcaatgcaaagacaccagaatcaacttcagaactcagcagcattctggtgaagcatgtgtctaagcttgagaaggaaatcctggaagcaaagaagnnnnnnnaaag

SEQ ID NO: 2832 - DNA, 388 bp, Zea mays
cagtttctcaacctcagctcaaatagattatctggtttactggataaggatctatgtccgcattgtatgactgtattcgatgtcagcggaaatgaactttcaggatcaattccagcatgtgtgaataaagtctgtacttctcagctaatgctggatgaaatgtcatccagttattcttcattcctcatgtccaaaactctacaagaactgccatcagttttttgcaactccggggagtgttctgttgtgtatcataattttgcaaagaacaaccttgaaggtcaccttacatccttgccatttagtgctgacaggtttggaaacaagacgtcatatgtgtttgtcgttgatcacaataatttcagtggatcgttggattcaattctgt

SEQ ID NO: 2833 - DNA, 393 bp, Zea mays
tgtacacgctaagtctaacaatggcattgggggtcagttgatgtaggtaaattttgaacttcttcaaaacatcaccgatcatctcataaaggggaatcaaagtcctaccttgaagaagcttttcaagactacgacttcatcctcttttggttctagaatcacctcctctccagcaaaacgaaccagttcgtcatcatcctctccaaagtatcctagtgttgggggccttcggcttccgaaggtcctcaaaaacataatttgacaatgttttccaagtatgcgagcaggtatcttcggaatcaggttgcgggtatacaaaagcatggtcaagacgaagcttgactgaaatggaagacgatcgtgacgaaggatgaaacgatcacgaagctatgt

SEQ ID NO: 2834 - DNA, 350 bp, Zea mays
  misc_feature (342)..(345): n is a, c, g, or t
gtatatgtgcacataccgctgtaagatatatgtactgtgaaaaggaattagactctcgttattccaatagagtactgcacttagttggaattttcaagtctcctagtgtcttgggaattgtacttatatagttcacctttagaaaattcaagggaacacaattaaaaattcctaaggtagctatctagagagctagattattctgtgaggaggcttaactatagaaacaagacatacattagatgcaaagtacttgacatcgagttagtttattaattaggtgaatatcagatcacaagattgttaatcccaagcgtgctgcagatacatacctcattgagnnnngcaca

SEQ ID NO: 2835 - DNA, 659 bp, Zea mays
tagcgacggaacggaaactcggaaaggcaccccatgcgcgttggatggaggagccctggagagtggagatggtgtttataaatccgctcctcctgccaccccaaggtttcagaaacccaccaccgcaacacctgcgctccgcggcctgctctctctttcaaacagcttcgtgtgtcgttgcgccgcgcatagttccagcgccagctcggcactgaagaatctggtgaccggccgggatcgagagccaagctcgagcaggaacggagagcgcgcggatatatatatagctagaatgatgatgatgatggacaggcagctcgtcaggcaatgcgacatggaggtcatgaggatggccatgctcaagcacgaagagaccttccggcagcaggtaaagcgcgcgccgacaaacttcggcttcttcttcttctttctcctgctgtccttcacaccgtcgctacttgtctaatatatttcacacatcatcctgcaaaggaagtgtatgaagcaagtatgaagtagaaactgctgctgctactgatcgatcgtggaatggattatcgccattgttcttggcaactaaccgtcttatcgtctgatcaggtccacgagctgcaccgcctgtaccgcatacagagggagctgatgagcgacctaataac

SEQ ID NO: 2836 - DNA, 1094 bp, Zea mays
  misc_feature (53)..(54): n is a, c, g, or t
  misc_feature (1033)..(1033): n is a, c, g, or t
  misc_feature (1084)..(1085): n is a, c, g, or t
tcttcgacatcgtgctcatggacctcgtcgcgcgcatcgagccgctcttcganncctttccagaccaggatctacaacctcaagtcgtccatttgcttgaggaatctcaacccatctggtaatagattatttcttttggacaaggtgacaatgctcgaaccaagttagactgtacattgtgtgatctgatttgtgatttcgtgttcgttgcagatattgagaagatggtatccatcaagggtatgataattagatgcagctcggtcataccggagctcaaggaggctgtgttccgctgcctggtttgtggtttctactcagagcccgtcatggttgatagaggtatggtgctaatagacatcttgatcatgcaactctgacccgtgatctcatttcaatgaattccgaaatatacgccacgtcaaaataagagcgccagtttggaaattcaacccccctgagaaaattagggggatttgagtttccaaagtagtccttgggtctttttggttataagggtttcccttgaatccccttctaaccaaacaagccttaatgtttggttggtccccacacagcttttcccagtgcaaggtgctcttcgaggcttccgattttgggtaaatgggggctcagattgttgtgcagtgtctgagctgcttgggaggccatgacccatgagccaagcctctaatgcccttcaaagaataatcacacatctttggccttgtttttttttatcttgaaggactagctgcttcgaaatgcatacaatccagcagtatatgatacaatgtatattcaacaccgtagctgatagaaagatatgcatgccatagtggaccatttaagtttgtctgtttgtattgtttttatcaatgtaaaactaatataatgtgtattgcctttctcaggaagagtaactgaaccacacatttgtcagaaagaacaatgtaaagccacaaattctatgaccctagtgcacaacagatgcaggtagctacacctacttgttgtcatttttgtctttaanagtactcttaacagaataaaaatcacgttgaatttaacattgtttttacannaccagattt

SEQ ID NO: 2837 - DNA, 429 bp, Zea mays
tcgataactcgcaggggcaaagaggacgaacacttactccatctctcaaaggtcaaagcccctcgccggcctaacaaaaataggacacacctgatactcttggtcttgggaggaagaggacgagcaaagctaaacgaactcaccaaactagcttgctactagcagtagcagcacactgctgaagtatcacttggtgacgtgacgtcagagtagcttgtagccgatgacccggacgttggccggcgtcccgtgctggacgtacacgaacctgaggctcttacctgcgcgcaacgccggtagccacttgggcgggacgtacccgtagcgcgccttgtcgaggccccagagccggccacggagctccgagacgccgaggtggagctcccggacggtcttcctcgacctgtttgtcagcgtcaccgagtagcg

SEQ ID NO: 2838 - DNA, 487 bp, Zea mays
agaccaagaatgcagccccctgtttcactcgaggtaacgcaacgctaccatgatatccttttacctggccattgtccgctggtatagcccccgagccttaatctgctatgcccacatcctgtttgatagaacgccaagaccagcggcatcatcggttgggagctgttcttttccaaggcaggaagggcagggcgcagcggccggcctcgcttgatttcggctgccctggtgttgccagatcctcgacgcattctccggggttcccggccgccggcgtcgcggtggtgaacaaggggatgggcgtatcgtatccgtcacacagtaggccggacgtgctgtctagtccggggacaccgagctgcaatcggcgtgggatggcaggcgttggctaccagcagggtcctcgttcagaaagagtgatcccgccttggaccggccatacaagccattctgggagcggcatggtgttaccttacagcactgggac

SEQ ID NO: 2839 - DNA, 608 bp, Zea mays
tgatctcatgctgggagaagaggacctgcttatatcagggattatttgtgttgccacatccttcctcacaattacaggggcactgctaatgtcaaacagccaaagtctttttagctttcaatttgcccatctgcacaagcagaaaacaataattcaaaagaatattaatgtcccttgagaaattgagcaaacaaaaatacaaaataaggtcaaatgcactgtgtgctaaataacattagaatgaagctgattatcaatatttaagccctctaaaactacctaggtcaataggggattctgctacattaactgtagatgaattcaagaatcaatgctttatcatgaacatttattaacagtactccgatgctaacaaaaacataaagaaagaatatatataatgcttaagcacattaagcctgtaccttgtactgattcatggaaccatcaacaccaacactaaggttggttggtttgtccgtattcatgtagcaatttcctgagcttcacttgtaactgttatttcgcctgtaagcctagaatatattgcagaaccaggacggcaattctgttcctccatgaatgatagcagacgggagcagtcagca

SEQ ID NO: 2840 - DNA, 1184 bp, Zea mays
  misc_feature (770)..(771): n is a, c, g, or t
  misc_feature (774)..(777): n is a, c, g, or t
  misc_feature (781)..(783): n is a, c, g, or t
  misc_feature (786)..(787): n is a, c, g, or t
  misc_feature (801)..(805): n is a, c, g, or t
  misc_feature (808)..(815): n is a, c, g, or t
  misc_feature (817)..(819): n is a, c, g, or t
  misc_feature (822)..(822): n is a, c, g, or t
  misc_feature (829)..(829): n is a, c, g, or t
  misc_feature (837)..(840): n is a, c, g, or t
  misc_feature (843)..(849): n is a, c, g, or t
  misc_feature (852)..(852): n is a, c, g, or t
  misc_feature (854)..(860): n is a, c, g, or t
  misc_feature (866)..(871): n is a, c, g, or t
  misc_feature (873)..(873): n is a, c, g, or t
  misc_feature (875)..(898): n is a, c, g, or t
  misc_feature (900)..(921): n is a, c, g, or t
  misc_feature (923)..(931): n is a, c, g, or t
  misc_feature (933)..(965): n is a, c, g, or t
  misc_feature (968)..(983): n is a, c, g, or t
  misc_feature (986)..(999): n is a, c, g, or t
  misc_feature (1001)..(1004): n is a, c, g, or t
  misc_feature (1006)..(1013): n is a, c, g, or t
  misc_feature (1015)..(1047): n is a, c, g, or t
  misc_feature (1049)..(1084): n is a, c, g, or t
  misc_feature (1086)..(1088): n is a, c, g, or t
  misc_feature (1090)..(1090): n is a, c, g, or t
  misc_feature (1094)..(1094): n is a, c, g, or t
  misc_feature (1097)..(1098): n is a, c, g, or t
  misc_feature (1100)..(1145): n is a, c, g, or t
  misc_feature (1153)..(1155): n is a, c, g, or t
  misc_feature (1157)..(1157): n is a, c, g, or t
  misc_feature (1159)..(1178): n is a, c, g, or t
gattttcttgttgttgtcctgtgcagctcgatggcttgttggcgatggtgcagcctgtcctctccaatgatcccaccgtacagttgatgccttgcatcgtctgatccctaggttgtgtggtatgtttgactctgcaaataacataccactggcactgaacatcaaccctaaaaaatatttaaaggtctgtgttgcctcttggtttatctcaatgtcacatgttttgcattctctgtggtctgtacttcataagttagtctatttatttcgtgtgattgtacagacaccattctctgcatgccaacatctagctgatgaagcaccctcattaccaagtgagcaaaaagagctcaggctttacaagcaacatgttgatagtctgcaccaattggcatgtaagttctggtagtcttcaatgaactgagaacaatagatagcacatacttgactttcaaatgtggcattgttcttttgatattttggcttctgaatctacagtcgtacatgtacatttgtatttgcatatcttaagaatttcatgttatgacaataaattgagatattaatgttgtcagctttcactttataatttcagcaaaaaatatgatagcctgagaaatattcaagtcatctagctgacgaagcatatcctcattactaagggagcaaaaagaactcaagctttacaagcaacatgttgatgttcttttgttgagattggtttaagtgctgtcttggttttcgttcttctttctgactactctcaaccnnaannnngtgnnnatnngatgcttgattacnnnnncannnnnnnntnnngtnacagttngttgttannnntgnnnnnnnttnannnnnnnttttcnnnnnntnannnnnnnnnnnnnnnnnnnnnnnntnnnnnnnnnnnnnnnnnnnnnntnnnnnnnnntnnnnnnnnnnnnnnnnnnnnnnnnnnnnnnnnnaannnnnnnnnnnnnnnnaannnnnnnnnnnnnnannnntnnnnnnnntnnnnnnnnnnnnnnnnnnnnnnnnnnnnnnnnnannnnnnnnnnnnnnnnnnnnnnnnnnnnnnnnnnnnannntntttnttnntnnnnnnnnnnnnnnnnnnnnnnnnnnnnnnnnnnnnnnnnnnnnnnaaaaaaannnancnnnnnnnnnnnnnnnnnnnnagaaaa

SEQ ID NO: 2841 - DNA, 358 bp, Zea mays
ttttctcaaacaaaatgcaaaaacttatttgtacgtgatgccttagccactagacagtcccagggcaggaagccggactcgctgtagtaacactacttctggtagatcttcacgtccggattgcgcatcggcttgagccacatgtcagccatcaccctcgacgacatgctccacagcacttcattcccggccttcccggacaccgcggctcggttcttcctgccggcggccttgcccagcccgtaggcgacgagccagtgcatcgccgtaagccgctgcttctcgccgtcccacatattgcgccggtcgggcgacttcagccgcaggcctccgaggtgcaggttcgctaccttgaact

SEQ ID NO: 2842 - DNA, 259 bp, Zea mays
  misc_feature (233)..(247): n is a, c, g, or t
cacgacgagaaggaaagaaacccctgctggtttctgagcactcggaagcaaagcgagtgcaccacactctcggtgtcgttctgtgtaattttttctctctctctgccactgctcccttcccgtcccgtcccgtcccgtccctgaaaaatattccgtgaggtttaggctcgatcacaaatggagatcttgatccgcggcaaggaatccttgtcggtctctgttttttttttcannnnnnnnnnnnnnntccctttttttg

SEQ ID NO: 2843 - DNA, 394 bp, Zea mays
tgactgcagaagaacttgcctccaaagaactctcagagtggcggctggctaaagctgaggagtttgcacagatggttgtccttccgaatatggaggttgacccaaggagtttggttagaaaaactcacaagggagagttccaagttgaagtcgaagaaccagatggaactgaaatgtatatttataatgaaagcaacaacttagaggtaacattattaggagtttttcagagtatggtgagaatgtttgtttgttcaaatgagcagttatggtgtcatgattctccaggacacttcaagagtctttggaggtggggataaagaaagcaacaacagtgaggaaccggatcccaagccggctgtggagatggaagacctaaaccaaggcaatgatc

SEQ ID NO: 2844 - DNA, 379 bp, Zea mays
cgctgcgatccttttgataaatagggtctactcattgctcgtgcatgacaattcatccatcaggactgttatccctgaaagcataatgtctatagaggtagtagacacgacgacgaagatctattggtcttgtctcaggtggtgctgtgtcgagagatgccccagtttggacagtgtcttcgccactaactacgatgctgtctgctttaatgctctagagaccttctgggcagctgatctcttggtggcccgatgtatctggagtaaaggaagaacaactaatgtgaaggacaccgaatccttcgctaaactgcaggctatacatctccactcctgtcctaggctggcatttgtcctcccactatcgtggttctacacc

SEQ ID NO: 2845 - DNA, 1083 bp, Zea mays
  misc_feature (993)..(993): n is a, c, g, or t
tgtctacttactggtatacagtatactgggcaaactaactgaacatatttctgatcgtgataggcctggagaagatctatggattctactcccatcatgacacaaatcattccacaaattatgaacccagagaaagcgtactcgttccgcacaatcctgataacacacaagaagcgtatgttgatccatatgattcagatatgactccaagcctcctggaggctttgcactggtcaactatggacataaggtatccaaataatgagtaatctaaatcattttgtttcttgaaaaggttacagtaacagtttatgtgtatatttagaatcttaactcggcaagcaatgtgtagttgtatactaccttgtagtcttgcgattaccatgtagtatcattgaagtaatttatgcaactttactttccctaaggactccgtgagctgttcatttcttttttctcgaatgaaacattatattggaagtatgcaactatgaatgccctcatcatccaaggttctagtcctctttggctccaaaatgggtggctttctgtgctttaatattaattaataaaatgtactttcatgttaaccaggttttacccaacaaacctctctcatagtcatatggttatagtcacaagtgccttatgtaatcaaactattgatgtggtgccttgtgttttccccagcattcaccttattgaatccatgatgcttttttggcactgcatgcctataccattgaatacactaaatatgagcaaacaggagtgccctagtattgtattgttgttctatgttccctatacgctgttgctgtagtgacatgtcatttccttgctgccttatgacatatctcatgagatcaagggtatttaagttcatcgtgtatgataagtctaagatgaaatgtcttaaaggtcctcatatttgataaatattcatggatggtttaccaaaggcagtgtggtttaatacagccatctattttntaatccagtctttttttgccaacagtggtgcagagtatagagggaaggaggtaccacttcttgtggtccctacaaggtatctcctcaagc

SEQ ID NO: 2846 - DNA, 379 bp, Zea mays
tcagcagttcaacagcttttaacagatcagtatatgttggttttggaggaagtgattaggaagaagaaacgatggaccacaatggtaagtgctcaccgttcgtaaatatatgacaccgttgatttttttaaaaaaaatttaatcactcgttttattaaaaaaataatgagttatcatttatttttatatgatttagtttgtgcttgacttaaaatttttacattttagaataaatattttgaataagatgagtcgtcaaagttttcaaaaaaaatcaatagtgttatatatttatgaacggaggtagtactcacttcggactgaattattgtggaaagaccatgaggatgtccggaaagtcacagtcatgcttcagtat

SEQ ID NO: 2847 - DNA, 441 bp, Zea mays
gaatcgttggagttgagccaggtcatatatggttttctttttgtcaaacttttacttgcaaatttgcagcttaccagtcgatctttatctttatctgaatatctgtaagaacaggcgaaacatatcgcttccgcgtccacaacgttggcgtctcaacaagcctcaacttcaggatccagaaccacaacatgcgtctggtggagaccgaagggacctacaccaaccagcagaactacaccgacctggacatccacgtgggacagtcctactctttcttggtgaccatggatcagaacgcgagcaccgactactacattgtggcgagcccgaggttcgtaggcaatcctcgatggcacgaagtggctggtgtggccgtccttcagtactccaactccaagggtagggcttctggcagcctccctgatgctccagatgatcact

SEQ ID NO: 2848 - DNA, 591 bp, Zea mays
atttgcagcaggttagacatgtcgtcgtcgtcgtcgtcaatgctacgccttcctccatgccgtcccgcagtccatccaggtgccaaactttcctcctcctcctccattcacggagcattttcctgtgcgttgtactgcttcacttttgcctgggaatttcgcacgtagtttggtagagagctggcgggcgtcgtctttgcacggctgaggacatgacaaggtaatctgcatgaaacagtgtgtaggggtgctggatcatcaggagggagcagtagcacgcacccactccgatcaagctcaagatcaaggccgtcgtcgctcaccgctgcgtgcgctctcaagacgccctcgaatggcggatcgagggggaaggcgaaggtcaaccccagggacctcttcaccttctcccacaagttcagcaccgacatcccgatgagcgaaacgcaaggggtaggttgctgctgcaagtgctcaaggatcggccggcttggggggttttttctctgcacatcgcagatgatctgatcccacggagccgtctctgtctctgcactgtgcaggcgtccatcgatgagtacctgcggaacagtc

SEQ ID NO: 2849 - DNA, 349 bp, Zea mays
ccaatgcatctgatttgctggacactgagtggccaggtcattattcacaagtttgcttggactacggcagtcagtgagagttcagttgcacttgtgattgatggttctcatgttcttgttactcctcttattttgggcctcatgccacctcccatgtctctgttccaccttgcatttccttgcgctgtgaatgaggtttcttttgtgaccaataactcgaagagccatttggctgcttatctctcaaatggcagcctgtctgttgtggaacttccagcacctgatacctgggaagaatttgaaggcaatgggataagtgttgatccttgctgttctgacttcaaattct

SEQ ID NO: 2850 - DNA, 361 bp, Zea mays
tcgcaagatccatccgcaggtgtcggcggcccgcggcccgcgcgaaagatggcgcctttcccaggctccccgggggtttgtcatcgtttcttggcccctatctaaagcggcggtttccagggagctgccgtccccgcccaattcagctgaggtggcggcaagtgggtttagggctcgattcagtgtgttgggtcgtgtctgactctgacccggtggggagcggtggttcttggctagttcttgagctggttgcggcgcttatccctcctcctggagttgttggattggcttgggggaagcagattcttgccaccgagggtccagcctagcgagctgctgcttcggttatcgtagaggagtt

SEQ ID NO: 2851 - DNA, 353 bp, Zea mays
attggatgtttttcagacacagttcagagtgcttgggactcagttttgaatgagacgtgccctttcaaaccatctatctgaaattaaagaagacaactcaaaggctagttggatggagcgataaacaagtgggacatataaggtctcagttggcattggctaaagaaatccttcacaggctggagattgaggggggtggaagaaccttatcaccggctcaaatctagttgaagaacaaggtaaaaaagcattcattaccattatcttccttgaaatgaaccatggcccggttgagaattgagatcaagaatctcatggctcaaggaggggggtgcaaattcaaagctcttcca

SEQ ID NO: 2852 - DNA, 461 bp, Zea mays
acgcggcttgttcttattgaatccatcaaggacgcaggaaagataggatcttcggctccgattctcggagcaacagcgcgaccgcagcgggttttggtgcttcctttctttagggttgtgtccttgcagaagttgctctgtggaatggggacctgtcggaggagagttctgggggtatggtttttcttctggttcttgttgacacttgagcagtgcacatccctgaatcgtgaaggtatctatcgtgttgtggtttgaatcgcttgcgtggatggttgttgcccgacctttgtttttgactctgtttagggttgtttctttgctgaactgcaggtgctgctctgctgagatttaaggcggcgatcgaggcagacccatatggtgctttgttggactggaatcaagagagtttgagcccctgtacttggtttggtgtggaatgctccgatgatggactagtc

SEQ ID NO: 2853 - DNA, 230 bp, Zea mays
caagttaaagacaatacatatgcacatatgtagagtagagttagaaacaaggtaaatagagaacatgagttgggttcaaaaagcatcataattcaggttataccataagaaatatttataacaagtgtcttggcctctgaacctacaccagagctggatgcatgttcaattactcgaccgcttccagtagagatggccattttccagcggtttaatgaatgtgtgtttga

SEQ ID NO: 2854 - DNA, 401 bp, Zea mays
gcgacccgttgcgctcacgcgctccgtggccttccaggaggggtcttgattcttcttcaagtacatccatcagcagcagcaggaatttcctcatgcagcgttccttctcatctgaacttctgaactgaacatgagctgatcagcctgacagtacgtactgaattttgtttttatataaatcatcataggattgtaatatctatctatatgctgagtgggaaacttagctagcgtatgtgtaagtggacttgtaatataggcggcacgcaggatgtacatagaattaattagctatatgggtttgagaaataaagaccaggagatcaataagaggtccctgggtgtagataaataacattaggggaaggaatgtattgcttcaggtatttcactcttcagca

SEQ ID NO: 2855 - DNA, 500 bp, Zea mays
gcgatgatgttgaagaatatcctggtgaaatacattacagttctagtcgcatagtcctaaaccttcatcgcagggctttatctctgaaggttgttaacaaggcagacagacccattcaggtgagcacgcctgggtatttttgtttggaccctggtgcaaacctgcaaagactttgtttcctacttatccttttgctgccaaaataaaaaaaaatgtaagttttttttgttaattttctaaagaggagataggtggcttactcatttgttgaaaattgaaattgcatcccgaatagttaaattcagtcttaatcaatgccatgttggcatcccttctggttaatgttttaacaccccataccacttgtggcgagacatgtttttgaactggcagacatgtaatactgttgttaatactaataaatccagagaacatttgccctgttccaccatgttatgttgaacttgtacgcgtgtttcaaactacgtgtaggtgatggt

SEQ ID NO: 2856 - DNA, 380 bp, Zea mays
cgccgtcgtcccacgggtgtcccccggcgccgccccatgggccgaccttgatcagcttctttttcgacaccaccatcttcctctgcgattgctgctgccccaaaaaaaaagacatgcagtttttttttaaattcagacattccccatttcggaaatcctgtatgctttcaaccacacgccctagttagttcctctcttttcaaaccaatgaaagaacgaaagaaaaaaagtttcagcagtttatgtctgaacagagaggcatgcgagaaagacgcgaaattcctaacggcgcgcaggaacaaaaagcaaacgaacagaacactagtgaagtccatgtgtgcaccatgtttccttcccttccaggggggtcttgagagaat

SEQ ID NO: 2857 - DNA, 1460 bp, Zea mays
  misc_feature (362)..(362): n is a, c, g, or t
  misc_feature (374)..(376): n is a, c, g, or t
  misc_feature (476)..(476): n is a, c, g, or t
  misc_feature (554)..(557): n is a, c, g, or t
  misc_feature (559)..(559): n is a, c, g, or t
  misc_feature (561)..(561): n is a, c, g, or t
  misc_feature (563)..(563): n is a, c, g, or t
  misc_feature (569)..(572): n is a, c, g, or t
  misc_feature (577)..(578): n is a, c, g, or t
  misc_feature (587)..(588): n is a, c, g, or t
  misc_feature (598)..(598): n is a, c, g, or t
  misc_feature (607)..(611): n is a, c, g, or t
  misc_feature (636)..(639): n is a, c, g, or t
  misc_feature (645)..(649): n is a, c, g, or t
  misc_feature (657)..(661): n is a, c, g, or t
  misc_feature (684)..(693): n is a, c, g, or t
  misc_feature (695)..(708): n is a, c, g, or t
  misc_feature (711)..(711): n is a, c, g, or t
  misc_feature (714)..(718): n is a, c, g, or t
  misc_feature (721)..(731): n is a, c, g, or t
  misc_feature (733)..(735): n is a, c, g, or t
  misc_feature (740)..(745): n is a, c, g, or t
  misc_feature (750)..(752): n is a, c, g, or t
  misc_feature (755)..(762): n is a, c, g, or t
  misc_feature (769)..(787): n is a, c, g, or t
  misc_feature (789)..(792): n is a, c, g, or t
  misc_feature (794)..(795): n is a, c, g, or t
  misc_feature (799)..(804): n is a, c, g, or t
  misc_feature (806)..(806): n is a, c, g, or t
  misc_feature (808)..(823): n is a, c, g, or t
  misc_feature (840)..(851): n is a, c, g, or t
  misc_feature (853)..(870): n is a, c, g, or t
  misc_feature (874)..(876): n is a, c, g, or t
  misc_feature (878)..(878): n is a, c, g, or t
  misc_feature (880)..(890): n is a, c, g, or t
  misc_feature (892)..(894): n is a, c, g, or t
  misc_feature (898)..(900): n is a, c, g, or t
  misc_feature (904)..(906): n is a, c, g, or t
  misc_feature (910)..(923): n is a, c, g, or t
  misc_feature (928)..(944): n is a, c, g, or t
  misc_feature (948)..(950): n is a, c, g, or t
  misc_feature (956)..(960): n is a, c, g, or t
  misc_feature (962)..(970): n is a, c, g, or t
  misc_feature (974)..(974): n is a, c, g, or t
  misc_feature (976)..(989): n is a, c, g, or t
  misc_feature (998)..(1007): n is a, c, g, or t
  misc_feature (1011)..(1043): n is a, c, g, or t
  misc_feature (1050)..(1050): n is a, c, g, or t
  misc_feature (1052)..(1065): n is a, c, g, or t
  misc_feature (1067)..(1077): n is a, c, g, or t
  misc_feature (1079)..(1085): n is a, c, g, or t
  misc_feature (1087)..(1102): n is a, c, g, or t
  misc_feature (1108)..(1116): n is a, c, g, or t
  misc_feature (1118)..(1118): n is a, c, g, or t
  misc_feature (1120)..(1123): n is a, c, g, or t
  misc_feature (1126)..(1132): n is a, c, g, or t
  misc_feature (1143)..(1144): n is a, c, g, or t
  misc_feature (1146)..(1146): n is a, c, g, or t
  misc_feature (1148)..(1152): n is a, c, g, or t
  misc_feature (1154)..(1162): n is a, c, g, or t
  misc_feature (1165)..(1167): n is a, c, g, or t
  misc_feature (1169)..(1170): n is a, c, g, or t
  misc_feature (1173)..(1189): n is a, c, g, or t
  misc_feature (1192)..(1192): n is a, c, g, or t
  misc_feature (1194)..(1198): n is a, c, g, or t
  misc_feature (1201)..(1214): n is a, c, g, or t
  misc_feature (1219)..(1221): n is a, c, g, or t
  misc_feature (1223)..(1223): n is a, c, g, or t
  misc_feature (1232)..(1243): n is a, c, g, or t
  misc_feature (1245)..(1259): n is a, c, g, or t
  misc_feature (1269)..(1275): n is a, c, g, or t
  misc_feature (1277)..(1297): n is a, c, g, or t
  misc_feature (1300)..(1300): n is a, c, g, or t
  misc_feature (1303)..(1345): n is a, c, g, or t
  misc_feature (1348)..(1350): n is a, c, g, or t
  misc_feature (1352)..(1368): n is a, c, g, or t
  misc_feature (1371)..(1381): n is a, c, g, or t
  misc_feature (1384)..(1387): n is a, c, g, or t
  misc_feature (1389)..(1402): n is a, c, g, or t
  misc_feature (1404)..(1404): n is a, c, g, or t
  misc_feature (1406)..(1429): n is a, c, g, or t
  misc_feature (1433)..(1435): n is a, c, g, or t
  misc_feature (1438)..(1456): n is a, c, g, or t
cttttctctggcttggatcgtcacgcagaaggtgatactatttctttcaccgtgccctcgagaaagatgccatttcaatgacttaatatccaaaaccggtggaggagagcacagcttcgagaattccagcaccaatttgacccatttgcatggctgacaatccaagtccaattatgcaggacgaaccacagctgcagatctgattcagcagagaacacatcgcactgctcctcacctatcttttccacccttcacagcctttgagctgttcctgccacacaaaagggccacaaaccacaagctgctgatgaatgacaagacactctctgcatcttcggcagagctggcatctcctcaaagcngcaaaggcaaannntactactccctccgtatcaaaatgttattcatttttgctcttacattttatgtctatgttctataggataatgaatctaaacatatagtatgaatttagnaattaactaaaacgaattttaatttgtaacagagggagtattagtaattaactaaaacgaattttaatttgtaacagnnnnantngnatattnnnngatgnncgataagtnngaggaggcgnggtgtgcgnnnnngcggataggctgactggctgagccnnnnttcgcnnnnnggccgtgnnnnngggctacgttgaatggaccagtnnnnnnnnnncnnnnnnnnnnnnnntanctnnnnnagnnnnnnnnnnngnnnatttnnnnnnatttnnnaannnnnnnntcctcannnnnnnnnnnnnnnnnnncnnnncnncatnnnnnncncnnnnnnnnnnnnnnnntcccctcccacccctcnnnnnnnnnnnngnnnnnnnnnnnnnnnnnnatannncntnnnnnnnnnnnannnaaannnaaannnctannnnnnnnnnnnnncttgnnnnnnnnnnnnnnnnnacgnnngtcgcnnnnnannnnnnnnngtcncnnnnnnnnnnnnnngctctttcnnnnnnnnnncccnnnnnnnnnnnnnnnnnnnnnnnnnnnnnnnnnctcttgngnnnnnnnnnnnnnncnnnnnnnnnnnannnnnnntnnnnnnnnnnnnnnnnctcccnnnnnnnnncncnnnncgnnnnnnncttcccttctnntnannnnncnnnnnnnnnacnnncnntcnnnnnnnnnnnnnnnnncanannnnnctnnnnnnnnnnnnnnccccnnncncacctactnnnnnnnnnnnncnnnnnnnnnnnnnnnctctcctgcnnnnnnncnnnnnnnnnnnnnnnnnnnnnttntcnnnnnnnnnnnnnnnnnnnnnnnnnnnnnnnnnnnnnnnnnnntannnannnnnnnnnnnnnnnnnttnnnnnnnnnnntannnngnnnnnnnnnnnnnncntnnnnnnnnnnnnnnnnnnnnnnnnctcnnnttnnnnnnnnnnnnnnnnnnntcag

SEQ ID NO: 2858 - DNA, 314 bp, Zea mays
aagcttaacctgcacccatctcccgactctacattttcctcgaatcaccaggcatcgataattcagcagtgctgtaactgtagttcaacaatctcactgcattgaaacatgcttctgctggtattttatatgtaagtgttagtgggttgtttcaaagggagctgatttgttaggccgtggttcctccgcaaacatcgcatccaaaagaatgatgctctcgagttacttttttgtagctgtattggatagagatgtttgtacaaaagctaactttattcttctgaccaagactggccacagacagggttgatata

SEQ ID NO: 2859 - DNA, 334 bp, Zea mays
gtgcgggccttgaggctcccttaggagaggcctcggctccggtgcactttgaggaacattcccatcagcattgtttccaaagccagggcgctgcaacatcagaaagaaggctcatagaggcaccaaacctgctcgtttatcatagaaaaaagaagcataataagccgctagttgaaattgctgaggaaacaacggaaaataataccattccagccctgcagatggatggcgtggaccctgtaacagccaaaaaagaggtatttcttaaacaaattgtgaaagaagtttctggtattctgccagcaccagcaaatccaactccaaagcccataat

SEQ ID NO: 2860 - DNA, 446 bp, Zea mays
tgcgctgcgcgacagcgctgaagcgcgcgaacagcccgtcgtcctggccgtcgtacatgaggtgggcgggcatggccaccttcttcctcatggtgtccgcgaaggcgcgcaccgtgtagtccgggtccacctcgaacagcttctcgacgatccgctcgtacgccgactcgtggcgcttctcgtcggcggcgattgtgccgcagatctgcgccagcttggtgtcgccgtaccgcctggcgtggcgcgccgtgttgccgtgggagatgaaggtggcgcgctcctggaacgacgtgtagacgaagcccatgtacgggttcgtctccgtcttgggatcctgcatttgtttgtacgtacgtcatgcgtgcgtacgttcatgcatcaaccacccatcatttaaaggtaaataattactcaccatccctgaggcgatgaggtactggacggtc

SEQ ID NO: 2861 - DNA, 548 bp, Zea mays
tggatccatagatggcaaaatccgtgtgtgggatattcccagatgcagtgtcattgattgggtggatattagagacataataacagcggtttgctatcgacctgatggaaaggtatcggcatgcattctgaagtggggtttttatggctaacttgttatttcagtgggtttgtgagattgattttctttgtcttttatatcttgcagggagcagtggttggaaccattaccggaaattgtcgattttatgatgcatcaggtacaaaaagaagtgaaatctctactagcttttcaataccatttgagtacctctctgcttttacttgaatgatactccataaatactgactataactacatcttgatggatcagataatctcctgaggtttgaaacacaagttgcagtcagtggcaagaaaaagtcttctcttaaaagaatcactgctttcgaggtaaatatcttgacgagaaggaaggcttttattgcacagttcacttcatcagtcatttttcgctcctatgttctgactatttattttatttttca

SEQ ID NO: 2862 - DNA, 382 bp, Zea mays
caaatagaggttcacaaaaccatattcaggttcgcaaagtatattagattgctcgtaggtgcaatgagaggaagtagagaaataaaatgtttgtcttataaaaatgtttgcattaacaaatttcaaagcacaaataatatatccaccggtagtaaattgctactgaattactaaaaccgtgaaacgaacaatcatgcaggcataaatcactggatggacaaagaataggttaatgatatatataaatgtgtgtgtgtgtgtgtcttatcccttccatcaccattgtctcctttaccctcaaataaagaaagaaagtgaagtaacctcatgtccaacattccagcatttagcaatgcaggcatataaactgaccttgtgtata

SEQ ID NO: 2863 - DNA, 651 bp, Zea mays
tttggagatcaagggttttgcttgatttgcaaacactctttaaaccatgtctttagttccatttattcttttgccctccttgttttgtatgtactgtagtattcattatgttattccctggcttatgatacagctttaaccctgaatagaattgagaaataactgctattccctttattaattgtttattatatcattgctaggtttctttggtcgatgtacttttttcttgtggaacatttgcatcattcttaacatttggacttgcagggggaccgaacacttctggaactccaacattggcacctagctttccatcaccaatacaacataacacttttgcttcgacaagtaatccattctcaacgaacccattttcaacaaacaatccgttcgctcctaagcccactacaactactagttcaccattcaacacctcatttaacaatgcatcagttgcaagttcgagtctattcacatcatcccctggtaccacaatgtttgggcaaccaggtgtttctacacttccagctccagcaagtaattcaccatcattatttggaaatatcaatcctgctcctgctacatcgtcaatatttgccacgtcagtgacgaataatccaagtccattcggcactggcacatcattgg

SEQ ID NO: 2864 - DNA, 378 bp, Zea mays
  misc_feature (268)..(272): n is a, c, g, or t
  misc_feature (276)..(292): n is a, c, g, or t
  misc_feature (301)..(321): n is a, c, g, or t
  misc_feature (326)..(374): n is a, c, g, or t
cttgaggccacatgatcctatgcaaacatttcgtgtgagttgctatttacatttcatatgcttataaattgcctgaaatgcatgaaactgctgaatggtgatacttctaaccactctctccaccatctctgccacaccttgctgttttatgctcaacttgaacgcgtcttgctatttattactgcacaaagtcaactaactgtacttatgtaaaccaaaaaaggtgcttagacctttctagtattttcgaggattttttttttgccannnnnaaannnnnnnnnnnnnnnnncaaaagggnnnnnnnnnnnnnnnnnnnnntccannnnnnnnnnnnnnnnnnnnnnnnnnnnnnnnnnnnnnnnnnnnnnnnnaaaa

SEQ ID NO: 2865 - DNA, 394 bp, Zea mays
tgttcctgctgtcgcctgcatcatctaggtcccctcccttcgttcagctgttcttgcgagttgttaatctaccgtatcgaggaggggaaggggggtccatttggccggaggttttgaggagatggacgacgaggactactcgtgggtgcggcgcaccaggttctcgcagtctgtcgtcaggtccagctccggcagggagcggtatggcgcgttcatcatcgacccgttcggtcgtggcgccaagctgaggcaggacgggttgggcacgggccccggggtctctagctcggcaaggcggctgccgatccccaaggcgagaccggcagttgcccggtcggaacggaagctgaagcacgcgtcttcagagggccaattgaacagggtgaggaacagt

SEQ ID NO: 2866 - DNA, 394 bp, Zea mays
  misc_feature (1)..(10): n is a, c, g, or t
  misc_feature (12)..(15): n is a, c, g, or t
  misc_feature (18)..(34): n is a, c, g, or t
  misc_feature (38)..(41): n is a, c, g, or t
  misc_feature (44)..(51): n is a, c, g, or t
  misc_feature (54)..(59): n is a, c, g, or t
  misc_feature (62)..(68): n is a, c, g, or t
  misc_feature (71)..(74): n is a, c, g, or t
  misc_feature (76)..(80): n is a, c, g, or t
  misc_feature (82)..(93): n is a, c, g, or t
  misc_feature (95)..(95): n is a, c, g, or t
  misc_feature (97)..(117): n is a, c, g, or t
  misc_feature (119)..(119): n is a, c, g, or t
  misc_feature (256)..(256): n is a, c, g, or t
  misc_feature (341)..(341): n is a, c, g, or t
  misc_feature (345)..(345): n is a, c, g, or t
nnnnnnnnnngnnnnctnnnnnnnnnnnnnnnnntccnnnngtnnnnnnnntcnnnnnngtnnnnnnnctnnnntnnnnngnnnnnnnnnnnngntnnnnnnnnnnnnnnnnnnnnngnagatggacgacgaggactactcgtgggtgcggcgcaccaggttctcgcagtctgtcgtcaggtccagctccggcagggagcggtatggcgcgttcatcatcgacccgttcggtcgtggcgccaagctgaggcaggangggttgggcacgggccccggggtctctagctcggcaaggcggctgccgatccccaaggcgagaccggcagttgcccggtcggaanggangctgaagcacgcgtcttcagagggccaattgaacagggtgaggaacagt

SEQ ID NO: 2867 - DNA, 379 bp, Zea mays
ataagatatcattgtttttgacaaaaaattctgggttaaggatcaagatgagtagaaaaatatatggtgaaaatgactctgagagaattgctagtgatgggacagctgcccgcacaagacctctgagcattaaggacattatgctgcggcgtgaaaagaaggctgcatcagaatctaagaaagccaaggaagggctagaaaatggtaaggacaaatctactcacttggaacgaggaagagaccacaaaagcagaaaggatcccagagatatgcctgtggagggttcaagaaaggaaaagaatagagatgcaacaagggagggcgccaagaaagaaaaaccaagacatataccaagggaatattccagaaaggaggacat

SEQ ID NO: 2868 - DNA, 323 bp, Zea mays
ctttcttctattttggtgttttatctatagtgtaaacatgaatctgacattgatattgaggatgatgataggctatagtgaatattgactagttgtagtgattatttagtaatatcctgcaacacatttttggttacgaaattgaacatgcatagggaagatgttttctaacttcagttatgtagaactggaaggcaagaactgatacacgagaaaaaaaatgcagcctaactccagttgtgcaagctggttcttattagtatttgcaagatgaaccttatccggaagaaatccaagatagttatctgttgaatttggagtgg

SEQ ID NO: 2869 - DNA, 334 bp, Zea mays
gatcggacggccccacggtgttgatgtccatggcgacgtcgtacctgtgcgaccaaacccaatgcaaggtggggatgctgcggttgatcgatagatgcatggatcactgaagaacagactatgtagctggctgctagctagcatcatcgatcacgcaccgctcgtcgaacgtggtgttggccgccgagttgatgatgacgtccacctggtcggcgatctcgtcggcgaggtcgggcgcgatgccgacgttggcttccctgacgtcgccgacgacggggaccagcttccttgcgatgaagccgtcgtagccttccccgtggatgtcctgcaggca

SEQ ID NO: 2870 - DNA, 810 bp, Zea mays
gcacctcttctagtgttaagagcatgtataactggaacaactggcttcagttattcagttatatactactgcctgcactaagaatcctatgagggtgcatgcatttttgctatcaaacaaataatatttagtccacaataataataggaatatccgtactgttttataggtcatcaacgagactgtccgattagccaatattgcgcctggcatcttcagaaaggcactgaaagacatacagttcagaggtgaagatgtccttacacctgcagttttctctgttgagcaaactgatcgcactctaaaacaaacatgataaaaatcatagctttgatgtcactataaagtgcttttgacgtgtgatcttgaacagggttcacaattccagctggatggggagtgatggtctgtcctccagcagtgcacttgaacccagtcatttacccagatcctcttatctttaaccctacaaggttcaaggtttgtggattcagtccatgtatgcagaagtacacatgcagtgatatctggtgaaattgtttttgcacatgtccacatacaggataaaccggagataaaccgtgggtcaagacacttcatggcattcggaggaggcctccgatcctgtgttggagcagacttcagcaagttgcaaatgtctattttcctccatttccttgtcactagatacaggtagaattttcacaagcttatttctccgggagtcagaactcagtttaaaaaaatccatattcattttccaatatcatcgccctttaatttctttcacatcatttcaggtggagaagt

SEQ ID NO: 2871 - DNA, 405 bp, Zea mays
gcgttggcttgtcggcggcgcagagctggtagtcgccgcgggtgaccaccagcaccgagtcgttcttctcgtacttgaaatctgcagcggcggatcggatggatggatcacgcgtgcatcaacgcgcatgccagataccaaattaatgtagcgaattctcgatcgatatgcatgcatggtatggttaaattagtgcatgcatgcactcacggaggaagtccccgacgtggaagcggttcctggcggcccagtggttgtagctctcctcgttgggcgccgttggcttcctccaccccctcggctcgccgccgaccacgaacacctgcgcatgccacgacgccgaagaggaacccacgaagaaagtggcggcgccgaggaaggagaaaaccacagcccggaacgagg

SEQ ID NO: 2872 - DNA, 355 bp, Zea mays
attctctttcaacagctattttatgtttgcaaatgcaacagtgtcttttgagaaaatcatatcgtcataccctggtcccttgtcacttgtttcaatactggtgagtgtagctgggtgctacatcagttccttagttatatctgttggctcagtgataattaatctgatcagcactttgttatttcctgatgttatggaaatggaactgagatttcagatgtctattcgctggttttgtagtgtcctgatccacacttcaaaaagaggcatcacaaaagaagagttctgcagcaaccattggtcgattcaatcataaataatctctgtttaggcggacaggtatagcaattccata

SEQ ID NO: 2873 - DNA, 360 bp, Zea mays
tcagcgtggccgtcaacctgggcgccacgttcctgctcacgcagacgttcctctccatgctgtgcacgctcaagtacgccaccttcatctactacgcggcctgggtagccgtcatgaccgccttcgtcgtggcgttcctgccggagaccaagggggtaccgctcgaggccatgggcgccatctgggagcgccactggtactggagacggttcgtgcagccttctgttgcggaggacccctgatgagtgatgagtgactgatgcggccttctgttgtggacgtgacacgcttccggacgttgtgtgtgtcaatggttgcagtttgtctgctgtggtcgtcgtctgaggaagagttgtctgt

SEQ ID NO: 2874 - DNA, 482 bp, Zea mays
ctgctggcactttcgcctttcttcgccatcatcgcctcctctcccattccttccttccttccttccttccttccacacgagagcctgcctttttcccgatccgcatcgtcatcaaatgggccatcttttcctcctcctggtagccctcctcctgctcacctccacgcgtgccgccgccgccgtccacgccagagcttcggtcattgaggtcagtcggcagtggcaacagccagataatggttacggtgtgtagtactctcaatcagctaggctcagcttcttgcttattggatgggccgcgacgaatcctttttttgtttctttctttcgtctgaagcttccttttgtggtctacggtctaccttgcaggaggcgagcttcgctggcatcagaggcgtgatcggatccaggccgccgacctgcgaggggaggtgcaggtcctgtggccattgcgaggcagtgcaggtgcccgtatctccgca

SEQ ID NO: 2875 - DNA, 381 bp, Zea mays
cggcagcttcgtcaccagcagctacggactgcgcgtcgccggagcctaataacaaggtcgccgccgccggtagctgcccggatctttccgtcctagatcatcaggacggtggccaccaccacgcaatgacgacgacgactgcaggtttgtggatggtggactcatcctcctcttgtacctcgtcgacctcgccaatgcatcagtttcagaggccgacgacgacgatggcagcggccgtggccagcgggagctatggaggtctcgtccccttccctgaccaggtccgtggtgttgtggccgacacgggagggttctttcatggccacgcggcgccagcgttcaagcaccaagttgccgcattgcacggtggtggttattact

SEQ ID NO: 2876 - DNA, 379 bp, Zea mays
cagctcgcagtgctcggttactcggagagcatcgcgaatctgtacacctcggagatccgggccaagtggctggcccatttcatggacggcggcttcaggatgccgagcgtcgctgcgatgcagaaggacgtcctcgagtgggagaagtgcatgaagaggtacgccggcggcaggtacttccgcaggtcctgtatagggctccttcacatctggtacaatgatcagctgtgccgggacatggggtgtgatccgaggaggaagaagggctttcttgaggaactgttcggagtctatggccctgctgattatgctgaccttcaccccgaccgcaagaaagacgactagaccttctgtggcggcactcgtaatctagaccttc

SEQ ID NO: 2877 - DNA, 331 bp, Zea mays
tctgtctttgtttcgtctttctcgccttgtatctgtactcttcacagcaatcctgtcagacgcttgaacctgattttgctgctgccccgtttggtggtggttgtccataaagttctaacgatggtgctgcaaagtctggaaagggccgacttgcgatcttcgtgctgatggctcggatggggccaatccattgggccgctggagccactgccctgctgcgttgttctacaagagttagttatcctcgcggttgacacagaaaggataaaattgcaagttgtgtctcagtttggcactcgaagggagttaggtgtgggtgtcgttgtttttt

SEQ ID NO: 2878 - DNA, 471 bp, Zea mays
gggcgacgcggaccgcgcaccgagcagcagcagcagcaagagctgggcgcagcaggcggaggaggcctacaacctccagctcgccctcgcgctccgcctctgctccgaggcctccgccgctgcggaccccaacttcctcgactcctccatcgctgccgccgaccacctccagcccattgcatcgcctcaatccctctcccaccgcttctgggtctgcacattctccctctcttacagttacctctacagttaccgtcggcctcggccatcgctgcctgaaatgtggcgaatatatcatatatgtcttgagttctccgagtgaccactgcgtcgttcgcaggtcaatggctgcttgtcctactccgacaaggtctcggatggtttctacttcatccaggggatggatcccttcatatggacgctctgcaacgatttgcacgacggaggccgcgtccccactattgagtccct

SEQ ID NO: 2879 - DNA, 471 bp, Zea mays
  misc_feature (167)..(167): n is a, c, g, or t
  misc_feature (184)..(184): n is a, c, g, or t
  misc_feature (243)..(254): n is a, c, g, or t
  misc_feature (262)..(267): n is a, c, g, or t
  misc_feature (296)..(302): n is a, c, g, or t
gggcgacgcggaccgcgcaccgagcagcagcagcagcaagagctgggcgcagcaggcggaggaggcctacaacctccagctcgccctcgcgctccgcctctgctccgaggcctccgccgctgcggaccccaacttcctcgactcctccatcgctgccgccgaccacntccagcccattgcatcncctcaatccctctcccaccgcttctgggtctgcacattctccctctcttacagttaccnnnnnnnnnnnngtcggccnnnnnnatcgctgcctgaaatgtggcgaatatatnnnnnnngtcttgagttctccgagtgaccactgcgtcgttcgcaggtcaatggctgcttgtcctactccgacaaggtctcggatggtttctacttcatccaggggatggatcccttcatatggacgctctgcaacgatttgcacgacggaggccgcgtccccactattgagtccct

SEQ ID NO: 2880 - DNA, 488 bp, Zea mays
  misc_feature (480)..(481): n is a, c, g, or t
agaggcgaggagagacgccgccggactgccgtgcccagcgcccgtgaccatcccatcccatcccatccggtcggtcgtacatgaaggaccgccgtggcagctcctccgtcggcggcggcgagcgcttcgccgtcttccccttctccatgggctgcatgtcgcagtccgccgtgtccgtcgccgaccccggcgacaagaaggcgcagggggacccgtcctccactgccgccgccacggtggctcggggtgagtgagtgctgctgatcgatcgaccacaattctgtacgtaccactacatacgtagccactttgtgctgtgctgacagagcagtcagcagcagcagcagcaggttcatcggaagaaggcgccggcgaggccatgacgaaggagaaggccgtggcgtcgtcggctacgacgacgccggggctcgtggcggccggggtgtcgaggctgatgaaggggatccggagcctgtcgcnnatgttcg

SEQ ID NO: 2881 - DNA, 382 bp, Zea mays
ggagctcgacgtgctggacctcagctccaacaccttctccggcaccatcccttcgtccatctgccaaggccccaactcaagcctctgcatgctgtacctccagaacaactacctctccggcgccatccctgagtcaatctccaactgcaccaggctcgaatctctcgatctcagcctcaacaacatcaacggcaccctcccggcatccctcgggaagctcggggagctccgggacctcattctttggcagaacttcttggagggcgagattccggcgtccctggaaaatttggacaagctcgagcatctcatcctcgactacaacgggctcatcggcatcatcccgtcggaactctccaagtgcaaggagctgaactggata

SEQ ID NO: 2882 - DNA, 346 bp, Zea mays
ataaaggacagtatccctccctggttggcaggatctggttacattggccttgcagcaatatcgattgcaaccgtcccaatgatctttccgcagatcaagtggtaccttgtcctctcggcatacgttgttgctcccctcctcgctttctgcaactcatatggcactggactaacggactggaatcttgcgtctacatatggaaagatcggcctcttcatttttgcatcatgggttggtcagaatggcggtgtgattgctggcttagcagcctgcggtgttatgatgtccatcgtgtccactgcagccgatctcatgcaggacttcaagaccggttacctcacactct

SEQ ID NO: 2883 - DNA, 378 bp, Zea mays
tacgggattatccccgctggacccaacatcgactacaatgccccacatgacagggagaggttcggcgcctgactgcgcctgggaccttgttgcttcctttctctctctctctctctctctcttttctgcaggagccgtgtgcagtgttgttgtgcttcatgagggtcttgtgcttggccgtgtcggaggctgcaagaatccctactgtactttttttcttcttctgagcagttgaagatggaagacaaggttttatttcgcacagataaataaaaggtacaaagggtcgtcgattttatatgaaggcctcgtttggcacagtagcaccgaacgtggtgttttctttctttccttccttatgacatcccttcaaaccaa

SEQ ID NO: 2884 - DNA, 358 bp, Zea mays
gtggaagcgcaattggcccttcctcacggggttcgccatcaccggcttcatcatcactaagatgacggccaacttcaccgaggaggacctcaagaactccaagttcgtccaggagcacaagaagcgctgaccaaccaggtgagccccccctatcaagtccgcttctagatctcggccgccctggttgacgcttgtgtgcgatgcccctgcgctaggggatgggcgcgatgttttggcgatatgttccggggatgggtgtcactggcgctagtgttgccacgcggttcattttttccctttagactacccttagctagcctgtatcgatcatagttcataataccttccgttgatgcca

SEQ ID NO: 2885 - DNA, 194 bp, Zea mays
acctatggtgcaaggagtttctgtgactggtggtggttctgtaaccccttcgtcggctattacaatgccaaatgctccaaactttcacccatcaaacccagcctcacctttgtcagtaatgaacaccataggatctcctactcagtctggtattgaccaacctgtaggtgcaaatgtgtcaccaatcaaggcag

SEQ ID NO: 2886 - DNA, 378 bp, Zea mays
ctcgacttggtagcgtacggcggttatttattcgccgggctatcgctcgccgtcgtcgcgaggctcgtgtgggcgtactcgtactatgtgatgatgccgtggatgagcctgtgcatgggggtgttcctggtgaggacgatgaagagggtgctcttcacggagatgagaagcagcgagaggcactcgtcgcggcagcactacttccttctcttcatggcaatcgcacagttccccctgttcttctggctcggcagcataggtgcatgatacagttttgtgtacttttcgcagcattaacgttgcaaaaatgatattgaagtgtttagatgtgttgtaaagaaaaaaacaattggacaatggtctcaacagcttagaggt

SEQ ID NO: 2887 - DNA, 672 bp, Zea mays
ccggtccgcgctcatcgccatgctccagtcgctcaaccacgccaagcacggcgtcgacgtggtgtccggcacccgcgtcaagacccacttcgccagacccaactggcgcaacgtctacaagcgcatcgcgctcaaccaccagaaccagcgcgtcggtgagttgttgttgttgttgttcttcttcttcttctttgttgtgcattcctcgaccggtcgccattctacttcggtccattcgtcgaacacgtggcatgcattactacttgcttctctcatgacccggcggtgaaagaagctttctaccaaacccgatatgcatgacaggccggtggtggacaggtgtgatgcgcgtgcggggagtagcagtagtagtgcaatgcggctggcctaactttcgttatagaagacagacagacacatgcattagaggatatagctaatcattgttgctgagacttgatattaattaattaattgcaggagtgttctactgcggcgccccggtgctgaccaaggagctgcgcgagctggcgcaggacttctcgcggaagaccaacaccaagttcgagttccacaaggagaacttctagctctctctctctatatatatatgtaaggatatggatgggtgtagagaggggatcggagtagcgcaaagtaggtatttgcttg

SEQ ID NO: 2888 - DNA, 494 bp, Zea mays
  misc_feature (393)..(394): n is a, c, g, or t
aatcaactctactaataacgggtaacggcgagcttttcaccagtacgaacagggaggcgaaggcgacgctctgggccgcttgctgtcgccggcgaactccgcgtgcatctgcggcacccaccgctcccagttggcccgctcgtctgcgacgtcagcgggcaccagctcccgccccgtccacggcatgtaagcttcttgcagcaccccgctgatctgtccatcttgttgtccctgctaaaaatgcaagttaaatgaccacacgccaagtgagaccatggttccacacatgaaattaatgaatttttgcctttttccattgttttattggtttagcacatgatgttcgcttgcatcagatcgtatcgtatcgtatctaggtggtctccacgaganncaaggaaacagggagtttctggttgaggttctaatgcttagtctgttgcaccatgacaatctaggaaacttaattggatactgcgctgatggagaccaac

SEQ ID NO: 2889 - DNA, 484 bp, Zea mays
ggtgctgtggctcaacggaggttctaattctaattcactcactaactgactgaatctgtactatcgtcttcttgtctattttttttgaagaatcgttgtatgttcatcagggcctggctgttcttccattgggttcgggcagtcgcaagaactcgggccgttcctggtgaagaaagatgtccctgagctcgagctcaacccgtatgcttggaaccaaggcaagtgaaaaaaaaactggaagaactgactcgatccagccttgacgacaatggaagcagcacatatgtaaactgaactgcatgtctggatctgtggtgtttctttcagctgccaatctgctgttcctggactccccagcgggcgtcgggttttcctacacaaacacatccttcgaaaaggatccaccgggagacaattccacaggtatggagtatgtatacatgtctgtcggatagatagatatagatacgagacgtctactact

SEQ ID NO: 2890 - DNA, 391 bp, Zea mays
gatacgatgagctctgctagctctttggaataaggtactctttaaaatctcagggaagcttatggaagccgcccagcgcatgtacgccatggacccttgcgctgcgggctgcggctggcaacgtttcttttcttttatcggtgaggtcctcgttgccgtctttgtggcttccgatgatggaattttagccagctccgttccgtccttcaggcttcaaccttgggggaagggacgcgtgaaggtttggttaacttaacacctgtgtctttgctctcctccctaggagtccgcttaacggaaagcactgtttgactagtccttgctagccctcctctctctctctctctctcttacttgtctactcgtttcctcttcctttccgtaaagattg

SEQ ID NO: 2891 - DNA, 919 bp, Zea mays
  misc_feature (572)..(589): n is a, c, g, or t
  misc_feature (596)..(600): n is a, c, g, or t
  misc_feature (607)..(611): n is a, c, g, or t
tccgcgttccctggcgggtgctactcgaagccttgtccccagttcttgttttcctggctgcgggccgcttgcggtggctgcccttcatcagctgtgccactacgacaggccttttgatccttaggcgtggtgacttcagaaccatcctcctggcaacaactgctggattctgaaccacgatacagaaggcaaaagggggatcaggcaagagatgtgcatagatgataaattttcagtatgggacgacaaaacaaacaactctactgctggtacctgactcgctgctgggtcagctcggactcgcggaggcacaactataacgtcgatagagctcgtacatccgacctaaatttggagagaagatggatggatggatgtcaaacaaataacctctgaaatataacaaggttgtcgacaagagagggtgctcgaagaaacccatctgcacgagctgttgatttcctgcgcctatcagaacactagtgctatattaagaagaaaaaatggtactcatatgcctcgcacaacatcacaatataaaactgcaatcaatagaatcagctgcatacttnnnnnnnnnnnnnnnnnngttcaannnnncccgatnnnnngccataatgaaacaaacatttgattactttttgaatgtaaaggagcaaaaaaaaacatcagcttaccttgtcaactgaaacattttggcatataccattctcctgttctatatgcctgacacatccgacctgagtaaagacaagttgcataatagatgagatgaaagaatgtgtcatgctatatttcattatctgacttttttttcctcggacacgcacgagaactgtgtattattatattaacaagacagcattggtacatcaagataaatatatttcacaactgtatgtatagcacaataacttac

SEQ ID NO: 2892 - DNA, 674 bp, Zea mays
ctgccatgggacaacatagttcatgcattgaaagctggcatcgggcaacaaaactctgcagcaagcagtatgtatgtttcacttgtcacctttgcgaaggcaataaaaacgtcatctattttgcagagaacaagaaaagctcaggctcagaggacattgttggaatacagagacaacattgtcacaagtacagaaaaaacatactaaattaagttttccaaacatggtgacaacagtttgtaaacagataataacagtttgggataagtgtgtaacaaaccactttttaatactttccactattcatatgctataaacataattatatatgaatatttcataatttctatagcttcagctacacaaaagataagagatgtcaacttccattaagacaaatatacttgtttttattgttcattattaatatcataggactggacgttgacggacacatgtatggagtggccaatggagtagatggacagctgcacccactgcctagacttgaagaatcactcattcgagttgatggtcatgctacattgaaacattcagaggtcgtcacgcagagactacctagctgcctggttcattagagacagacaagtgtaggaggaaaggaaatttcagggacctcctcactcagtaggcggtgtaccacaaagtagttg

SEQ ID NO: 2893 - DNA, 340 bp, Zea mays
agcagtttaagcctaaggttccttttcttgtgcaggagcgcataattgaagctttggctagcttgtatagtaacccggttctctgcaagacactagcagattctgatgcaaaacgcttgcttgttggtttaataaccatggcagctactgaggtgcaagatgacctcacaaaatcactgtttgctctctgcaaaaaggattgtgatctatggcaagctctgcaaggccgtgaaggtgtccagctattgatttctttacttggtctttcatcagaacagcagcaggaatgtgctgttgctctgcttgcgcttctttcaaaggagaatgatgagagcaaatg

SEQ ID NO: 2894 - DNA, 489 bp, Zea mays
caaacctgaagctgaacaaacacgttctcacgaagcccggacatgcggcatggtggcgatctcgaccagcgtcttgtgcagcgcctgcggcttggagaagaagggcgcgtggtctgcccccttcagccgcagcaccttctccggtgggttggcaccacacatgctctgctggaggggcagaggaatcgtgttgtcctccgtggtctccacgtagaaccgccgcaccgagccgtagttctcggccgtgagcacaagcttctccagcacaggggcgaaggggatgggcctcatggacaccgaggccagcgacacgtccttcacaagcacaacaaggtgtcacgacttcagaactcagcactaggattcagtgatgtgaatggaggtgattgtcagtggcagactggcagtaacattgtactccaaagtcctaccaaccttggaagggctctggttgaacaacaggtccctaagcgatgtcctgtcgatgtt

SEQ ID NO: 2895 - DNA, 358 bp, Zea mays
gttcaggttcgtgctccacaccctgcaactcctgtttgcttcatccagagagaccatttaacagcttctaggaaattttcgttcctttgcagggcagcaatgaggttagcatatgtcactcgatcagggctgatgcctttaaccctcatctcttgcatcagtttgacggcatcttcaggcattctcgctatcccatatgcttttatcaaggtattgtagctgtacagatctggctccacacctcggtcctttagctccgcaagaacattcgaaacatcttgtatccaacctcttctaccatagatattgatcattatattgtaagtgtagtgatcaaacttgcatttcgctctcttca

SEQ ID NO: 2896 - DNA, 405 bp, Zea mays
gctgctgctgctggtttcgtcttcgtcttcgtcagacaagcagtcggtgacgtcggtaacacagctggaggacgacggctgtggcgccgagaatggcaacggctgctgtcctctcacgtcttccggctgctgctgccgccgccgccgccgagcggaggcgccgtgtcgcaaagttttgctgccggcgtcccggttcggcctgttcttcaggaagacccggcacacgacccactctcccggttcagcaacgtagccctgcagtcattggcaacggcacgcatataggaatcactatacatgtgcaaaacgaataaaacattgccctccaaattcgtggggggagcaaatgtaagctacggcggcaaaacatcgcgatcgaggttgcaaagcggatcgagtactcca

SEQ ID NO: 2897 - DNA, 408 bp, Zea mays
agccatgcacccgtacgctcacccgtaccagcaccatgccgccgccgttgcccccaccaccaagcactacggccactgccatgatgccgaggaggaggacgaccatcagtccatgctgctcctctccctgtggcctcccggccaccaccaccacagcgtcgccgccgctgcttcctcggcgtgctcgtctcctcccaccatctgcgccaccaccagcagcaccagcaccagcaccacctccatggccgcctcctccgcttcttcttaccctttttgcctcacccaccaaagccattacaatggcggcggatctgcagggagcagcagccacagtagtagctgcttcctgttccaccacgagcaccagcagcaggaggagcccgccgatgtgagcatatcgctgtccat

SEQ ID NO: 2898 - DNA, 731 bp, Zea mays
cgcctacgacgacgccacctccaccttcacctgcaaccacaccgattacaccatcaccttctgccccaaatccactccaaccaggtccttgcccaaatcagatcattccttcatctagttccttcacttccagtttcaacttcagttgcaatttcgagctgtaaggtattgtttgatatagaattcgtgagaatgacgaggtcttgattcggaattcttaggcttggagaaaagcaaagaagctttgatttacactcttctctttcccatctttttccttgtgtccccactcggcaccttgccaccttgtgtgctgtgtgactagaaaaccacaactgccgagttgggactgcaaggaacacatcagactgatagagggttccacatccgatgcttagattaactttacaagttcatgctttacaagattaagcaaacctggtcttacgcgagcaatatttcttttgacatttttgcagcgacaaatccgaacattcgtctcggaggccaagccacgagcaactggaagattcggtgtggcttgcatccttgaaggcaagtgacgccagtgctctggcaacaacgtcatggtcggcgtccattgtgctccgatctgccttggcaattgcagtggcgaccttgcttgctgcacaacttgcaccagatcatcctatggtcagcttgctatgattcatcatggttgcggttcttgatcggtaggagtcatctaa

SEQ ID NO: 2899 - DNA, 729 bp, Zea mays
  misc_feature (691)..(694): n is a, c, g, or t
  misc_feature (710)..(723): n is a, c, g, or t
gctcacgccatcagttttggagtctcttggatgctgtaacaccgaactccattgtcggctccattgcctggggttgtgctcacgccattagttttggagttcggaggaggtaggacactcactattctcgttttccccaaaatagaacatctcttccaacattgttactgtccagttgagtacatactgtcaaaatccatcagaaatatctaactgactcttgttatcggtagctctcctactcgatttgttaaatatctaactgactgttgatatatggagggaggaaaagcagggtagccagaatctctgttggcgtcgcctgtttcattatgttcatgatgatcctttcagtaataggcctttttaggaagtaaaggaaacgtttgtgctctggtttctgcaagaggtttgcacataaacaattttttattgcagtctaggctccaacctttggttgataaacactctcaccataagtaacgaaggaataagaataaatggtgggagatacaagaatatgaaaatgaataaatgatgcgacaggttgttgtagagtagcatgatgtaagtgaatgcataactctactcttatatcatatcatttctctcaatccatgtcttttaactggtgaatcattttaggcttctgtttcttttatgcttttatacaggcttacacagacctgtnnnncaagagccgagcagcnnnnnnnnnnnnnnaccacg

SEQ ID NO: 2900 - DNA, 379 bp, Zea mays
cttcggggacctctacctattcaagtggaccaccctgttggtgccccccaccacgctcatcatcatcaacatggtgggcatcgtggccggcgtgtccgacgccgtcaacaacggctacggctcctggggcccgctcttcggcaagctcttcttctccttctgggtcatcgtccacctctacccgttcctcaaggggctcatggggaggcagaaccggacgcccaccatcgtcgtgctctggtccatcctcctcgcctccatcttctcgctcgtctgggtcaggatcgacccgtttatcccgaaggccaagggccccatcctcaagccatgcggagtcgagtgctgagctcacctagctaccttcttgttgcatgtacgg

SEQ ID NO: 2901 - DNA, 267 bp, Zea mays
ttgcatgcacatgcagcagcacacctgaacaacttgcctgttgtactgtaccacgagcagccacatgatgacgctcctcaagacgtaccaccaccacaacgacaagcagcgccagttctcgcttcccaagaggaacttcgtcacctacgccgtctacgcgctcatcgccgtcgcgctcctctacctgttcgtcgacccggcagctccgcctgctgcgggttcgggtgcgactgcggcatcatctacgaccaccaccaagccatcatc

SEQ ID NO: 2902 - DNA, 391 bp, Zea mays
ttgccctcctgcgcatatcacttcctcccagtcgccttcttccctcgctcttccctccaccattccgcagcctgccgctggagcccagcccgcccatagcctcgtgcccctctccgcctccggtcgctggagcccagccaggtcacggcctcgtgccccactccgcctccgatagggaccacaacggcaggaagacgaagaccccaacgcctccgcctgcatgtttgtaaaggggcaaaagccacaaaacccatctaatttcgattcgattcgcctgtggtgcttacaacggagggaatggcgaacggcgacggcgcggcggcgccggggacctgtcgaagcacatcggctgcggcgccacaaccgggcgattctggtcaaggccgatctc

SEQ ID NO: 2903 - DNA, 391 bp, Zea mays
  misc_feature (15)..(15): n is a, c, g, or t
  misc_feature (66)..(66): n is a, c, g, or t
  misc_feature (73)..(73): n is a, c, g, or t
  misc_feature (109)..(111): n is a, c, g, or t
  misc_feature (116)..(118): n is a, c, g, or t
  misc_feature (122)..(122): n is a, c, g, or t
  misc_feature (126)..(126): n is a, c, g, or t
  misc_feature (138)..(138): n is a, c, g, or t
  misc_feature (150)..(150): n is a, c, g, or t
  misc_feature (161)..(162): n is a, c, g, or t
  misc_feature (164)..(164): n is a, c, g, or t
  misc_feature (173)..(173): n is a, c, g, or t
  misc_feature (182)..(182): n is a, c, g, or t
  misc_feature (186)..(186): n is a, c, g, or t
  misc_feature (190)..(190): n is a, c, g, or t
  misc_feature (208)..(208): n is a, c, g, or t
  misc_feature (219)..(249): n is a, c, g, or t
  misc_feature (257)..(257): n is a, c, g, or t
  misc_feature (285)..(286): n is a, c, g, or t
  misc_feature (290)..(290): n is a, c, g, or t
  misc_feature (302)..(302): n is a, c, g, or t
  misc_feature (308)..(309): n is a, c, g, or t
  misc_feature (312)..(312): n is a, c, g, or t
  misc_feature (315)..(315): n is a, c, g, or t
  misc_feature (317)..(317): n is a, c, g, or t
  misc_feature (321)..(321): n is a, c, g, or t
  misc_feature (325)..(326): n is a, c, g, or t
  misc_feature (338)..(338): n is a, c, g, or t
  misc_feature (347)..(347): n is a, c, g, or t
  misc_feature (351)..(357): n is a, c, g, or t
  misc_feature (370)..(370): n is a, c, g, or t
ttgccctcctgcgcntatcacttcctcccagtcgccttcttccctcgctcttccctccaccattcngcagccngccgctggagcccagcccgcccatagcctcgtgccnnnctccnnntccngtcnctggagcccagncaggtcacggcntcgtgccccanncngcctccganagggaccanaacngcangaagacgaagaccccaangcctccgcctnnnnnnnnnnnnnnnnnnnnnnnnnnnnnnncccatctnatttcgattcgattcgcctgtggtgctnncaanggagggaatggngaacgnnganggngnggcngcgnnggggacctgtcnaagcacatnggcnnnnnnnccacaaccgggcnattctggtcaaggccgatctc

SEQ ID NO: 2904 - DNA, 369 bp, Zea mays
tcttttgaagttttagcccttgttctttaactcaggctgagtaatccatattgcagaattcttaattatgaatcactttaagacatcagtaataaccacttctaatctggcatgattgcgtttgaagtaggcatcacctcagcccccgaaggtagaaacaccagttccaaaggtggttttacctcctcagtcacagaaatcccccgccaaagttgatgcaacaccgcctaaagttgagaagccatcggttacaccacctcctaaagttgattatgccactgatctctttaacatgttgtcaatggatggaacaacagagaaagagtcagcgtcatcttcaaacgacgataatggctgggatggcttcca

SEQ ID NO: 2905 - DNA, 461 bp, Zea mays
  misc_feature (56)..(56): n is a, c, g, or t
  misc_feature (322)..(326): n is a, c, g, or t
  misc_feature (330)..(332): n is a, c, g, or t
  misc_feature (340)..(364): n is a, c, g, or t
  misc_feature (426)..(430): n is a, c, g, or t
  misc_feature (448)..(450): n is a, c, g, or t
tccattgtaaaagctccatctgatgatatgaagaagatacaggggctacttgaacngagaacagttacaaatgagatggtccgcttaattgagacagcaactgcccctgtcttggctgtcgacattgccggtaacataaatggatggaacaataaagctgcagaactaacaggtttacctgtaatggaagccatagggaggcccctgatagatcttgttgttactgattctatagaagtggttaagcagattttggactcagctttacaaggtttgtcactttgctttcagtcgatttttttgtggtccccagcttaatctnnnnntgtnnncttttttnnnnnnnnnnnnnnnnnnnnnnnnngtttcaggaattgaagagcaaaatatggaaatcaagcttaaaacattccatgaacatgaatnnnnnggtccagtaatcttgaannntaactcctgct

SEQ ID NO: 2906 - DNA, 465 bp, Zea mays
agcaatcctgcgacaaatgattggataccatcttctgagtcggtatggctaccaaccaaaaacatcagcgagcagggcagcatcaagctacatcttgtgatttcctgactgaccttttaattttgcagatcatccctgcttcgaacaagcccagcaggagcgactcctgaccagcctttccttgccttgaagtgccgtggattgcttacctgcaaagataataaaatgcactgcttctgtgtggtagtaccgtagtagtgcagcacgcggcagagatcctgacttgacactcgagagagagagaagggaagcatactgccggagtgccgggcgcacgggttggggacacgagatgtgactacttcaacgaagaatgtgtacgggtacgggtgcgtcagcacatgttacttgttgctgcacctgcacactactgttcgagtgttgataatgaactacagaccctga

SEQ ID NO: 2907 - DNA, 345 bp, Zea mays
agccggtgtttcagtttccagcaattcggattcagcaaagctcagcaagggagcacgccggcgagagaagaaggcgaaggaggaagctgcccgagagcagcggatccaagaggaacaaagcaatctcgtgagcgaccgcatgctagaaaacgagaagctcgaaaggaagctcgagcccttggggctgaccgtccaagagataaagccggacgggcactgcctgtaccgagcagttgaaaaccagctgtcgctccactccaatggcgctgcacggtacagttaccaggacctacggcagatgacggccaagtacatgagggagcacgccgccaatttccttccctt

SEQ ID NO: 2908 - DNA, 590 bp, Zea mays
attgctttttgtcttgagggcacccataaagtgtcttgatgagcttgtttcatttgatggcatcttcaatttaggagattgcaagctgagattcttgcacatcaaggtgtcagaaagaagattgaaggtctcaaattggaagcaaagcgtaaagatgatgaggttcatgtcgaacttatacacaactatttgagatttgagttctttcttctcttaaataataatctaaaccagcgattctatagattggacaatacaaagagcatattgctgagttggtcctgcattcagaagcacagtccttgttgtttcaggagaaggtatggtacgctacctatatagttcttttttgtgtgtctatttctgctgtctatgtgctaataaatcttgccgtgcagtacaatgaaatggaacacatggtttctagacagaggtttggtccgcatgaatcttattctgagactgtccccaagactgaaaagccttcagggcgagcaagaggatccagctcccctttccggtgcatatctagcattattcaacaaatgaactctgagagagatcaagaaatcttggtggcacgccaacga

SEQ ID NO: 2909 - DNA, 553 bp, Zea mays
tataaatgcttaaacttaacctggtaaattcatctacaggctctttcaaatggcaaacccactgttgttgagttttatgcaaactgatgtgaagtctgcagggaactagctccagatatctacaaagttgaacaacaatacaagtaatttgtttacacaccacttttcacatttctgaactttaagccttgattgagaataacaattgtgattcatttaataaaatcaatgcttgtcgatgctttgttgcgttgcctatcctattaaccacgttgattgaaccttgctatgggcatgacagttgggatccaagttgctgcacgacagacagaaccagcgaacaccacggacaacgacgacgacgaaccagagcaggtccgcttctcgctcttgggtggcaagaactgcagcaacgttggtgtcacgaccgccattaggcccatgaacaacgccaggctgaggtccagggatggaggcaacgccacgcccacgaccatcacccacagtgactctgcatcggggagcatgaggacgatttgtacgccatcacaat

SEQ ID NO: 2910 - DNA, 1031 bp, Zea mays
cctcttaacctccattcctttgcagtttcttgatttccaccaataatttgttccagtcgtgaaatctcgcccccctttcctggtttttgtgtcaggtggctccggctcggtgcaggtcgggcgcgccgagctttactcgaagatggcgcgtgacctcgacgagcgcggcgcggcgttcctgaagggcggcgagacgtcgcagtcgctcacgctctcggacctcttcgacaccgcagatgacggcggcgtcgtacccaggctcaaggtgcgggctttcttcaccagccccgtgtcctgctcgtcacgctggttgacatgtagctggttgtggcttatgatggtgtcgctgaactgaaatgtgcttggcaggccgccgacccgccagtgcgcgcgaatgtgctctatatggaccccaagttcgccgctgtgatctcgtgagtggtgacctttgccaaaatccgcaggcaacttgctgttaattgttcctgaagcgatgctctctccttacaagggagaagaactaagttagcccgtgattggtcagatggctgtataattgttcctttgggaggtcaggtcagggcagtgctcattcagtatgttttgggcttgcaggaaagctgtaaaggacgtgtttcttccttattttgaccaaggtacagcttctatgctatggcatccatacatgtacaactgtagaattttcacctgctgaattcatggcctgacatttaaatgatgctaaatagagttgtcacttaccagttcagttgcctgctgactgattggttagtgtcacagaaaccgacagcttttttgagcatttggtcttgaccactttgcttggttgatttgttttgcagctatctggttccaaaatacgagcatgtatcacttcagcatgtttcatgcctcccatcacttggagcccattgtagcaaccgaggatgaggtgagtgcaccctctgattgacgtgagcatcacagttgaagttttcactgacatatctatatgtgatatctttgagatg

SEQ ID NO: 2911 - DNA, 670 bp, Zea mays
  misc_feature (630)..(641): n is a, c, g, or t
  misc_feature (660)..(663): n is a, c, g, or t
cttgctggagttggattcatttctagtattggagctggagttgcttcagatgtcttatatggtgcccgtcggattcttaaaccttctgcaaatatggaagtggggcgcaaaagatctccgatctggaaatcagcagctgtttatagttgcttccttggaacatcagcaaacctgcgatatcaggtagtttgccaagagcatctttctgtttactcaaatgatattagttatgcgaagctattttgtgggtggttgcatgtatcggggcatatgtcggtaatggtcaaaatttgttgtaataatactacatgctgagaatggaaagtcgttaacatcaagattaggccttgcaactgcagataatgtgcaaccagtaactcactgatgcaataggttattctagtaaatgcagcttataatttgctctattttacacaggagtgttaaccttttccaatgaacatgtttcaggtcatagctggtctgattgagcatcggctaggagagaatctgatggcctactatgaccagccacttattgctaacctgttgtcctttgtttcaaggacagttaactcatactggggaacacaggtttaacacttttgcactttacattaacttgataannnnnnnnnnnntaaatctgcacttttgaannnngctgaac

SEQ ID NO: 2912 - DNA, 1242 bp, Zea mays
  misc_feature (1209)..(1212): n is a, c, g, or t
cataacaaggccttctcattgcgatgctatcagtcaggtaagatattctttctgtgtgaaaaacattattatgttgacactaaatgtgtatacttactgtttcaaataagctaattgtaaaagataaatgttttcaaagccctatgatagttacactgatattctcatgtgattattggacaattgcctgtcttccatttttcccacgatatccagcatttgattgaccttgcttatacgactgaaatatatttttagggaaactgtggagtttgctccccagtgattttatcaaaacaaaacaggacacttttacaaaggttagccaagaattacccagaggaaagggctacttacattacacggccatggcaataagactacgactagatcctttggcacactgaattcctatcacaaactgtcttatgttacaagacattctgcttcattggtcattctatgaaaacgagctaacattcaggagtacgtcaaaaatattcaaaaacgatgtggtttgaagctatgaagataacatttgaaatgtaatgatctcttgtttgtatatctatctcagcattgttgtttttttggagaacaaaaacgaaatatatattgaactcactacatttttcattgtttcacatgactgtttgccagaagatcattttgctcttgttttaatccgtgtatggtaacttgcactgacattctaagtttaactaatggatattattgcctatctttccattttccccaatactcatgagtccatggcagccatcatccagttagttatctcgctatcatttagttgcttcatgtagcagaatgcttcaatagcttttgcaatatctacaagcttttggttttcaggttcctgtgcttgcgattttcagctcttgtattaggctataaatgacatgttgttatcccattttcagcaaatcagaacattcatccagatgaggactaacctgaaggtggtcgataactccggggccaagcgggtgatgtgcatccagtccctgagggggaagaaaggagcaaggctcggggacatgatcatcggatccgtaaaggaggcccagcctcgtggcaaggtcaagaaaggagacgtagtctacggcgtggtcgtccgtgccgccatgaagaaaggacgcagcgatggcagcgaggtccagttcgacgacaacgcggtggtcctcnnnncaagaagggcgagctgatcggcacccgcgt

SEQ ID NO: 2913 - DNA, 387 bp, Zea mays
  misc_feature (380)..(380): n is a, c, g, or t
agaccatgggcaagcggtaggtctggtcttggtagccgagtgggtggcgcgggagctaaaatcaaactctacgctgtttacggttggactgaagggtgctcccttcaatttgcccaaacactcctcgtgcatgaaatcatctacctcagcaccaataataatcttgattagatgccccgtcgcaattaattgccgtatgctcatcagttctttctaagcagaaacaaattaattaagcttgattcgtacaatgcccttctcgtcctccttttttttttgctaaattaagtttgttattgtttgaaaaaagttctacaagaatttctggttcatttttggggaataacatgcgcagcgtagtacttgcaggcacagggaangtatttt

SEQ ID NO: 2914 - DNA, 365 bp, Zea mays
gtgcaggcgctgcctccgttcgcgcagcggcgaggccagtcccagctcctgaacatgcacctgctctccagccgggtcctgctgccgccccaggtggcggtaaagatggtggaccaggtgaggagcaacagggtggtgtacacaatcagaggcgccttcaaagtggaggccaggttcaggttcggccactactcgtactggatgtacacggtctgtcagctggaactcactgcccctccttctggagttcttgttgcccggagatgcacaacaaaatgactggctctagaaaaattcccctcgttttcttttgttattatatataaaatcttagctattttttatactgatgatggaaatggccc

SEQ ID NO: 2915 - DNA, 819 bp, Zea mays
ctgtactttgcttgatgggaatctcaacagcagtcgccattgctgatgtaacaatagatgcttcaatcgcaaagaatagtattgataagccggcgctggctccagacatgcagagcctctgtgcattctcctcatctctaggtgcacttgttgggtatgctacaagtggattatttgtccatcatcttggagcacaggtcaatttctgtctaaatgctctattttactaggtttcatccatgtctgttggcttagtgagaaattatatgttgaatgacttttgactcaatgtagggtgcgttaggtgttatggctatacctcctgccacagtggttttccttggttttatcatatatgagctgaaaacacatcaacataatgttaaagagaaggtatgttgatcaggcgatctttcaccatttagttatgatcatattacctcctcatcttatcaaacatgatgttctatccgggaccatctcatgcggcttggtttgtgcaagctgaattctgatttctacattattcttccagaatactatcctagcaaaaatttagaataaaataactttggtgcttcagaaattgaaattcttccggtaaatctttaaataaattaatggtttatctgttgaaccagaagtgaacctagcgagttaactgaagagagtggtgatgcttatgtgtgtggatgggtgagtggggacaagaatccatgtacacagcgtcatactgatgaaagaaacatgaagaatatagaataacttgattcctcaatcctcactgatattctgatgacatgcaggtttaaacaaggt

SEQ ID NO: 2916 - DNA, 542 bp, Zea mays
ctctgcaattgtaaactgtgcagccttggtcataccaagggtgctactcataaggtgatctttcttccactcagggtaaagcaattgaagtggtattttattgttgtatttattttttttggttttatgacttggatctccaggaaccgccaagtggtgaaaggaagatactcagcataaaaatttccaaccatcaattttacaagcttttacctgtaaaacttgaccgggagcaacttgacgagttggaattagaagctaaaatacaaggtttgtttgtacttctttaaaatctgaagcgctgtggttcttttgtaatctaattgtctactcttaattaggaacaaaaacatctaatgtccgtgtccaggttgctgaaaatggtcagagtgagtcactctactggtaagctcaaatctcttatgttactaccagctactatgtcgccatcagctacatataggctagtaacagtttaataggttttctcccttggctttgtgttattttgtacagagtaaagtgtaacctgggtccttgaa

SEQ ID NO: 2917 - DNA, 608 bp, Zea mays
  misc_feature (525)..(525): n is a, c, g, or t
cttttagcaaccctggtgcatctagaaagtattaggtgaggcagcaagtggatctgaatatctggacatattgacagtcacaaatgaacttctcgtatatggcactctctctctctctcttctagaatatagttcaaggcattcttttacagaattgcaaacttttttttgtaatttcaggcctctaactcttgttgatcacaagtcatacctttgatcatttgaaaaccacagcggctctttctgattatgtcaactagccgagtggatggaagacccaaaaaatgctttggaagtaatatctttttacttaacactatacatttgttttttgtttctttatttctatagatgcaataaccctggactgtattgtaaattgatgatcacttgcttcctttggttgacaaggaaggtctcacaattatggataataaggcgtccattatcataaaggcaacaaaggaaattgaaatcagaaggaaacctgccagtccaggttcttatatgccaaattcagcagtngatacgcactcctggtctctcaccattaacttgaatctgcagccaacgagattgaattgaacacttctcgtgacattacgtgc

SEQ ID NO: 2918 - DNA, 1107 bp, Zea mays
cttctctagaatagatctccaagattcccaaccacttccaccaccaccaaatatatcagatttgggtggaatgccaacaccataccacaaacggcttcggtacttccaactttctccaagatcagttatgcagctcccataagacacaaatgcatgcttgacagaatcataaggttcagctgctgttgctgctgtaagacgttccatcacggcagcagagatttgtccatttgaatcagccatagaagtaagcaactgcttcaatcacagcagacaaaaataaagacagtattcataagaataaagttcaaccatatgttggcaaatagaatatcagcataagccatgaatgcatgaaggaacagtcaaaagctaattattttaactttcactaggtagtaggtaccaagatatgtacaattaaaagcttttttcaaatccaggaattagatgattagattgtccaccaacaccttttgatttcgaagtatttcacactgtaacatttatgcatttaggactttattgctgagttcctttccaaagaagaggcatgtatggtataatctgttgaccgaagtaccaaacaccaacttaccctagagtccatttattttgccaataatttgttcacacctcattcgatgaactagcaagaccaggtagtccaagcgattaaggtaaataagagttctactgaaatattatggcatgattacccagataacaattatgaaaaactggtaaaaataagccataaacaaggaacatggtacaagaacgaaaatcatgacagacagtgaaacaacttttgtagtgacataacacataagcaatggctagaaaaaatagcaaaatgttatttctctcaaacacaaacaagaaaatacaagacgaatataatgcatatataactgctcaaatttgaagaatggtttgacagttacaattactttatgaagttaatattcataactgataaaatgcaatgacatatagccgccatgtgttacatacatccagaggaaggccaccagcatcactggacaaagatgcccgtcttgagaccccagcagccatgggttctttaccagctgtgctcaaaga

SEQ ID NO: 2919 - DNA, 795 bp, Zea mays
gcatgtcttatgataaaggtattattgttacaaatttgcatcattagtataaattgttgatatgtctaactaagaactcagttggcatgtactaagtactatcgtcctaatcatccaaatcaatagggaaaaataatgcctagcagtagaaccatgcacatttgcttcttaaatgtgctgactcggttttattttatcccattactgccgcatttgatgttcccatggctttgtggactttttttctgtcaatatagttgaagatctttgttgctattgcaatccatagcattgggctatctataagtatttttggtagctcacttttctcaattctaattgttttgtgcatctcaacagccaattccacgcagttaccatctgctggtagctcactaggtgctgaaaaaaagaagaaaacccctgtactttctgaagaagtacctgtggagaggatagctctgttggcttccgatggttttcagtcaaagggtaaccagaatagcggggctagcagttcttcgcagaatgacaatgtgatccagaaactctcttctgacgtaggccagctaaatgtaaacaagaacaatgtgaatgttacgaaatcttgtttgcctgatgagtataagcctgagaagtggatgttagctgatctggagtcaagggcgttgagccaactgaaccttgcaatagtaggtcaccacccaacttattttgtaaatacagtatctattatttggcattgttcttctacatgtccgatactctgatgtctaaagggaagtaacttgaaca

SEQ ID NO: 2920 - DNA, 370 bp, Zea mays
cgttgctcgcaacggtgtatcgagtttcctcgtcgagtctcgctgtgtgtcctgtttcctgttcgccagcgcgccttctcggctcgctcggctttaatttccatcgcgtcatcgacctcgccaattgtgtttgtcgcttggccctgtgtcgttaggctcatcaaccgggttcgctatcgcgtgcgcttgttcctaatgcgcagtgcgtagtagttgggtctcgcgcgtgtggttttgaagctatgcgcgttcgtcgtgccgcatcgtgtgccgatattctcttccggcagacctcgccgtcgaccatgttcaagtaattgttcggctcctcgcatcctgcctattcgataaaacacccaaatccatagac

SEQ ID NO: 2921 - DNA, 989 bp, Zea mays
ggctgtgagggtgtcttccatgtagccagtcctgtcctttcccatcgaccctccaaccctgaggtgaatttgtcaagaacatctatttaatatttaatttcccgaaattttgaggtcccaatcaggaagtattgatggttgaatgtagttacagtatttcagagatttgctggcaaggcttttgattctagacatgtgggattttcttaagatatggaaatttgccagaattctctcaaactatcattagctcttacaagagatgctatctagaaacaggcgtgagatgtgtatcattttgaccattccttcagggtactatgtttaactactccttccgttcttttttatttgtcgcggtttagttcaaaaatgaactagcgggcgacacggaggtagtattattcaattagtggcaacagacaatgatctcttctgctctgcaccatctctgtggtttacatatctggtcctatgcccatggcacctgtcatgtattatttgtttttctttgtccagtgttactattatgtaattacataaaaagtttggtaaatttattaatgtacacatcatacgatagttatcccttttgtgcctttcaccaaatattttttatttacaggtggaggtcatagctcccgctgtaataggtacaaccaatgtgttaaaggcttgctatgaggcaaaagttaggcgagttgtggtggtgtcttcatgtggagctgtgtatgctaatcctatttatccgaagggtaaggtgtttgatgaagactgctggtcagatgaggattactgcaggaagaaggaggtgatacagttttccttcagtaaagcaatgatgttgcttgactcggtggtttatgtttgttcatcataaacttcctggtatagcttgcctaaataagtactatatcctatcctgcaggattggtatttagtttccaaaacactgtcggaacgagaagctcttgctttgcagcaaaaac

SEQ ID NO: 2922 - DNA, 378 bp, Zea mays
tcgtggtcgccgccgccgtctaggctctccgaggtagtgatgtgcatcgtggggaagctggtcggcgtcgggagggacaaggggggttcgttctgtctcaacaggctgctgaagaccaagcaggtggtggtggacgacaatgtcaccctgtgcctggtgaaggagatagacgacatagccaccgccgctcgccagccgcgcgatgagcagaagcagcagcagtggtggtgcctcgggcagctgctactggaggcaacgcagcggcggcaggagctggccaacgattttgtccgccttgtatcctggctgcacgcatgcacggagaccctcctgtgtcaggctgcggatgcggcggcggccaacaaggaaatcagcatc

SEQ ID NO: 2923 - DNA, 466 bp, Zea mays
cagtgcaaacagaagagttacataatatttttgaattatttgtttggcttgctttatgtatcaataagtttgactacaatttcatatatgttgcagcttcgcagagaaaaaatttcagataggatgaaaaatctacaagatcttgtcccgaattctaataaggtacatttctttgggggtttaacttgtttggtgcattttcatattgcaactggagctgcaactgcagttattaaaactgatcatcgagctcattatcaaaactttgctgcttatatatgcaacgggaacatgtatttcttagttgtggcttgaaatctgcaagtgacacaatagaattgagtatttattaaatttaaggttcttttttgggggttcacaatttcaagtcttcaactctacaaatacgctggagtgaatgttggatttctttgtgccaacaatagtcattacctgtttagccttt

SEQ ID NO: 2924 - DNA, 452 bp, Zea mays
gctaactaactaactaaagttgttgttgctttgcttggcgtggcgtttccacaaaacagattatttcattattttgctgtccttgtatgcagttcgcgtgaatggatttgcctgcaaagatgcgaaggacgtggtggccgaggacttcttcctctcgggccttcacaaggccggcaacaccagcaaccggcagggctccgccgtgaccgcagccaacgtggcgcagatcccggggctgaacacgatggggatctccatggtccgcatcgactacgctcccaagggactcaacccgcctcacacgcacccccgcgccaccgagatgctggccgtgctcgagggatcgctctacgttggcttcgtcacctccaatccgaacaacacgctcgtctccaaggttctcagcaagggcgatgtgttcgttttccccaagggccttgtccacttccagt

SEQ ID NO: 2925 - DNA, 369 bp, Zea mays
aggacccgatgaaggacatgaggtagccgaagaatggaactgttgaggccaccaccgccgtgctgacaaccaccacggtgctgacggacaccctcgccggcgcgcttccagcaggaagatagaacctctcctcgaccgccgccgttatcggcgcgaccagcagcgcgtacttggccagcgggttgatcagggtcgtcactatggcgaccttggtgtagagctttcccgagggcaggttcagcgtgacctgcgactgcacgtcctcgccatagatcatgtagcccaggactgcggtcagcccgtagttgacgctgcacagcaccgacgagatgagcagcaccttggagaagtgcctgttgttcctcatgg

SEQ ID NO: 2926 - DNA, 684 bp, Zea mays
ctgttttgatcctattttagcttgataatctttctcaacatcatgcaaagatatgacagtcggtttccgttcaagattagtagctgctctgcatcgacggtgctcctccgaatgcattttttatttacacaatttctagcttggtaatcttctcaacaccatgcaaagatatgacagctggtttccgttcaagattagtagctgctctgcttcgacagtgctccttcgaatgcattttttatttacacaaatgttcttatttgaaacttcccaaatgtatgttactatgtctcagaagtgcatgtctggccttttcaggtacatgtcatatataaatggacatgggcaggcactcccgctgagggtgcttcttggcttcgtctgtagaggcttgctgatatttggcataggatattgttaatttgtgggtatgatgcatggattatttgagatctttgagcagataaagcaatcattatcatctcaaagggagggtattgatttcatggccgtgattccccctctcccagtcaaagccatccaagccgcaattacttcagggacagggtgttcactggggctagaaggattctgtttttattgcacgacacatgacaacatatccaagtagtccttgattgatttagcagcagggagtaagcgtcttgctaaaagtggctccac

SEQ ID NO: 2927 - DNA, 353 bp, Zea mays
agtgcagtgaaggagaaagttcttagcgagaatgccaccgccacaaatgctgccccagtgcttgctgctaggcgcaaggagattgctcacgaagatatgaagtccttggttgccacaaacctcaatgcctttgaaatcatcgcgttatcagcagggttggacctttctggtctgtttatcaaggagtgcaggaaggagacaaggttcacttcagataagcctgcattggccatcatctcaaagcttgaagatgtcgcgaaagcactgaatctcaggataaggaagaaggacaacaacactgtcatcattcaagggaggaaggaggggggcaatggtgtccttcagtttgacac

SEQ ID NO: 2928 - DNA, 791 bp, Zea mays
acatgtcagtctatgcttggacgtgtattgttagtatggagcctcagatacccagagtttggttacagacaaggtaaattattgtcgtctttttcagtcgctgcaagctatttatctcctgaaaaaatggttgataccaactacgtatagccacaacatgatatgcctaagtgcacatcaaccaagtggttcctaatcttatgcctattcaatgtttgtcactatgtggaaccaaaactttacttctaaaatggctacctagttctttgtgtaattattaacctaactttagttgagtacttctacattgcatattgaagcaaaatttgtctggcctattttaggtgactaaacattattttctgccaaaatttgtaacaacatgccaaaacctttttgaacaacttaacaagggtccaaatcagtaggtgtataacttctgttttctgatgagaataaccattcatctgtcctcatcgtatgcatttgtcaacataaatcactttcctcctacaggaatgcatgaactcttagctcctcttctctatgtacttcacgctgatgtgcagcacttcagacaagtcagggaccttcatgaagagcttttgggtgatgattttgatggtcaaacttttccagatcgttcaaagctgaacagaagtgacaggaaaaacagtgttgagggtagaacaggtaaaattagaagtttggctgaccttgatcctgatactagagatcttttcttgatcaatgatgcatacggagcagagggtgaactgggtattatttta

SEQ ID NO: 2929 - DNA, 870 bp, Zea mays
  misc_feature (737)..(739): n is a, c, g, or t
  misc_feature (760)..(768): n is a, c, g, or t
  misc_feature (770)..(775): n is a, c, g, or t
  misc_feature (797)..(799): n is a, c, g, or t
  misc_feature (816)..(820): n is a, c, g, or t
  misc_feature (828)..(866): n is a, c, g, or t
cagcagcaggcgccgttctttcctggagggttcccttcgaaccccaatcagtttgcgcctttcgcgggtggccccccgcctgtcggtttcaatggcggcggggcgtttcgaccgggcggtgcttggatttgtgggccgcggccacccagtcccatgatgagccctgcggggaacggttccaacaacaacaacatcgctggaagcggtggagcgtcgaggccgattttcaacgttgggaggaaggaccacaacaatatagctggcagcggtggcatgccgaggccgattctcgacgctgggaggaaggaccgggatagcagtgctggcggcaacggcgaggtgattgaatcatgtgccattatttgttgaaattgatatatgggtatgaaactatgaactaactctaagcatttgcattgtcatagctttgtcttctgcagagcttttcacgggtattagtaggagttgatattaagatggccactccatatgcttaagattccaaccattgtgccggatttcaagcatgattttcagtagagataaaccatgctgtattgcaatcaaacaataaatgtctagcctaacattgctaagtcaccggattgcccatcaaagttttgaccctatgagtaggactaactctattcttgatgccctttgttcatttgcacattagttgtttgaaccttttggtggtctagttctattcctattacgctctataacttttcttnnnttggttccttattcttttttnnnnnnnnntnnnnnntcatatgttattatcatttgtnnntaattgtgttcgataannnnnacatcacnnnnnnnnnnnnnnnnnnnnnnnnnnnnnnnnnnnnnnnccat

SEQ ID NO: 2930 - DNA, 375 bp, Zea mays
  misc_feature (148)..(148): n is a, c, g, or t
gtgagggctctctgactctgagtagaggcaccaaaagaactagagcgtccaactcacaagaactgaaaagtacactagacttcattattcagaacacgtacacctgaaaacccccttccagaagatgaaggccgcctcgaacaagcangcaaaatctatgttcataggaattttgtggggaaaactctcgcattctagacgacgaacaagcatcaagcacgcaggctactagctgcagtcttgtaaaggtcgtcgccacgtcccagcagcgtcgctgctgctgacgacacggacggttcgggcttcttctttgttagttaacgggcgcgcggttatttactgctagcaggagcagcagcagtgattttgtgtctg

SEQ ID NO: 2931 - DNA, 1040 bp, Zea mays
  misc_feature (1029)..(1033): n is a, c, g, or t
cgaatggagaccagatagtttctatgagaagattcagaacaatcgccagcttgggctgcacacactttgcctgcttggtttgtgactcttgatcgacctttctggattcttcgttatcaagaattaggcaattgatctaatatttgtagccataggtaatgtgtcttatagtttaaccattgtacagggtatactgaacttaagtagacactgattattgcaagcaaatacaatgaatgttcaaactattagactgccccagtgttaagatatagtgttgttcagtccctaatatatgttgtttgaagccaagatctttgtcataatattcatttccacttttaaatgatatatgcattgtaccaaagcatggataacagaagttgttttacttcatgatggctgatttaatgtattgttcgatgtatgtagatatccgtgtcaaggagccaacatgggaatctttagccaggtaaaattagcatcatttaaattcttattctcaataccttgcagtgcagaattgccatctcacttgctaagtgttcagtttgatgcaaacagctcttagtagttattttttatatttacattggatagatgatgataaatccatctttttcctatgtatttatgcagaggaaagaaagtctatgaaccaccaagattcatgactgtaaacactgcaataagtcagctttttgaggtggaggaagcacgtgggggatatggtatttaaacttcttttgaggacctgcctttcttttaaaaaaatcattttgtatcaaacaatagcttcttatgcttatcgaagttagaattgttttaaaaaacaattcatgattcttgctcataccatagatattgttaggttttcctttattgttccaggtgcttcatatatccaaccatctagtattaccgtggtatcaaatttaaagatcattttcttccagcatatcgcagggaaacattgtgcataggagtggcacgacttggaagtgatgatcagaagattgttgctgggcnnnnnagaagct

SEQ ID NO: 2932 - DNA, 367 bp, Zea mays
tgttctttcactgccattgggaattatcctcgttcttggtttgaatgaaatggagtaccttttgcagacgtaggctattgattcaatcttcactatttctatataccataaacctaatagactacacgcaaactgctgagatatccatttatgcatcaatagtcatttttcaatgacttgtcaagtagttaggcttcttctgaatatttacacgttgaatcctccattttgtggttatgtatttgtgactgaatctgcagatcactcttaaggatgcccgagttttggctggtcatcactgccagtggagttttggggcttggaatcagctttacatcgatgtggtttctccatcagacgagtgcaa

SEQ ID NO: 2933 - DNA, 790 bp, Zea mays
  misc_feature (747)..(755): n is a, c, g, or t
attggctgccaaactcaaggttctggagtttgactcgttgacattatcctttcgaaaggatttggacatatgattcgtcaactgcatcatccagaaatgctactatatactgtgggtctgaagtcagtgcactttcatgggaatgcagatctgacagattggtatgcctatattggatttgatggcactactatctttccattactctaaatttggttaaactaaacttgttgaagatttctgttttgtcacccatttctcttgaccatagctgctcataggcacagctaatggaggaattaaagcttggaatgctgatgcaaagagagttgtttgcgacctgagtacatctagaaactttccaaggttataatctatagtctgcttgttccttgctgagaatgttttgttaacaaagtttttctatttcttgcagcatcttagatttgaaatgcagccctgttgaacctgtgtttgtctctgcagctgcatcaagacggtattgtctagatttcatacttcatgtgcatgataagaagtccatagctttgttaactccacatacttttctctctagtagcatcgttttattatacttagtttgaacttatacatcttttcaggcatggatcaactacatttgagagaacaggatttgccaacttgacagtgtggcatatgaaaacatggaagccattggtagttcatttgctttcatcctctcttgaacttgtatgtggatttgtnnnnnnnnncttttctaaaggcttccccccctttttttcttcta

SEQ ID NO: 2934 - DNA, 371 bp, Zea mays
ttcacagcgagaaccccggcatcgtgcgcatcccggcgaccgtgttcgggtccgggatcaaggacgccgtcctcgagagggcgttcggcctcgagccggaggagctccgccggctccagaagaggttcgggcctcctcccaagaccaagacggcggagatggacgattgatcggaagatcaggcaggcgatcgggcttcggggcatgattaattgattagttatattaagagcagcagactttgtgatctctggaatatatctccttccatttgttaatgtctgtatgaattatttggcggtggacggtggttatcatggaccgataatgccggtacgtacagatgggatgggcatgtggggttaggtgtc

SEQ ID NO: 2935 - DNA, 418 bp, Zea mays
acgatgttgctgccccagaatctgagaataaaggagacggcaagccagctgaatccgaatcagctccccttgcatttgttgatgaagcagcgccccatgtaatcgttggtgaagagaaaactgaggacagtcaggcagctgaatctgcggtgccttccctggcgtcttcagagggagagaagaaagagaacggtggtgccactgaaccagcagctccgcttgtggttgagacaaaggcagatgcacctcctccagctgatgcagacaagggcgcggagaattcaggccaggtgaacaccgccccccaagaaccgacggcagcgaactgcgacaaggggcagatccaacctggtgcctctgctgtcaggtgcacataagggagcttggtctccgatgagagaccgttgctttgtgtgtt

SEQ ID NO: 2936 - DNA, 572 bp, Zea mays
cttggtctcaggagcgataacgccatgctctgggtacctccatatgtttcgtcgccgagaagagggatccctatgtactttgcatgcgcccggatctgatcatcaccgactccaaagtcagtacataagtcatcgtatttaggagagtttcccaagcttaatgacagacatgtgtggagaccaaaatgtaactatcaccaatgctcattagtattagggtatgtacaactctgagacagtggttcggttttccaagtacaagagacagttaagagactctgagactgcaacagtggtttggttttccaagtacaagagacagttaagagactgtataatacaaccctgagacactagaccataaatacaattaagagttatggagaatcctcgagagaccccatattaaatggggttgtgcatacccttagcgctactcttcaataaacaagagagtaatccagatgacatgcacattatgacattaataaatagtttagaaagacgaaatcttttacattcttgtataagaacattactaggtgttgatggttctcttccaaaaaaaaaaa

SEQ ID NO: 2937 - DNA, 386 bp, Zea mays
tcatgatgagttttgtgttcaggtgcttcatgagttcgctcagacctttgatttccaggagatgaacctggatacagctctgcgtctatttttggagactttccggcttcctggtgaatctcagaagatacagagggttcttgaggccttctcagacagatactatgagcagtcccctcagtctttcgcaaacaaggacactgctctactgctgtcatattccattataatgctgaacactgatcagcataacatgcaagtgaagaagaagatgactgaggacgacttcatcaagaacaatagaaacataaatgggggcagtgatctcccacgtgagatgttgtctgagctatatcactcaatctgccgaaatgagattaagacaa

SEQ ID NO: 2938 - DNA, 563 bp, Zea mays
  misc_feature (497)..(502): n is a, c, g, or t
  misc_feature (526)..(527): n is a, c, g, or t
  misc_feature (536)..(539): n is a, c, g, or t
tgggagcatgtttctgatagacagctaattatttggcttcagttgagtattacgattatttactgtaccgaatggaaatactggatgggaatggatgtttctaacagtccgttaaccctcctcttcagttcaagattgtgatgatttgtagtaatgaattggaggcttcgatccactgcaatttatgtggtacaagggttttgtttgagaaggcgaatgagattctaatggaggaaagaaatattcaggtttgctattttgatcactttgacttaatattaccagcaattccattctatgaccatttgagatatcatcttgtttggataaaatacataacaaactgaattgtactttgtgaattagtattgaatgacaatgtcaggtccagcatatatatgaactatacattaaaaaggatgttattaaactcatattatgtatttatgtctgcatgatactaggaatgtagtacttatagtatgggtacaagagtnnnnnnatcggtgatgaagtgatatcgtcnnttgattatnnnngagaaacttagtgtcatctgattt

SEQ ID NO: 2939 - DNA, 357 bp, Zea mays
tcctcactgcagaactccaagtcatgaccatcttgagattcacagcatggtcctggcccggagctgttggtgtctgtattaacctctatgtggtcaatgcctatactgtctagctactgtttgttgcactccgctacgttactgcctccgtgctctacctcaaggcccatcactacagcatcatcatcaccctgcatatgcctttgctttgtgcttggtatgtcacccactccactccagtgacctattcaatggaacaccacgccaggctgtgccatggtcgtagagacaagtgaaatgaccattatcttgcttcatctttgacgtcagtggtctatgggggtcacttgatggttc

SEQ ID NO: 2940 - DNA, 612 bp, Zea mays
catactttgaccgcccattcatccccaaaaggtgatgaccgagttagattttgactcatttacaggcctgataagttaccttttattctttttttactgttggtttgctacctcgatacttgagagatgtattgtcatttacagaactaaccttttttcatccgttttatcggcataggtccacaaaacctcctacagttcccatggaaccgaaattctacctcaggccagaaaagttatcctggtgagcttttacttccaaaaaatataactaagttgacatatttatgcgcaaaactactttcccgaaccctgaatttatttatctgtgcaaagcatgctcaccatgcttggttacgtgttaatggtggctgacagttactatcgacagcaatgtatggaacttggaaagctgaatccacaacatcagtgccaacatccgctgtggcaatcgagaaatgcagagcatcgacacacatgatccaacaactgtttccatttcctggcatcgtcttattcattcttgattcgtcttcttccatgtgcgaagaaattgctatcaagcgtgtttttgtagctttgcttggatcgccttgcctccaagttctgtta

SEQ ID NO: 2941 - DNA, 381 bp, Zea mays
atggtgtgggtggtagctacagtattaattagtagtagcgtgttataatagtatcttaatggtgattagcctcgtagagagacgacgacaagctggtagctggtcgatcggttttgcttgggggggaaggtcttggtggccttgtgatccgtctagcagctcgctaggaccaaccatggccgccgcgccatctcatgagactttagagagagagagagagagagagagggtcatgggggaggtagaggggggagagacggttgtaaaagcagttcccattgttacaggcaccaggtagtaactggtcagtggggcccacttctgcaggcggtggggcccatacgatcgaagtggctaccaattttgtatttgatgtaccaa

SEQ ID NO: 2942 - DNA, 400 bp, Zea mays
aatctgttgcttccgagtattggaaacctcaacccaattcattgctgaaatcactaccatcgttggcaaatataagtaatccaagcaatgtttacagtcccaacaatattctacaaggcaggattggtcctgtgttgagggttgccagtgatagcggtgccgctggtcgtgatggaagaatttctacaagcaacccaattgcaacaagtagtatcatgcatggctctcccgagtcagatgattcttcccaacactcagattcaggcatattactgagggggaatgcaagtaatggtggtttcagctacactagatcgaggcctgttgataatgtcatttattctcaatttatatcaactatgtattctgtttctaaagatcctgacccaacaattgcaac

SEQ ID NO: 2943 - DNA, 369 bp, Zea mays
  misc_feature (364)..(364): n is a, c, g, or t
agtgagcttgtctctgggactgaagacagagtgaatctgcacaacaagttccgtggtgccatcgagacagctcacccgggcatgatcaagcggctcgagcttgaggctcagcagaaggccgctgctcggaagaagaaagcgtcgttctgggattctgctgtcgatgccaagaatggaggattcaagttctccttttgagtttcacaacaaccaggtctctgattttcatgtttggttggatccagttttcttggtagttaagcaattttgtatgcccatttttccttgagcagtctgcagtaccttcccggtggacaatgatcatgggccctctgattggcacggcgctcactgggaatccagntaact

SEQ ID NO: 2944 - DNA, 357 bp, Zea mays
caactgtagtctacagtctgaattgaattatttctgtctctgttatgaagacatgctcaagttcatgtatttcacatacctgtttatgtagcatctctaacaaactactggaatttatacaaatggtattttattgttgaatattaaatgtttttctatctgtcagctattctctatgatgaatacatacatgtctatgtgatgaagacatgctgcagttgtgttagccaactgaacgcgaggtacggtgtccagtgttgtacgtagaacgggggtttaggctaactccaaatccccaacaataccatctatttctagggactcattcgaagaacggagcatatgaagtattgtgcg

SEQ ID NO: 2945 - DNA, 664 bp, Zea mays
  misc_feature (593)..(598): n is a, c, g, or t
  misc_feature (601)..(607): n is a, c, g, or t
  misc_feature (619)..(632): n is a, c, g, or t
  misc_feature (635)..(643): n is a, c, g, or t
cgactgtcttttgaagtaatgctagctgccgttgtggtgtgtgggcagtgatggcgggcgtggagaggttcgcgaacaagggggtggggtcgaacctggtgacgtacctcaccagcgtcgtgggcatgagcacggcggcggcggccaagagcgtcatcgcctggaacggcgtcagcttcatgctgccgctcgtcagcgccgtcctggctgactccgcccactgggaccgctactgcaccatcgccgcctcctccttgctctacgtcttggtaactccatcatcgtcgtagcctcttaattaattcattcattacatgttcgataatctttatgacatattattagctgtctggcttagagtgcatgccaatcaggagttctggaacaagtatgaaatctagaattaatggctcctatgtccgtttctgaacattgtaataattaattacggtggaaccaaaatgagcaaatgcgatgcgatccttaaaaacacttctgaacctctgtttttttcatagcaaaacggaggtgaagcccactttgagggctagtttggaaactctatttttctaaaaaaaaaatctattttttcnnnnnnaannnnnnnatctttaaaaannnnnnnnnnnnnncannnnnnnnntattattactttgtctaaaaa

SEQ ID NO: 2946 - DNA, 399 bp, Zea mays
  misc_feature (389)..(396): n is a, c, g, or t
tcctcctcctcctcctcctcgcgcagctctcgtgcttcgcctgttcgttcggggacggtcgtgcgtggcgccagcggcgtcggagttcgatttccggtgagcgcttttcgcaggaaaggttgggtcttgtcggttgggattactcactcgaccgtcgctacgggaaaccgtgtcccatctctgcagcggattggtttctgtccgtgctgcgaggttggtgtggtggtttgtctgtgcttccactgtcggaccgaagattccgtcatcgtttcgtgcagtaaccggagcggtgtttagtggggagaagatttggctggaaggcttggtgcttgcaaataaacaccacacaagaatcgaatgcgccgcaccagtgccgattgacgagattnnnnnnnngga

SEQ ID NO: 2947 - DNA, 366 bp, Zea mays
aagcttcatcaacatgcctctttaacttccgaatctcatctctgcgcccattcctttcatatatgtgggccataacaatcaacaagttgacttcaggcttcacccctatcctaggcattagttcgagaagctgctcagcttttcttgtagtgccaaacacgagggaagcggtcaaaactatgttgaatgtaaatgaattgggtttcattgatagcaaaggacggttactcttcttccgtggatcaactctattattttggaaaagataaccaagctccattacaaggtctgcaccgagaaatgcaccagtgttagtttgacacatatgagctaaaattgccgaccatgctgcaacaggtgggtatg

SEQ ID NO: 2948 - DNA, 710 bp, Zea mays
  misc_feature (640)..(645): n is a, c, g, or t
  misc_feature (658)..(660): n is a, c, g, or t
  misc_feature (667)..(672): n is a, c, g, or t
  misc_feature (682)..(691): n is a, c, g, or t
ttcttgcctgccccggctgcttgcttggtgccgaggaagaacggggaggagaacgttggggggttcttggatgcattcacggcgttcaggctatgaactaagctgagcagcttcttgcgttttaattgagctctcttgttcttgctcccgcgtcccctgcatttcaggtcagaagcgcaaaatttcttgctgcatttgaattatgaacttcgtttctcccctgcgctattttggttccacatgactgtgtgccttctctgctctgtactacggtgtgattctgtttgcagacactcttttttttctttctaatttcccttctttttccgccttgtttttaagttcatatgctctgagagtcttctcgctgcaaatctgagttgcttccgttttcgggcactcatagtttcctatatctccaaaggtgctttaaatcagtgtcctaaataggacgcaattcataaaaaaacagctctaatagtaccttattttacaaaattttataaaaaataatacggtataccatgaaataactcaaatatattacacctagattagtgtcatatccatgttttctaggtcattctcaaacttttctttctaataatgtaatttatttcctaaactctattttttcccnnnnnngctgcatttcttnnnttttgannnnnnctgcgtttcnnnnnnnnnntcactgcaatccttgcttg

SEQ ID NO: 2949 - DNA, 570 bp, Zea mays
acctttactcctttaggatacttgcgccatgtctcgatgatactggtctatccatccctctatgatctcaacttcttgcctcctctgttctgtaacccagtccggatcctcatcggtcgcgaatctgaggtccagatgatgcgcccctgaccacaaaagcgatggcaagtaactgcacgtaagtgaacagcgaaaaatgccacaacgatcttacattttttttcttcttcttcttcttcctcctgaggtttccatgctcacctttctccgtgacaagggcgacgatgctggacgagatgttcttgaggaccctggttgtcgtagaacagtaaacccatacgccatcagagacagagaccgaaattatatatatatatgaagcgatggagaccgaaactgagacggacagatggacctacccgcctcggctccacgggtctcgcattccgttggagaagatgatgttgctcccgaacctcttgagcaccttgtcgattctctgcaggaagtttccagtgaagggcttgtacgtacactactgaaactctgaaaacgacgcttacatatccg

SEQ ID NO: 2950 - DNA, 356 bp, Zea mays
ctggtcttgtggaggaagggaaattctggtttgatcgcatgattaaggagtttggcattgaacctgcagaaaagcactatgtatgtatagttgatctcttagcacgttctggtcttgtggaagaagccaatgacatgcttgcatcaatgcaaactgaaccaaccattgcaatttgggtcattctgctttcaggttgcttgaataacaagaagctagagcttggagaaaccatagcgaaaaagatccttgagttgcgacctgaagacattggtgtccttgcactggtatcgaatctctatgctgctgcaaagaagtgggacaaggtcagggaaatcagaaagctaatgaaggatagc

SEQ ID NO: 2951 - DNA, 369 bp, Zea mays
atgactgcatctcaccatttcatatttgactaggtagcagccagtaaacatatcttgtgtagataacactttgtccacacttttgactgataagattatgtacacttttgactgataagattatgtacagttacatgggccatgtatgtaataattttactgtccaaataccaaactataaaaggagaggcacacgtctctcacacacaatttgtgtgcaaaaacaaagataaaatcccacaagagattctctcctgtagcaggatcattgtgttttttctttctgtttctgttcttatcctttttgtgtattatagacatgtctatctacaagtgcgtcactagcatgaccagaactgcacaaactaa

SEQ ID NO: 2952 - DNA, 522 bp, Zea mays
tgtcttcctcgacggactttcattggacggcacccttattgtcaatgctgtggatggagcagaggtattatgacattaagcactgtcaaacccagagtcctggcataacacagatgcatgcctcggttcggttactaattaacttaaccatggaatatttttctcatgctacaaactgttcatgacctgctgcttgcaggttaaagttactggtcatgtagaaaataagggctggactatccggcatgtggactacaaggacacctcggagaaggaagaggtcgggatccgtgggttcaagttcgacaagtctgagcagctagaggtgaactacaccgggccaggaaagcatagcttgagtgcgtcaaaagaaaacactcttgacttgcatgcttgacctgactagcttcgtacaaaaatagaaatagctcacatctgggtcgcctcccagattctgggagggaggccattgccagcgtagctgaaaccgttcttctccttcccccacgtacaacaaggagc

SEQ ID NO: 2953 - DNA, 354 bp, Zea mays
agcacaaatcaacaagtaaattggttatgtacaatccctcgaccctagttgatcccatcagtaggtgataaaatcttcgaacatccgtaggtcttgagaacttcactggacctagatagcacaagtttaacaagtaaactgagcagagcaaactaaaaaatgttggacatcaaaatactttaatcgtcgaactaaaaaatttacaacgaaggcaatattaaagcagtcatcctacggcatcctatggttgcccaacaatagaaaaaccacatacacgtcactagaagaaattttgcaaattgttcgagtttgcaatggggattgaagcaaatgttggacatcgggatgcacaca

SEQ ID NO: 2954 - DNA, 390 bp, Zea mays
tgatgattgtccttgattggaaaaatgatgtagaggcaacataggtgatgttttggacgtagattgaagctttgactgaactaacttcatggcatgctctcttttattggtactcttaaatttcttgtttcttatttctgggcgggtgttcttctccagcaactggattacagcaactggattgcatatggatggatttggggcctgatttggattctgcttctgcgtcagcaataataattctgaactattcagggttccctgtgtttgttcaataactaacctaccctgtcaaatgttctttgaaaatttagttccctcataaactatctactcctaaatttcttgttttttatatttgggctggtgtttctctccaacaactggagt

SEQ ID NO: 2955 - DNA, 195 bp, Zea mays
tagtagatagggccaatttaacttcacatctcactgcagcattacagagtccttgttatgccatttcttcccacagctttcttgaccttcttcggagatcagagagcgagaggcagagaatgaagaaagtgttcgtgtacacttttgagagagagagagagagaggttcaaagaagctatacggcccttctaaga

SEQ ID NO: 2956 - DNA, 841 bp, Zea mays
tgctgacgtccccgttccgctccctcctcgcactcgaggaccccaggtcctccgccgcctcgtcctcctacaggatcctgcttgctctcctcgcgctccttctcgccgctgtgattttctgcgcgcccttgttctggtcccgcctcgtgagctcctggcccctcccgtatctttccaatgccattcaattttgtcaggattccgactgaccactgacattctgttgatgttgttgttgtcgtcctagaacactccgttcttgtgccacaaggaggggatcacgctccactgccctgaggtgaagtgtgcttcgttgctccaagggttttgggacccgtgttcgcttcataaacatttggtctgaagaatttcttctttgggtgcagacgaaggaacccccatctctatgggaaaatccacgtgctgccacgatgtcctggaagccctgtgcagagcgatgcagcaatgagccctcaggcgagtctacctttcacgtttgttaaagacagcaatatagcatatattgtatccctactttatacattaccccaatcactttgaggtcagtaacctccattgtgcaaatttcgatctcccagagctagtctttattgatctagtgcaaaaactgaatttcgtatgtctcaggaacctgcccaattgttatgtgtagtttcatgttagatgatagatttatgaaacagcacatctaacatctgttttcattcatgaatgggacctgctaagtgatgataccgtaaatttctatatcatgcagatgtcccatcagtgaatgaaacctctgggtatatttttatccatgccgagggaggactaaacc

SEQ ID NO: 2957 - DNA, 367 bp, Zea mays
tcgtacttgcaagccatgcaatatgctatttttgttattgccctttataatctgtgattggactatactgtgtatttaaagcggtatgccacttcttctaaatactatccaaccacagattgttattgccctttatatcaaacgatttttatattgataattagtacttcattgattcttcatttaattggaattcaaacaaggatttcggtaaataatgagtgtcaacttttgacaggaagtattcttgttgattgtcaatgcaattgttatgttcatactctttggtactttgttaacttggaatgctttataggaagaggaatagctgggctatgggacttctcataggcaacccagttatgag

SEQ ID NO: 2958 - DNA, 370 bp, Zea mays
acattacaatttcctcctgcgccctgatcatgaatgctgatgataggattgctctctcccatttctgcacatgccctgactacgcgatacaatttctgtgccatctcagcatctccacgctgtactgcgttgaaatcaagttctgcatcattctggccactaaccatactcgaggcagcaccaccgcccataccaattctgtatgctggaccaccaatcttcacaactagcatgccaatttctgggtcaccctttgatatgtgtgcatggtcaatttgccctatagctccactgaacattataggcttcaaccattcacgccgctccccatttagcaacctcatcccaaatgttctggtatatccctgaa

SEQ ID NO: 2959 - DNA, 349 bp, Zea mays
tcgagtcaagtcattacctactgttcaaagcaatatgttagtggtgtctgatcaacttgagaagtcagaagttgtaggggagtcaaaattattgagatccacggaagacttaaaccttaccatggtcagaagtgcagaaagaactgattgtcaaaaggaacctttgtgctatattggatcatcgaaatgtttgaatgcaagtttgaagaggttttacaggtcaaggaatatccctgttcctagacctcttccatcgcttgtcaaacttatggagtccactaaacgggtcaaaatacaaccaaatactaattatactttgttgaactcacgacacagcttaccctaatga

SEQ ID NO: 2960 - DNA, 308 bp, Zea mays
cttagctgggatggcggcgccgctgctcttctacgacctcggcctcctcgtgtcctcatcctccggtgatggacgcgatggcaactcctcctcctcccgcctccaactcttagccaccacggcgcgcgctctcgagcttggctacgccggcgtcgctctcgaccaccaccaccgcggcctcctcgccgactcccacgtctgccgcaccgacactttcgcgcccctctcctctctcccgctcccatcctctgccgctctccatcgccgccgcctcgcctctcccgcctccgaggccttccgccagtaaa

SEQ ID NO: 2961 - DNA, 393 bp, Zea mays
tgcttgtgctcaatgcctgtgccaactcagaggccatcgaggaggcgctcctttactttgatgccatgtccagggaccatggcattgagcctggtgtggagcactatgttgggatcattgaggtcttggggaagtcagggcatctcaacgaggctctggagttcattgagaagctgcctttcgagcccaatgccatggtgtgggagtcactcttgaacctggcccggatgaatggagacattgaccttgaggaccgggcagaggagttgttggtgtcgcttgatccatccaaggcaaatcctaagaagctcccaaccccacctcccaagaggcgcctgggaattaacatgcttgatgggaggaacaagctagtagagtacaggctgccaccaa

SEQ ID NO: 2962 - DNA, 348 bp, Zea mays
  misc_feature (342)..(342): n is a, c, g, or t
atttagtgcgtatgtgaatatgtattaccattgacgctgttatttccacaaatcattgtcccctccacaggaggctgacgttgacacgtagtccaaggcctcttctttctcttcagactgctgaatcacctgcagtgccggattggagtagttattagctgaatccttattaggggtgatgtctccgtggctaagctgggacgccatgaacttgtcgagagctcgccaatctgtgtccccgccagtcgccagatagagaggctcggcctgaagctcctgcagggtgtagcgaggggcaccatgctcctgtgtaaggccgcatgctggctggagagtagtgtntacttg

SEQ ID NO: 2963 - DNA, 692 bp, Zea mays
  misc_feature (369)..(376): n is a, c, g, or t
  misc_feature (381)..(382): n is a, c, g, or t
  misc_feature (398)..(399): n is a, c, g, or t
  misc_feature (404)..(404): n is a, c, g, or t
  misc_feature (455)..(457): n is a, c, g, or t
  misc_feature (635)..(639): n is a, c, g, or t
  misc_feature (662)..(689): n is a, c, g, or t
tgtctttcggttgaacttgtttgaagccctgcccaacctggacattttttagtttaggtctaaaaagagaaaccctagggttgtttgaaagggcttgtttctaggcttggcatttttgggtcagtgaagcaattagtatggttgtggatttgcatttggtactcggcattaggtcttatttttcgcgagcgctaactctaattgtattgctgaaacttaagtgttgcttatatattccgttggtaacggatactattctgcttcaattcccttctacattgtagattcgctacaggcttggctcttggctagccaagcctgcagtttaggactttgccaaaactgcatttgccatttaacaggcttctnnnnnnnncattnnctctggaggtctaggnngtggnagacgtcgcagcaggagcaggagccgcagtcgcagccctagataccgcagnnntccgagctataatagaaggtaaccatttttttgacttcttagatttcatcagttgtaaattaactctcaaattttgtcgctcaacctcaaatgctgcttatatctttccttggtaactgatactattctgctttaatgcccttctattgtcgattcattatgggctttacttttggcnnnnnaagcctgcaatttgctactttgnnnnnnnnnnnnnnnnnnnnnnnnnnnnttc

SEQ ID NO: 2964 - DNA, 238 bp, Zea mays
tgcagggccgcgcgctcaccaacgccgtcggcaacctcggcatcaccggggcatatgcggaggccgtgaagaagttcggctacgagctcgaggccctcgcggggcaggtgagctctcttaagagtgcttccgcccacaaactggagtatggtttgttaaggctaccttatagtagtatacctgacactgattatttaaatgggatggtgatttgtttgactgcgacgttgtttaatga

SEQ ID NO: 2965 - DNA, 388 bp, Zea mays
aaaatccgtacaccggcagacagactaaggtcctgttccaaacctctaaaactaatagttggcatctataattaactgaaaggtttaaaacggatcagataatggacccactaattgttagctatacctctcaaatagtcattagctgttagctgcctcaacccagctaaaaccatctaacaacttattagttggctaacaattagctttagaggttttaaacagggtctaactttaggaaagaaaaaacacacactttgaaattataaatatattgcgcaagggatactgatagagcaaatggaaaggcaaatgcttccagatgcctaattccatcccgaccatgctggttgatcacacaaaacgatgtgtggccgccattactttg

SEQ ID NO: 2966 - DNA, 290 bp, Zea mays
caaggtacgaagcctgacgacgacgaagccagccggtggccggcggcgatagaggaacgacacgccgcggcgcatgcatgccgcatgcatgcatcgtcaccgcgtagaccgccgaccgatcactcgaacgcgccggggtgctccctctgcatcttgatgacctgcctccacgagtcgcgggtggagatcttgtcgtaccacctggcgacgtgcttcctggcggtgaagagcttcctgcccctgtcggaggagttgacgatgtagtgggagttgggcaggtgggagaggtc

SEQ ID NO: 2967 - DNA, 403 bp, Zea mays
cacaggccgtggctgaggatcttgatggcaatggcgctcccgatgacctcctggatgtcagcgctgaccaaggcgacctcggccatcaaccagagcgcgcggcgcgcccaatccgggtactcgtcacggcacagctcagcaaggtgcctccctgtggccaccccgaggcgcgcggcgtgaagctgcacgagtaggcccatggccgtcgcccacacgagcacccagagcagcgtgccgcccgctgtggcaccggcctgcaggtcgccctcgatgttccccgggtctacgaacgcgatgctcatcagaaagccgggccccgagaatgcccacagcttgcgccacgagaagggcggcatgcagccccccgaggcgtagaaggcgcgctcttcgctagcatcgcctt

SEQ ID NO: 2968 - DNA, 367 bp, Zea mays
agttctttctttggttggcaataagaaacaaatgttggacagctgacagattacagttgaggggactgccacacccagatgtttgcccaatgtgtgatcaagcccaagagacaattcagcacctccttactgcgtgcatttttgcccggcaattttggcatacaattcttgctgctattggcttggggcatctcactccgactgctgatgagggaaatttttcagaatggtggggaaaggtgagccttagagttaccaagacaaggaaaaaaggacttaactctctgatcatcctgggggcttggtgcctatggcttcagagaaacagagcagtgtttcatggggagtctccttcattgcccaggat

SEQ ID NO: 2969 - DNA, 642 bp, Zea mays
  misc_feature (268)..(269): n is a, c, g, or t
  misc_feature (292)..(294): n is a, c, g, or t
  misc_feature (296)..(296): n is a, c, g, or t
  misc_feature (308)..(308): n is a, c, g, or t
  misc_feature (310)..(312): n is a, c, g, or t
  misc_feature (531)..(531): n is a, c, g, or t
  misc_feature (596)..(596): n is a, c, g, or t
  misc_feature (598)..(598): n is a, c, g, or t
  misc_feature (612)..(612): n is a, c, g, or t
  misc_feature (619)..(620): n is a, c, g, or t
ttgcccgtgctgctcgtgtcgaacccctctattgtatgcgtgaagttctctgctcgccacggcgcgtcgagctcccacgccgaatccttttctagctcgccgtgacgctcggcgtcctgcctgctttgctcacccacgtcggctactcggtggtgctccaactcatcagctgtcgttgtcctatccacgtcagcacgcgaccgtggtcgtgttcgttgagtttgccaacgctatgttgccgattcgactgtcgtcactggtgtaaaanngcgggggtccacgtgatgctggnnncnatacggggcgtnannngatcctctgttgcgcacgtgaagtgctctgctcgccacggagtgtcgagctttctcgccggattctttttcagctggtccgtgacgcacgcataatgaacttgatgtagtcgctgcgtgtgtttgtgtccgagcccgcccggtcgcaacctcgctttgctcttcgcgtcgctgttcgccgggtcaagccccatattgccgcgtccctgtttcagtttgncgtgccacaccgtcatcgcttctgtcgcaagctcgttagccactgttatcttgaccgcgccagcncncgactgtggtggtnttcatcnnattctccaacgctcctgttgcc

SEQ ID NO: 2970 - DNA, 343 bp, Zea mays
tggcgtgatggcttcccagatccatggtgatgatccctcggtgggatccatgccacctgttattggaaatgagctgctgatggcagctgatgtcttggccaaaaatgacgaacctcgtatgggcatggaattcgagtctgatgccgctgctcgcgcattctacaatgcatatgctttatgctttgggtttgggattcgtgttgcccgatcccgtagtgagcgaagaaagggcgtcgaggtgctcgtcatgaagcgttttgtgtgcttgaaagagggacatcacaggaagaagaagccagttgagcctagcaataagaaaaagaggaaacgactctctatacgg

SEQ ID NO: 2971 - DNA, 208 bp, Zea mays
ctcctcctgctcgtccctgtctctggcgcgcgcgctgctcagctacgatgagctctcctgtcaacggcaggggctacggcgagctccgtcaactgcgttgaacatggaagacaaagagcagggaaacatttgatgtttgtatctgaacatttgctagttgaaactgaacatttgctgctagttgaaaatgaacatttgttgttgcatg

SEQ ID NO: 2972 - DNA, 569 bp, Zea mays
  misc_feature (565)..(566): n is a, c, g, or t
tggtgtactatcggggccgagctccacatggttctcgcaccgattgggtcatgcacgagtaccgcctcgacgagagggaatgcgagactgacactggcttacaggtgcaactttgctattgctaccgatgagtaaatctatttatgtgtactccatacagttgttgttaaaccctaaaccttgcagctagcatgcatgaaacatctatcatactgctgggtgactgatatgtagctgtgtttctgttcactgcaggatgcatacgctttatgccgagtgttcaagaagacagcgcctgggccaaaaatcatagagcattatggcgcagtgcaccatcccatcgaacaccctcagtggatggcagaggcaggcagtgttgaccgccactccccaacgctggacttgtccagtgacgctagaggtgacgacttcgagagcagcagcttctcgttcccgacggaggcgcccagcatggactccatgcacgggatgcagatgagcgcaccccacgaggatggcaaatggatgcagttcctgagcgaagacgccttcaacgccaccaatnnccc

SEQ ID NO: 2973 - DNA, 334 bp, Zea mays
tcaaccgagaagaatcttttgcttattctgtggtgagaacaaaggtcataccaccaggatgtgccatgttaccatccagaagcaaaaagaaatagccgaagcgacagcacaacaggctcagccgaagcaggtcatgcacactgcttcgtatcattcgccttacatcccagagtatgtaggcaatcaccctgcagtttctgttgcttcggcgagtcaacctcaggcttcctggcaacaacctccgcctccaccaccgctgcaacaaggccagcagccagaagggagccaatatgctccacaccaaagggacttcagagagcagtttatcatgcaa

SEQ ID NO: 2974 - DNA, 439 bp, Zea mays
ctatctggagattcaaggaattctgtgaatgttggtggcttttggttgaaggatttaatagctgcttcgcactctggtttttggagttactttctgcatcgagtgaatccagttcctgtttacgctggctgtctgagcttgcttggctgctggtgttcccagagatttataaaaacagggttttcctccgtcattccgccgcagctagttcagatccagagcctatataaagaacagcgaccgctgagaacataaagatggttcttggttgttcatgtactgtgtagctgtatataatagaaacattgcaggatcagtgagtaattctgtggccgagtaaagtgcagtggtggaaccgtggaaggcatgtgttacctactggatataaatatgatgatgtgaatgttcagttgaaaaacttgggtgacatgaactgatg

SEQ ID NO: 2975 - DNA, 828 bp, Zea mays
tgggtcttagaagtatgtctttggcactcactttctttggaatttgctggacaaatcctctttactttatgcataacatcctttgactcttccttttgctttttaaggagcacagaagaagtttcattacagcaaaggactttgatttcctgtcttgccacggaattaatactgtgagaattcctgtcggatggtggataacacaagatccttatccaccttctccatttgttggagggtctttggcagccctggacctagcattttcatgggcacagtatgttgtgcctccaaactcttctttgcagtatttaatatccctgacctttcctgatgctatatttacttctgttggattagatcttatggtttgaaatgtataatcgatcttcatgctgctcctggttctcaaaatggaatggaacatagtgcgagcagggatggttccgtggcctggccctcgcctgaatatatctcacaaacattggaagtcattgacttcctggcgacaaggtattcgttcacctatcatttcagcttaaaccgtttgaatggtactacctccgttctcgaatattcgtcgcccgctagttcatttttgaactaaaccgcgacaaattaaaaagaacggagggagtaattacctgcaattctcctgagctggttatgtcagcgattgcatcttctctcactgagcatgaaaactgcatttgctagtagcttctgatgttcttagatatcctagtctgtccttggaatgttataggcgactttcctggacttgtgttttgcaggtatggaggccatccttcccttttgggtattgag

SEQ ID NO: 2976 - DNA, 903 bp, Zea mays
  misc_feature (841)..(847): n is a, c, g, or t
  misc_feature (890)..(892): n is a, c, g, or t
  misc_feature (899)..(900): n is a, c, g, or t
catcgcgccgcaggtagtttaatttcttagaaatgagattcactctttcgtgctgtatgtatgatggttctcgagggctatccgtttctctgaactcatttcgggagcatttctgcagatttggtggaacaaacggagcaccagtcatggcagctggttgcgcagacctgtactacggctgctactggagaggtatgatgtctcttcccagttgtatgcctgttctttcattgcagcatgttctaaatcaaatatctcgaatatccaaattgccaacaaattttcaatctagtcttatctgctttcatttgcttgtagttagtttgattgggcatttgaaatcatttcatttttgtttccctttataggccatctgcgcaaaataatagttccataatgcttactggtttttattagtaggcctgtcacaatttcggagtggtgtggtacatcagtagagtaaatgacatgggagatagcttgaagtgaattttgggcctctcaatcttcaaggcatcattttctttcttgtttttggttgacactagctgagttgaaattcatagttgtaatgctcaagcctcaaatactaattgggacacacattttaacaaggataatgatgataaaatatttctgcagtgttttcacatccatattagtttgttgttcacatctaacatgttttgtcatatcctactcaggtacatttggaggttatgcaaaagttgcaggataggcttcccagtctcggcacatttctcggtgattttcagcacaaacttgaccagcctcttagaggtgacgatggcttggttattgggaacatgtctttagcacnnnnnnnacaggtttttcagattgcccttgttctgtcaatcttcctccannnggatgcnnaga

SEQ ID NO: 2977 - DNA, 1129 bp, Zea mays
gttttgttgagagatacaaaaatttgagttccttcaacgaaactgaggtagtgttccaaataaaagctttatcttcgctgatcagcatagaatatgttggttttctgttaatcgaaagtcgaaacccataacttcttttgctggttttcttatagctcgcgaatctgcataaggaattgaggcctcatattctacggcgggttataaaagatgttgagaagtctttacctcctaaaatcgagaggattctacgtgttgagatgtcacccctccagaaacagtgagtactccgggctaattttcttgaaccaatcttttttgacaagttttcttattagtttggatggaatcggaacccgcattcttaaatctttttttccaagctccaaaccctccctggaccttggagctgccaaacatgcccttattgtacactgaggctaattttttggtttttactaggtactacaagtggattttagagcggaattttcagaatctgaataaaggtgttcgtgggaatcaggttttcgttacatcttgttcttctaatcaagttcttatgttttatattttccgtgcctttagttatttcagttggcacatcttggaattgaatgcaatttggctgtctcagtatgtagcaaattgaaccttatgtctcagtatgtatatataccgttgctgctagtctaagaccatttttcttgctaaatgctgtggtgcttgccaggatcttgattggaacaatgttactattctttctcacctactattgctaggtcaagcagttcctcacctgctattgctagctcaagaagtttctcacctggccgtgcattacctatcaaactggagcatgggcaaggccacaaggcaagacttggctgttgtgagccaaatctgctctcccatgtgggcaatgattgattgtttataacttcatgtctgatctactaaattcaaataattagtgtgcttggtaacaattgttcttaaggcacatccaaatctgccctccaaaaaattagtgtcctgctatcatgttttatgtgactgacttgttaatgacatgcaggtatcacttcttaacattgttgttgaattgaagaaatgctgcaaccatcca

SEQ ID NO: 2978 - DNA, 532 bp, Zea mays
gcagtccggctggcacttgcgccgcaggtatttgcaccctgcgcacggcccgcctttgccgccgcctgtgatacctgcagagaccgtcgatccaccacccgtgggcggcgaggccacagtgaccacggatcccatggtgacaaccggcggcaccgatgatgctgacgggtcggccatctgtgcctacgcgaggaactgattaagagatccatctcagcgtgagaacccaatagagatgagagcgtgagaacccaaaaccctaaacccaagagaaatataatggcagaatgagaagcatatcaagcgcgcgttcggatccgatgttgaggagttagagggaggttcgtacctttaattttgttttcctccggcgaagatgcgaggccggccggccgcccgccgctccggttcaaccccggctccgagagtagccttttgctcctcgtttgaataggctttggttttttaactccccgcctaataacctggcgtttcgggtgtttgttacggagagagaacggatagatatgaa

SEQ ID NO: 2979 - DNA, 481 bp, Zea mays
tcggttcctgtggggcgcggacgccgaggagttcaggccggagaggtggctggacgacgccggcgtcttcgtccccgagagccccttcaagttcacggctttccaggtgaaatctcacgttcgattcgaccctgttctgtgctgttgctgtccactcgttttctcagtttacttgatgagctcttgtttgactgttgcgtaggcgggccctcgcgtctgcttgggaaaggaattcgcgtacaggcagatgaagatcttcgcggctgtgcttctctacctgttcaggtttgagatgtgggatgccaacgctaccgtgggttaccgggccatgctcaccctcaaaatcgatcgcccgctgtatcttcgtacgtcgctccggcgatgaggtgaggcgggcggcatgcctcaatgtcaaacggtcagacacgtctgtgagtgtagtgtaggaaaacaacatctccaaacatcagcatagtcttcg

SEQ ID NO: 2980 - DNA, 354 bp, Zea mays
agtatgaacgggactagaataatttttccaaggttagaaaaacaattttccactagaaccatatccattttttacaaaacatgattaacctagacagacttaaccataaatagcacggttgccacacaaaaaacgtaaaggcagataaggatgatcaaaggttgcaaaggcgctccaaagggttaaaaacataaagcaacctactgtcaaaatcgagctagcttattggacatccaagcccacctgcaaaactggacaaatattcaaggctcctgatccagcggaaaaaatttgtagggcagcttgcttcagcaagttgtaagagctaatgatgcttgtaaggacacgattcca

SEQ ID NO: 2981 - DNA, 354 bp, Zea mays; identical to SEQ ID NO: 2980

SEQ ID NO: 2982 - DNA, 236 bp, Zea mays
cgccgagcctggtcacatattaaacactgatcggtgggctctgccgtggggggtaagataatggaaggctttgagcttattggaggagattatcgccaaggaccgcatttgtccctgatcagctgctgtacaatgtgatcatcggtgggttctgtagactccggcaggtggataagtctcgcacaatctttggaattttgaggaagaacgaatgtgagcccagtgccttcaattaa

SEQ ID NO: 2983 - DNA, 649 bp, Zea mays
  misc_feature (539)..(539): n is a, c, g, or t
  misc_feature (575)..(578): n is a, c, g, or t
  misc_feature (598)..(603): n is a, c, g, or t
  misc_feature (612)..(619): n is a, c, g, or t
  misc_feature (629)..(636): n is a, c, g, or t
tgtaaaataattgccacttggtcatgctaataggaccaacttcaaggtttaagggcaattcctccacagtctcgttgagcgctattaatttatccttcaatagccaaaactcattgaagaatactgtaggataataatcgcccgtaactggatccacattcagatctgtcaagctattgtaaaggaaaaccaaaaccattctcaaaacatgtaacttttctatattccagctttcaacattagttggattcaaagttcaaacaatgaaatttttgaagaaaaaaacagtaagccagtaagaacaatatctatgctgtaagtgtaaaagtggaactattcaactatcacaaaacaaaaatgatatatgttactatctgttacaatttaaggatacatggagcaacaatgggaggtacattattgttgggatacctgtaaaatgtgaacggggcaatgtcaatcatatgcagagacgatggacagattaaagaggacgcataacatagagaagatgtacagagcaaagaggagacagcgtngagaggatgtacagaacaacaagaacacataaacannnnagctgatgctatatacaacnnnnnnaacaacaannnnnnnncatatgatcnnnnnnnncatatgctaaaaa

SEQ ID NO: 2984 - DNA, 352 bp, Zea mays
cggcttgatagcaagggagatatcagtaccagtgacaatcactgatcttttgttttacacctaaattttgatttctgaaatcagttttcatgtgtctgctagttgtatggagtacttatgctgagcccatgtcttgtccgagacagataattctgtgtgctgttaactttcccttctgtttttttgctgctccagtgattagattgacttactaaaaaggtgtgcatttttgtgaggttgctaatgcttctctagagcattacttgcataaatatgtcaaggctttgttgacgtggttattacgtagaatttgttggattagaatgcaaaatgaatgataatatgctcctat

SEQ ID NO: 2985 - DNA, 870 bp, Zea mays
ggaatgaagtaggcagaacagataacaagatgtgagaacaactagtagtccaacgagtaaccggcacatcatgttatatgtacatggatcatggatgaacgggatctttagttgaggatggtttgtttgtttgtttgtttgttgaaattgagaatggtttgaacaagacggtagcggtgactcaacgacatgcttcagcttctaccggtgacctatcgccttgtattctttatttgctatcgattgaccagacgattaccgttgccatatgcaagtagcgataattcgtcgcgagcgaagcatgaactgatctgttagaagcagtgagcaaccaaaagcagaaaccagaaagcgaaagactgtgggtatagtaccttgtgggtggaagcagtgtcgtcctcccagagcgggcggagggacatgtcggagtggcggtggacaatcccgcgcggcaaggagtgggcgccgttcctgtcggggccccagcgaatgcgattgcggctgcggatcgcgttattctcttgcgtggcagaggcaaagccggccttgccgagatccacctgaagataagatacagcagcatgtgtattatccccgggttgagagcagcgggcgagggtgaagaaataagcgagagagagagagagagagctaaaaatggaaagacgggcgtggacggaggagggagggagggaagagggcgaccttgaggtggtggtactggatctggaggcaggcgaggaggacgagtgcgacgaccgccgccacgacgccccagcggcgcggcggctggtgcttcatgtcgtcaagggcggggccggcggagagcttcggggctggtctggtctgggctggtcttcaaggtctgga

SEQ ID NO: 2986 - DNA, 763 bp, Zea mays
acgcacagcttgtgcagcagaactttcaggctcccagggggtacccgatgcctaggagggaggaggggccagagaaatggatggaggcagagctggggatgaagattgcctgtgggttcgagatgatgtatcaggagaggaaacggcagggcgaggaaggtaaatgtagcacgtgggatgtttacaggaagagtttggaggcaactgggtgctttgacgggctgtatcctgggtcaattgagtataagagggtcattgaagatgcaatgcaatattacaagagctctaatttgtattcccgaacaaggtgcttctagtcactctttctagccatgtggattcacctatctgctttgttactatgcgaaagaatgtcatcctgcaaccatcccatgcataaaatgtctaatttctagttcactaccgtttaaaaaatctacctggtttgatgtgcattatttgttctttttgaagaacgctatagccattgtctctattaaatataactatataagtacaaagtagtgtcatttcaataattcttgaggctaccaggatttctttaccatactgtgtgaagaacacctaatttacaaacagatgttttcttttgaacttgattaatgcaaatcccttagtgttttaatactcttgcaaattgcaatacgtcacagggagatactgagtgaaccagtgcggcgaattgatgaaatcctatcaatgctgtactcaactgatgaatttaaaggcactgatcttcctt

SEQ ID NO: 2987 - DNA, 375 bp, Zea mays
tgctgttctatgggactggaaacgccaactgcgcaacgctgcctcccaccagcaggagcagcacggacgacatgctctccctgctcgacttcagaaaggaaatcagcagtgatccaggaggtttcctcagatcctggaacactagtggtagtagcgccgccgactactgcagctggaatggcgtcacatgcagcagaacgcacccaaggcgggtcattgaactcaaactcagcagccaaagcttgcaaggccgaatctctccatctcttggtaacctaaccttccttagaacgctgaacctgtcctacagcagcttctttggccagctgccccttcttagtcgccttgtcaggcttcaggaccttgttctaaaca

SEQ ID NO: 2988 - DNA, 273 bp, Zea mays
  misc_feature (263)..(266): n is a, c, g, or t
ttgagatagcgaagcaataaaagtgaaaccttttattctcttttacgattgacttgataaaaaattaaattcggaaatgaactttatgctagccgctacactggtgaggtaagcatggacgccagcaaaaattgacaggagatataattggtagagaacagcaccatgtgtgggtctgaaattttcaacagctcagtatatatatatatatctccttcatttccctatgaagtcgtgatttttcagcaccatctgactctgannnnccggatt

SEQ ID NO: 2989 - DNA, 681 bp, Zea mays
ccgaaagaacaggagccacactttggtatagtgcaaactaaaacttctccctgcgaatgatgtggactgccatggtaagcttactgtctttcttcttcagttcgaatagacagatgtcacccacacgcaggccattgccgcgagcaaaattgggccaacctccattcagaaaccaccttctaccattatgaaacatcaattttgccttccatgtcgtccccccgcactggagcaatatggtttgccctttagttgggagatataccgaaccatatcgtgaacctaattcctgatgcattaagatcagtagttagcaacacactacaggttagttcaaaaactctctgaataatctagaaaacttctaggggttataatggcggattgtattcgtaattttgtatgttgacggttatagagaaaatattacattttgatgatttgatagcaaagagtttgttcatatgaaggcaggtgaatcggtgagctctcaggtgacaaaaaaatgcccacttaaacaaaatattaaacaaaataaggttaaggtgatagagaagcaaccttgtgggtaaaaatttacaattcaagactaaacagaaaacgaattgagcttactagcatccaacgttgagcgacaccaacattgttgttcttcattactgccacacaaatgggaatttc

SEQ ID NO: 2990 - DNA, 368 bp, Zea mays
tgatgcagctgatgagaaggggagtgaaaagaagaagaagaagaagagcaaggaaggaagtgatgctgatccagagagtgctcagaatggagatgatggcacacatgctgagagaagtgagaagaaaaaggagaagaaaaagaagaagaaccgagatacagaggggacacaatagttgtagtttatgttggctggttacctttatttaaagttgtcggggaagattgaaatacttttcttgcttcccttgtgtctgctgtgcctaatgtaccatccttaggtagttaggttattgctattctactgctttgaattgctatgccaagtggtgatattttcattggaactcttgaacgatggctcataca

SEQ ID NO: 2991 - DNA, 475 bp, Zea mays
catgcgagttcctctgcccgtttctcagtagaaattgaggtctgtgtacccatagtgatcgatctccgtgtacccatacgagtacggcagcagttcctctatgtccagctgggagctccaagaactcatcttctggatctggctgtggttgatcgattccacctctgcaatgaacatgctgtagacaggtctgtggtccgagaagcgcgactctccccggacgtaggagagctggctgagcccccttccgtaccacaagatgcggtcgcacctggaatggataaacgggttgccaatttttccttagctaactaactgtgacaaaatttgacaaatgaactggcgaattcaagaattgttattgcagttacgtatatatatataggtaccatgctggagtccgcttcttctccttctggttcaggtcttctcccgcgtatttgtcggagttgttggagtatttataggtcggtgg

SEQ ID NO: 2992 - DNA, 648 bp, Zea mays
tcagcaggatgttggtgagctgcacacagcaaacgatcgacgacgggccggggagatgagatcgacaagttgagatgaatcgccttgacgacgtacgagtacgatacgagactagattattaattctgcctgcagattcgattctgatcgaccagcgtaccttgatgtctctgtggacgatgcatccgtcagggtgcgtgtggaggaacctcaggacggatgcgcagtccctcaggatcttcacccttgtttcccatgggagcacggagtcactccctgcatgccaacgtacacgtaaccatcaagaacagaccagcagaacagaacgtaaaatagattatttctcgcttactgagtaggttctgggcaaggttcccattggcgcagtactcgtacaccaggtactggtcgccctcctcgtcgcagtagccgaagaggcacaccaggttggggtgcctgaccttgcacagctgctccacctccctggtgaaggacccggacatggccgtcctgtggatgtgcttgacggcgacgagctgcccgctggggagcaccccctggtacacctgccccgcgctgccggagccgaggtagatcctgctgctcgcgtagtcgacggccctctcgatctcctccctggtgaacctg

SEQ ID NO: 2993 - DNA, 781 bp, Zea mays
  misc_feature (727)..(730): n is a, c, g, or t
acatgattccagtaataatatacaagcacaaatcagacgacggagtaggctgcctgaccctattgagaaagagaaagggatcagtctctggtccattattaaagatagcgttggaaaggatttgacacgagtttgtcttccagtttacttcaatgaaccactctcatcccttcagaagtgctttgaggatttggagtattcatacctcttggatcaggcatatcaacatggaaaagtggtaagatcacttttacatctttaacattgcacatgtccgaggaatttcatctgctttccatgagtgccatagattaatgaaatcatttccaatccattttcttattcatcacggcatcagagttcaaatcagcaaactcaatcttcaaatgtggttctgatgcaagctagacgtgtcgtatctgctgatcagaatcagattacatatcagtatcttttgtgaacccatgatagttatgatgtatagtatatcatatcactattgttcaagcagtatactctgctagtaagcatggcagtttactcatccttagaaaatgaaaggtgttttcagagtattatagttgtatctgtaagttttgttcaggtatgatgtacaatatcatttgtgagctagggaaatactgcatttctgtgtatatagcatgtttctaatagcatgcatgttgctatcttacaagaacttttgctcatttatatattttttatnnnntagggggacagcctcatgagacatcctcaaagtagctgcttttgcggcctc

SEQ ID NO: 2994 - DNA, 591 bp, Zea mays
  misc_feature (586)..(587): n is a, c, g, or t
ttcgtcggtttttgctcactgaattcacctctaagaacactcgcagccctttgaatcgcacggcagactttccacacttcatgctgcattgccacctcctgttccttgtcactcagattggcggaccgtgagatggcgtcagcgatcccagggaagaacgacagcttgctttcgtagtcctccggaggcgagtacaactggtgaaaaacaagttttagtttaaaggaaaataatatacaagtcgtcaagtccgctgaaatgcgtttctcaccagatgcttaaaccatcctcttccttggagcccttcaggttgcaggaagcttctttcagcaagtaggaggcgatcgttcaacaatcgccttctcatcctggtgtgttcatcatataaatccatctgctgtagtttctgtattttgaatccgaacatacaacggagcacgtcatcagccagtttcaaacaccacttataaatcgaaaaaaagaatattccattgacaaccagattgtgaaaatagaccgaccctaaaatccatgaaatcagaagcacggcataaattgataccttcatctccttcagaacttcatnngctg

SEQ ID NO: 2995 - DNA, 635 bp, Zea mays
ctctgccttgagctatgccccagttggtagcaagataccagaatcagaagttattgttgatcctcagaaacagcgcctaattgcatatctcaggaccggaaagaactatctgagaaaccaagctcctgacaaggcatttcctgagtttaaggcagctcttgatcttgcacgatctttaggtgatcatgttgaagagaagaaggcagcacgaggattaggtctgttcattcttttgtgaattatagttgtatggtttatttttgcagatagttccatggaattgtgagaatctttaaataggttcctttttgtttttaatttggttaaatggtacatgatatgcaagataacgagggaaaatgttttccttgaagttctttttccccttgcgttacagcaaaaaatgaaaccacaacacagtctgacgtctttgtgaaaagtaacgaaattgctttgcattctccaggggcatccttgcaaagacaaggcaagtacaaggaagccataaattatcattccatggtgctaaacatctccaaggtgaccggagaggatgcgggtgtcactgaagcatacggagcaatagcggattgctacaccgagcttggtgagctcgagaaggcaggcaagttcta

SEQ ID NO: 2996 - DNA, 279 bp, Zea mays
gaatcccacaacggccactccgcccaattgtggcgcatgccaagggatggctcgcccagcacctcgggaagactttcgccttgactgagcaggggctttgatctcgataagcgccacagtgaatctcgacgtcatcccgcgcaaggacgctgacgcactcataaacaacctttagcccatactcgggcactgttacaataactacggcatggggagccactcgcctcgtgggctccggtgtatggacaatccctcggtctctgcctctgctactgatct

SEQ ID NO: 2997 - DNA, 405 bp, Zea mays
gcgacctacgtttcccttccagaggaacagcatgatctcatcttgagcgacaagattcagctgggccagttcatccatgtagaccgtctagaggctgccactcctgttcccatccttagaggagttcgcccagttccgggtcgccatgcttgcgttggcacccctgaggatcttgtggtgaccagctcctccagttttcatggcagcaagaaagcgcaaccatcaaatggaacgaaggatgccagcatcttgtcgctagaaaaggaaacgagcaaattggagaaaataaatgcttcacgtaagcttaccgggacggaaaataagaagccgatgctcaccaaatcaaactcttcactgtcaagacaagctttgaatgtgattggtgataagaaggaagcggttaaa

SEQ ID NO: 2998 - DNA, 207 bp, Zea mays
  misc_feature (196)..(199): n is a, c, g, or t
cgatgagtgcatgatgtgcaggaacccatcaatgccttcccaagaaatcgagaaggaaaaaacgtaggaaagctagaactttctcctttttatttatttttcaagtttttgttcatattaattttgactcctctgccctaccttctctgggttttaggagaattcaattgataagttcattgttaatagtaagcannnngtgcatcg

SEQ ID NO: 2999 - DNA, 656 bp, Zea mays
cagcctcagtagtatgtaagtatgtacccatttccatcccagctgaagtgagcccgaggtatatatggacggtcacctcgcgttgcagcactgcgcgacgcctcgccgtagcttctcccagaggcacaccatctgcgccggcgactggtagtgcgcggtgaggtagccagcgacgcagccggactggcagaacccggcgctgtggacgtacgccacggcgctccccggccccgagcggttgaagttgaactgccccacccacatccccatgctcacgtcctccatcttgaacagctgaggaagaaacgcaatcatttgttgttgtttattcccttgacgactcaatatgtaatcatttgttaagcgcccgtgcactgctgcatggtgatgggcacggcttttgactttgggtaaatcttttcagggtcaggcatgactgggggttcgtgttttttattatttttttctttttctgttctcatcaagagtggcatcatccacgggaaccgaagttaaagcagcaggtggggttcttgagtgctagtgtggatcccatttggtttgcaggatgcagctaatgttaccctctgatgcgaaaggagtagagggatcttacatttagtcggccgttctccatttcagatgcgacgaagttt

SEQ ID NO: 3000 - DNA, 397 bp, Zea mays
actgcctcgtgctgccgaggcggcggctacccgtaggaaggacgatgtcatcacaacaaccaccagcagcagccgtggatcatcctcaccgtcgtcgtcaccctccccaggagcagcagcagagaagaaggagaagcccaagggcggtggcggcgcgacgtccgcgaagaagccgtcgccgccggccaagtgcgtgacgagcaaggactgccacctcaagcggctggtgtgcgccaagaagtgcaccatggccgcacacaacaagtgcgccgccaagtgttcccactcttgcaacgccctccccatctgcacctagctgacatgcatgctatgtaacccccagtaaaaatattatttatttaataaaatggaccacatgtctgtagttcaatccgag

SEQ ID NO: 3001 - DNA, 906 bp, Zea mays
ggcgcgtcggcatcacgatctcgtgaaagatcgtgaggttagtcgtctatccatgctctcgctcccaccgtgaaaggttgccctgcgcgtttattattagggctagagatttccgccgagatagtttcgttttcgaataatcaatccttttctcttcatatgtttttctgtgcaaactaaaattgtcgaacaaaaaaaagattgatttgatctgttcttctcggactattcgccattgaatcattgatcgattttgttgatctctattacaattacaactacggtaatggatcatgatctaaatatttctttataagttgttaaatatctaaattattttttattcaaaaataaatagaaatatgatccgatcctaattcgattcgattcttaaattttatagattttatagtgtaaatatgatcattgtccctcctaattacaacatgcttgttctcaaattcatgttctctactttattttaggcattctcctgaagttattaggctcagttggactgtgaacagatgtcgagcaagtctgacaacggaaccaatgtaagttaaaagatatatatatatcacctctgggcaaattatttgtagcacgactcatttcaagaaaaaaaaattcacgatcttatcgtaagttcagttcatcgcaaagattattatcggcaaagattattatagtacatacgagcagatgccgccattacacctcaattaatttttagcagatcgcattttctctaatcaatgctattgatttccaaaatggatgttaccaggagcaattggtgaacgaatattatgaccaagacgaggacgacctaggtgacttcattgtgtatagcgacgacgacgatgagtcgtgaagcacaagcagcaccagcaggagtgagag

SEQ ID NO: 3002 - DNA, 519 bp, Zea mays
ctccgtctcaatttcaactgcctaaatgcattttgggggtatttttggtattaattctgaaacatctcattcaataactgcacagctcaatgttcttcagacagaaaagaaacacttaatgtctgttgtgatgatttctagtgataaccttgagagctccagtttcctcatatgatgaactcatattcatattggtttaattgttatagagaagaagcttcagtacaaaagtcagatagatttaagaattaggaaaaagaagtcaggccagaagaagataactggcttccaggtaatatagcacagagtgtccattttccgaccaactttttttgttaagaaagacacattcttgttttggatgccagaaggcaaacaccattctgacacatccaacctccaacgtgatactgttgtataccactgagttaaatatctgtgttccttgtgacagtttgctcctggaagctcctcggaagttctgattacttctgcggattcgagaatacgagttgttaa

SEQ ID NO: 3003 - DNA, 380 bp, Zea mays
acagaacctcttcttctcgcaggtggacatgaagctggtggcgcgggtgctgaggatgccgaggatcaccagcgagcagcttcagtggtgcaaggccaagctcgacaagatcgtcctggtagataggaagatccacagggaggcttcatttttgttgttcccctgttgagagagtacgtatatatatatgttttcttatttttcttttcgatcgcgtttgctcgataaaaaaagggaatatattcacccatgtaatcagtccacggctgtaggaattttttttagcgttttggtaattcagtccttcacgcaggttcgtaattgtaattgtaacttgataaacaggccacagtttacggagctcatggcgcttccatgat

SEQ ID NO: 3004 - DNA, 420 bp, Zea mays
ctactccgtgttctcgccgcccacgttcctctacggcccgcacggcggcgagctgtgattccaaccgtacatgtatgtatgtatgtgtagatgtgtatcgcattaattctagctagatccaacgagcatcatgtgtatcgtatgtgcatgcgctgcaggctcggtagcacgcaagtgtaatacgtaattaggattgatttctgcacgctagctagctagcaacgcaaatctctgttatgctgccaccggccggcaaagtagtggtacactaatataatgccctcccggtttgatgggtggtgcttgtggtgtgtgggagccacgtaatctttgcttggaagggaattgcgttgtacaatgatgaaatgggccgggtaatgcatgggactctggtcaagtattttgagttaacaattccct

SEQ ID NO: 3005 - DNA, 455 bp, Zea mays
cgacgacgacccgtaccgccaccaccggcagctcaccgccgacgacgacgcgccgagccacgctaggatgatggacatcaactagcggccggccggcgcccggccatctcgtactcgtacgtcatgcatgcaacatttctttccctcctccagtcctccttcctccccagctcgccgcccatgcatgcactcctttctggctagcaggcatggacgagaggccgtgatggatggatcatggatgtgcgatgtggtagcagctgcttggtggtggtggtctctgactagatgtggtgatagtgcagactgctagtctagactctcacggccggcggccggcggggagtcatgcttgagcgcaaaagtgaagctagtagctaattacgacgtgcatggaatctttcgcttgtttgcttgctgttggactttcttacaataacatttgttcgatcgat

SEQ ID NO: 3006 - DNA, 380 bp, Zea mays
tttcagatagtcaaggaagatcaccaatagtgatgcacttgtgtagcagaggtacagaggggaattaacagaggtaggaggtaaccttttgcctaaatcacaaacttttatggggggaaaggaattctcaacttacaagctacatgtttagcagcaaatacgacggctcttactgagtcatggcaccacctgtttatgttccagtatctcatggcatgagcatgacaccggaacatctaaaagctagctgttttcctgttctaggagagcacgagatcgttgtcaccaagatgtgggggcctcatgcacacctgaacttcatgctcctctggtccaacccggtgcttggggaccatgatttccagcccagttcctgtctc

SEQ ID NO: 3007 - DNA, 533 bp, Zea mays
gcgagtacaaggagggcgagatgctgcgggtgatgccagagtgcaggcacaggttccacctcacgtgcctcgacgcgtggctgcgtcgtagcgcgtcgtgccccgtctgccgttcgtcgcccatcccgacccccgtcgccacgccgctctctaccccactctcggagcttgtcccgctgtcgcagtatgccgccgaccgtcgccggagcaggtgatgacgcttggcatttttctcatctcccattctttccctttggtctctttgattgataccgcttttatcgactctgggataccaatctgattgttccgtttgtttttggacaggtttgggtgattgatggttgatggagatgtgaactgttcggctagagctaccataactaggacaaaagtttttgcttgacagcagtacattattggacccaggaggaagacatgcagtgtacatacattgttcttctgttctaagatagtgtctatcaagtgaggttacctgtgatcttatagttgtacgcggaagattgttctat

SEQ ID NO: 3008 - DNA, 554 bp, Zea mays
aataatgaacacacacagagagaggagcagccgaggatgccaaaccaactggattggtactatccacagcagaggagacatgctttggctgctcctgctcatttgtttgatattgtgatccagggaaaatgacttgaacactgatatctgcgcaggatgaacaaggagaaaagtttttgaaactgaacaaggatggacaaggtaccaaactgcaactgaaattaacaagttacgaagtccaaactggacaaggatgaactagaatgaacaaggtaccaaactgaaactgaacaaggtaacaaactgaaactgaacaaggtaccaaaccaaactgaaacttgatcacggtaccttcagatgaagtactcatcttcttgtctgcctgagtcgctggagttgataaccagagttggctcttgttcttgatcagcaattcaacgcagtagttggtcggggtctcggggaggaggaggaggaggagccagggatcagctcagggaggactggagggaggaccggaggagtcgttcctcgttcaccaggaaggagaagac

SEQ ID NO: 3009 - DNA, 396 bp, Zea mays
tgatatgaacactggtagcacgcaataccctgaaggttggtactcagacgatgacgacgggcagctctcatggttcaacgctggggtcagagttggcgtaggcatcggcctgggagtctgtgttggtgtaggcataggcgtcgggctcctcctgcgctcctaccaagcaacaaccagaagcttgaagaggcggttcttctgacagttgcagctggtgtagctaccaatgatgaccagagcagagttctgcctcacatacttgtatagttcatgtgtttgttgtgcaggagttttgttttgtttttaggggaaagtgtagatgctgtgttaatgtggttgtgtacatggctctcgccgtttcttgtatggcatggcatgcatgtaaactgtgaagtt

SEQ ID NO: 3010 - DNA, 406 bp, Zea mays
tcaaggtcaaccgtactcaacagacatttcatggttagctggcctatctttgttggagtatcttgacatgagtgaggtaaacctcagcacagttgctgattgggctcatgtggtcaacatgattccttccctgaaggtcctccatcttagttcttgttcacttctaagtgcaaaccaaacactcccacgtattaaccttacagaccttgaaacacttgatctgtctggtaatatttttgaccacccaatgtcatccagctggctttggaatttgacaagcctccaatatctcaatcttgaggctaatcatttttacggtcaagttcctgatgcgctaggggatatggcatctctccaagtcctcgatttgtctggtaatcggcacatgggtactatgacaacaagc

SEQ ID NO: 3011 - DNA, 378 bp, Zea mays
gagagctcccgccggggctcggaaaggagacgccggtgctgagagatatccagatcgacgacaacaacttttccgggccaataccggcggggatctgtgagcacaaccagctgtgggtgctcaccgcccccggtaaccgcttgaacggctcaataccgaccggtcttgccaactgctcgagtctcatatggttgttcctcggaggtaaccagctgtccggcgaggtgccggccgctctatggacggtgccgaagcttctgaccgtgtcgttggagaacaatggacggttgggcgggagcctgccggagaagctgtactggaacctgtcgaggcttagcatcgacaacaaccagttcaccggaccgattcctgcatcgg

SEQ ID NO: 3012 - DNA, 364 bp, Zea mays
cggtcttgtgaatgttacaagcaattgcccaaggattcttgatgcagtggaaccacatgattgtgaagtggagaacatggaaggcaacgtcatttctgaggtcctgagtggaaatggtgctgtttacgagaatggagctaaggattgtgcaacagaagtttgtggaagtaagaatgacaggagggaagaaggtcttttccttctaaatgatcccattataagtcctagtacagatgaagttagcatgactcatagcaaggataaccatgaaaaggagggtatgattctgatcggtgcaagtgaaacgtgtgctgcttctgtaggccaacctgaggaaaattccaagatagcagaagctgctgta

SEQ ID NO: 3013 - DNA, 960 bp, Zea mays
gggcgatttcgatgggttcctttccatctgggctttgcaaaggttggggcaccgccaccgccagcaagcatcgtgggtggtgcgtcccctgtcccagcatcagcaccagtcagcaatcaggaggatggtgccgtgattggaaacggcgagggggtggacagtgctagtggtacacaacagcaggcacagaaattgcctgcccggttgcttaacattcctttgtcgaatgtggagcgtctgcggtctacgctttctgcagtttcactgacggagctcattgaattagtcccgctgctggtgagcagatcatcgacatcggcagatgcacatcctgacaagaagaagcttttctcagtgcaagatttcttcagatatgcagaaattgaaggtaacatcattttttcattttccaacagagaagtgtcttcatttctacttcttcagtatgtagactcatggtctgcaattgccaatcatgtattcattttaccatatggcaccagtagggaaatcatcaaattagatcagtcattattagtcctccacagaaggctcaaatgccagttttacagtcgaagtaattatattatgtacaatttaatctctagagttcttcaaatattcagattcaggatatgccattcatatctacaatttacagcataaaatctggtatgatgttatccattattttaccaccatatctagaaaattttggtgagctactatcaaagatatgcctaccagacattttaatttacccatgcaacaacagggggtaccatcctgttatttttcctgctagtacattttttagtcaagctacgctctatccatcatacgatcttcaaactacagttctaattggtacctcagcaattcagattctgcataacataatgcaatgatacttttgaaaaggttgctatttttatgtattagttggatcataaggtgata

SEQ ID NO: 3014 - DNA, 440 bp, Zea mays
ggtggatataatggaggatatggatatggaggtgggtatggtggtggatatggaaaaccgggctatggtggtggatatggtggaggatacaggcccaaatatggcaggggctacaggtccggatatggatacggtggcgggtatggtggaggatacggtggcggttatggtgggggatatggtggcggtggtggctatggggaaggtggaggctttggaggtgggcatggtggtggtcgctatcctggtggtggagggcaccgtggtggtggagggcaccatggtggatggaattaagaagcattgctacataaagtttctctatgtccgataacaataaatggcgacgataaatttgaatgctacatgtagttccgtgatgaaaatcttatgtattttgtataaaacatggtacatggactgttacgtatgttgcatga

SEQ ID NO: 3015 - DNA, 1313 bp, Zea mays
  misc_feature (1241)..(1243): n is a, c, g, or t
  misc_feature (1245)..(1246): n is a, c, g, or t
  misc_feature (1304)..(1306): n is a, c, g, or t
  misc_feature (1308)..(1310): n is a, c, g, or t
acatctagtgattccacagataagagatctaataattctccaggaaatgaatctgactggaagccattgaggccactaaccccgtggatcactgacatattgctagccgcacctttgggcattcgaagtgactattttcgatggtaagtaatattagttgtatttgatcttttatgtttttttttaaaaaaaaactccagcttatgttttttatgaacaatgagtatatcatggacaatgtatacaaggaattcaataaacagctagccatgataacacaagagtaagggaagggattcattatccagtccatactgcaatcatgtctgcaatactgatttcaagcatgccgctaggaatagtatgaggatacatagttaaaaaataaccggttactgtgatgtactgatgtgatgcggatacacaataattgtttgttctctgctgtgagatgcttttcagcttgtttgctgctcaatgttaattgtttgctcgaatacactttctactttgtaagaggctaagcactttattttttatttcgcatatatcaggtgtggcggtgtaatgggaaaatatgctgctggtggagagttgaagcctccaactactggtcggtaaaatcaaccaccatctttgtgcataatagtaaaaataaaaatcccattttcctatatgtagctacgaatttggattctcaatttctgcagcggaactgttctattttaaaaccccacagggataaactattatgagatcttcatctaatgcatgggtacattgcaggcagtttttttttcttttttgttggcggtgtgtgtgggaccagggtggggggcttccttatgtatgcattctttacctactcttgagcctggagtttggaggactgttttctcatatattttttcatcccttaatatagtttgttctaaatcattagtatgttagttttgtcctaagttaaactatgttagttttgaccaaattataggagaaaatattgatatttaggacaccaaattagtataattaggccagttatgaaatgattttcaccatccagttatttgatgctttatattttaaccatttttctataaacttcgtccaagttagtttgacttaggacaaacccagaagtagctattattttgggatgtaggtagtacttgataatgtttgttgtgtatggaaaaaagttctaacatatccctgtgtgattagcttgcagccgaggnnnanngaagcacccacagcttatgccttccacccccagatgggctgtgccaatgagcggagtnnnannnccc

SEQ ID NO: 3016 - DNA, 395 bp, Zea mays
tcacagtcacagatcgcgcatcaccatcagccacgccaagcaaaaaaactgcaatcgtactcgtacatgcatcgctccaggccagaacataggaggagccctctaggtgaacgactgtaccacggaggaagtggtgacgaggccggagaggaggccgaccagggtgccactgttgtaggtgctggactccgtctgcacggcgttgtcacgggagtccacgaaggtgtcgttctggaatggcccacccaccagggcgcccgtagccacgtttgggttcgggctgggcgagtggagatactcgaaccctttgcagcctgttttcgcatccgcggggatcgacgcccctctgtggtgtacttgctttgggtagctgctcccatatcccacaaggtagc

SEQ ID NO: 3017 - DNA, 701 bp, Zea mays
aggttatctgcatagtcacaacaagaagtacaatcgccttggcggtgggcagcaagaggtgagatatttatctgtttgcatttttttccttcttgcaagaatcctggtgctatggtgagagctgtctcattgagtcaccaggtggaagaaccctctccgcatttgttgggaggcttgtctagatttatcactttcctagatcttactcttgtgagcctccgacgcgtagtctgtcctacaagaatcaaaagtttcaacagtaaattgacaatcatagaggccttaggtcattctactactgatgtaaattatcttataccattatttcattgctatcttatccatgaattctatcaaataaatatttctatatgatttcattttacttgctgccatgaatgcaactgaataccgttcggatatgtcttggtgcaggtctgcggtgtccgagagaagcgagctgagaacatttggttgacagcagagggtgtttatctcccagttaacgggagcaagtgaaaaagcactttctagcatttactatttttaatgttaatcagtataggatcagatattttgccagctttcattcgtccttgtcttaagaaaaacgaacatgggacctgaccccctagtgatatgtttaagttggaatgttggatatcgatgatgtcgacaagaccaggacagcgcatgctgta

SEQ ID NO: 3018 - DNA, 372 bp, Zea mays
cctggacaaagcaaaggtgcgcgcggtgcatgcgttcattcatgattcatgcatggtttgatgcaatcgttcaagctcatgcatgtttgatgtttgatttggattgctgatgatgcccatgcatatgaacagtataatccagcaatcttgtggtatttggatctgaaattctgttggcagattggtgaaggctgggatcatagcctgcagtccaaggagcagatggaaacggtgcagaagatgaagcaggaagctgctacaaggcggcaaagggccttgtcatacgcattctctcaacaggtaaatttaagcctagcctttttcttcttaggttgatatctgtgtcgtttcatgatctctctctcaagtcac

SEQ ID NO: 3019 - DNA, 434 bp, Zea mays
ggcgacgatgccgccgcgaacggtgtccgatgggggagacgacaacggcaccgacgttgctagccgaacgtcgtcgcaccgccgcacggagcacgggcatgggtacaaagtcggcgtcccaccggagaagaacctcctcgccgagatctctgacgcggtgaaggagacgttcttcgccgacgacccgctgcggcagtacaaggaccagcccaggtccaagaagatctggctcggcctgcagcacatcttcccggtgctcgactggagcaggcattactccctcggcaagttcaagggtgacttcatcgctgggctcaccattgccagcctctgcataccccaggtcagttgagctaggtgccccagcagcagcacagttcgtgcactaacgctatctatggcctaacgacaggacatcgggtattctaagcttg

SEQ ID NO: 3020 - DNA, 494 bp, Zea mays
acgtcacgtaccaggtttgttcatccttcatgtagggagacgctacatgacactaagagtgacgcctgaatctgacggcctccgcttcgcttcgtcgatccggcaggagatcatgccggacacgagcgccgagacggcggaggagacgctgcaccggtggctgatgaagaaggacgtgaacacggcgctggacagcctgagcccgcgcgagaagcaggtgatgcggtaccggttcggcatcgagggcgggcgggccaggaccctgcacgacatcgggcagctcatgggggtcagccgggagcggatccggcagatcgagctgggcgcgttccggaagctgcggagcaagaacaggttgcagtcgctgcagcactacctgcggccggcggagagctggtagccatgtcaggtcaggtgctgcgctacgactacgatacgacttcgacgagaccataacccgcatcgttgcacatggctttccatgatgtatgtat

SEQ ID NO: 3021 - DNA, 506 bp, Zea mays
gcgagcgcgacgacgacgtcccggcagccgacagccggaggctactcagcattgaggaaggcaccccacagtgggtgaacggaccagagaggcggctgctcaaaggcaacttccaggccaaactcaagcccaacgtggtggtggccaaggacggcagcggcaagttcaagaccatcaacgacgcgctcggtgccatgcccaagcagtacacgggaaggtgtccgcgcgcgcacgcgcctgaacgcatgtttttttttctctctcatcgaaaccagcaatggatcgagattgcgcatgcatgcgccgatgaccttttcgtgctcgagacaggtacctgatctacgtgaagcaaggggtgtacgaggagtacgtgacgatcaccagggcgatggagaacgtgaccatgtacggcgacggagccatgaagaccgtcatcagcggcagcaggaacttcgtcgacggcctcaccacctacaaaaccgcaaccttcagtaagacgaaagcaa

SEQ ID NO: 3022 - DNA, 346 bp, Zea mays
agagaacgggcggaagctgttagaggaagagagattgcgcgacgggactggggtcatgatgatgatgatgatggggattttcagcgtagcaggcgctgcggcaaccgccatcatcgcagcttgtctggttgggcgcgctcgtcgcgatgtcgagggggcatggacgactgttacagttccaatgacaagcagcggcacttaactccctttcgtcgccatggctgggagtcgaagctgtcttctcgctgggtacccaaggtgaaggtccgatctgtttcttttgcagaccccatcgttaccgctgtttggccgcaggaggataaatgtgggcaagctgaggatattg

SEQ ID NO: 3023 - DNA, 739 bp, Zea mays
  misc_feature (695)..(697): n is a, c, g, or t
cctgcacggtgagttcttttcttggcgcgcgcatgcgtatgctatgcatggatgttggatatgatatgatatgttgttgatcttgatccgcgcgcaggaaaagggctgcccgtgatggattggccgaagcggatgaggattgcgatcggagcggcgcgtgggctgacgtacctccacgaagactgtaagtgaggacaggacgatgcttgtgtagttgtgtgcttgtctgtccgtactggatcactagcttgtctcttacctgcaggccatcctaggatcatacacagggacatcaagtcggccaacatactcctggacgacgccttcgaggccaaggtcaactactctgcagcacagaaacacgcgcggtgcaccatagagtagtatatccaaacgcttactgtataattattatgtgcttactggtggcgatttaatctggggaggaacaggttgcagatttcggcctcgctaaactgacaaacgactcgctgactcatatctccacgcgcgtaatgggcacgttcgggtacgtaattaagctagcagcgcgttgtctgcgtaattaagctagcagcgcgttctttataccagtaacattctatttctattgctctccacacaggtacatggcacccgagtacgcacagagcgggaagctgacggacaggtccgacgtgttctcgttcggggtnnngctcctggagctcatcaccgggcggaagcccgtagacgcatc

SEQ ID NO: 3024 - DNA, 317 bp, Zea mays
acagagagaccgcgagagcttggccaagaggaggtccaagctttctgccgcttccaaggcttccgctgccatcgccgcttaagaatgttcgatgctttgagatgtttcaagacctatcttgttacagcttaaataccttatgctactctgattgtgttgcaacttgcaactgcccctgtacttgatagatttgtattagatgctcaagctacagagggtaggttcctaattatgaccatatgactatgtactaaattatatatctgttgctaagttacaatacatacaaaataagtttactccgccctcttgtagaa

SEQ ID NO: 3025 - DNA, 570 bp, Zea mays
cgagtccacgagatccatggctctgtcgtctatccacaagctccatgccttgatgatgagccgacgtgatcagatcttacaggaattaatcacaaagcttatgtatgaaaacaaacaaaatttattaggccggcatagcaccaccgcgcgtgcacttacataagctagcaggttagggaagccattgcaatgggttaaaccgatcttcaggccacttatgatctccaagactatgacgccgaaactgtacgtgtctgacttgacagaaaacacgccgtccattgcatattcaggtgacatgtaaccgctgctcaaaaaaacaaacaaacaaacaaattaaacaatatgagaatgctcaaaaaaattcagtttgaaaatccaagtctatgatgactactcactacgtcccaacaactcgattggtgttcgcttcatgctggtttccaccaaagattcttgccatgccgaaatccgatatcttggggctcatatctgcgtccagcagtatgttgctcgtcttcaggtctctgtggattattgtcagccttgagtcctggtggagataaagga

SEQ ID NO: 3026 - DNA, 339 bp, Zea mays
  misc_feature (335)..(335): n is a, c, g, or t
tgagcttagtccctatgtgtccgagtttgtgcttcttgaatccaactcaacctttactggcataaaaaagcccctccacttcaaggaaaacaagcaccgttttgggttcgctaaatcacggctgacatatggtaatattgggggaaggttcgtgaagggggagaacccatttgttgaggagtcatatcagagggttgccctggaccggcttcttaagcttgcaagaatagaagacgatgacctgctgatcatgtcggacgttgatgaaatcccgagcggccacacaattgatctcttaaggtggtgcgacggcattccagacatacttcaccttnagct

SEQ ID NO: 3027 - DNA, 707 bp, Zea mays
  misc_feature (557)..(564): n is a, c, g, or t
gatcatggtggaccctctagactatataaaaaattctatgatatgcagcagagcagattagcactttgtaggtaaatgatgatttgcattgaaattagttttaaaaatacctaagacactaaataatatacatcggtactctgatcatggtggaccctctagactataaaaaaaattctatattatacaatagagcatattaatacttcgtaaataaatgatcatgtatattgaaattggttttttaaaaatctaagaagctagataatatacatcggtacaaattagcacttcgcaggttgaaaaataagaacgacgatagctgaataacctaaattctgattgctcgaccatgcgtgtctggaggctagcgcagtggtgctagctccgtggaatcctagagggttggatcgacgagatggcgaacgacgatcacgtggagggtgtggtctcatagacgctcggggacatgagcgtgacgactagtcagtggggcaatacgtgccacattgtccgtgtgcgcggggcgtcagtgtgtccagccctaccgccatgtnnnnnnnnatacaaacatttggatcattatccattaccacccctaacaacgacgtgagcatgacgactgggcagtgggcaacgtgtgccccgtggtccgtgtgtgtcgagcgttttgtgtgcccagccctaccgccatgttggctacctat

SEQ ID NO: 3028 - DNA, 898 bp, Zea mays
gtgctattttgggaggaagattcggtttgtactttcaggtggagcacctctatctggagatactcagagatttatcaatatatgccttgggtaagattatgtatgcctcatttctgttgtttgatggcaattatcttgaaatcctatgttcccattgcatgcatttaatacgataaatatgttatgacttcctcactgtgtttgcagtctgacattgataaggtttatgcaatttcagggctccaatagggcaaggttatggtctgactgaaacttgtgctggagggacattttcagagtatgatgacacatctgtcggtcgtgttggtgctccactaccttgttcgtatattaaggtcagcttcatttcttaactacataccgatgatatggatacaattttttgtagcaaagctgtttttatcacgatgttatctgtgtggatctattttgtattttttatgcctaacaatgtttgtatgttgaaatcttccttagttattggttgttcttagcttcaagattatttacatgcacccgcttagattttttttgggtcttgttcaacttctttcctcactgggtcactgggatatcttatctattcttgtgacagtgaatgagttcttactgttgacctcccacagttcctgacttcctgacatatcagccactgtatttttagttgattgactggcctgagggtggatacttgactgctgatttaccaatgcctcggggagaaattgtcattgggggtccaaatataactaaaggctatttcaagaatgaagctaaaacaaatgaagtctacaaggtatggtgttctcctaccagtatattcatagattgtttcaggcattgaactttaacttcttcacactttctgtaacaataa

SEQ ID NO: 3029 - DNA, 411 bp, Zea mays
  misc_feature (161)..(162): n is a, c, g, or t
tgaaccaccatcagagattgcagaggagcacgatggtttagagagtgttttagtgcctatgcaggggattgtggttaatgggaaaagtacttcagagctattgagtggctctgtatcattgaggtcagctgaggtggggatggcaagcatgatgtgtcttnnttttttccttttttgcaagtttttcagaaaaataatttcaattttcctatacatttttaggtggttggatcacctgttggacgaattgtgaagtgtgaggagtttctgaaggctgcaggacctgttatggtatgtaatatatgcatattgttcgatctacattttatatcttgtgcaatgccgatggatattaaaatgtcggttgtatttatagcctgtgttagggtagtgtcaaccccaagaaggatt

SEQ ID NO: 3030 - DNA, 308 bp, Zea mays
caccagtgaaagagtcatatgagattgcccgtgccaccctcaagatagcagatgagcttacgctatcagccagagtatgtgtaatgtggccacgaggttcgactgatgctgaagtggaagagagcagatccgagttgacaccctggacaaactacatcgatgtcgaggaagtgcctagggtgtcgggtggttcatggtgggagatgtgtcgtattagtaggaagagtgtccttttggttaggcctgatgagcacatagcatggctaacagaactggacagggtgagggatgctgagtcagaaattagg

SEQ ID NO: 3031 - DNA, 643 bp, Zea mays
tttgcgtcgttcatggtttggctgacgcatacagagacactgactgaaggaaaaacaatacattgcaggaagggacacgcacctgatcgacaagatcctcgacccgtcaaccctcgacgggatggtcagcacgttcagcgacctccagcggctgctcaagtccacggggacgtcggctgtcgcgtgggtcggggaagccggaggcgcctacaacagcggccgccacctcgtcacggacgcgttcgtgttcagcttctggtacgctgacgagctgtccggtgtgtcggggttctgtggctgttcttggatatgtgtttgttttgagtgtttttttttcttcttttttgcaaggtttttagatcagcttgggatggcagcgaggttcgacaccaagagctactgcaggcagagtttggtcggcggcaactacggcctgctaaacaccacgacgttccagcctaaccctgactattacaggtaagaacaagtatatagtacgtataaacacttgacgaaaaaaacctagccttgtaacaccgacgaaatggacttgtcttgtttcaaatgacacaactcctcccgattttctctgcagtgctctactgtggcatcgcctcatggggaccgaagttctagcagtaac

SEQ ID NO: 3032 - DNA, 389 bp, Zea mays
cttttcttttctctcgggttttcagtgatggagaacagttgcattcagaatcaagtcctgacatactttgtgtgtgtgtgtgttttcattcgagttccaggataactgcaaaggcgccataccaacaagtcaacagctctgttgttggcgtcgaggcgtccaagcaggcggctggagctggggtggaaaaaccttggctggggctgggccaagaagcgacaacagcgaagctggagatgtgatgaatgttgcccgacaagaaggtgcagtgcacgagattcacggatggtgcaggtcgtagcttcaggttaaggtgaaggataacttaccgtcgggtactctactcactttactgctctactactactactgctggtgacgaagttagc

SEQ ID NO: 3033 - DNA, 353 bp, Zea mays
caccgtcggcctaccgctgcgcggcggggagggacgtggacctgggcaaggtgtcgccatacatcagacgctgcgtcgacgttaagtacggcataaatcttgtcaatgaaagcagcggacagtggtaacatttgtctaacaaaaatggctacatcatagcgcttagttgcaaaaagattctcaaaatttaagcactggtattttccaaaacaggagtcgacaggtgattcaaatgtcaggaatccaaagttctttgagacattgcttgtgatggattaggcaagaatttaatagctacatcattccaatttctaacaaaccagcatctgttgatgcagtgaaatctcagaagc

SEQ ID NO: 3034 - DNA, 770 bp, Zea mays
tgttatctgtgaaaaatgttatccacgttatttaaaaaaactattactactgatatttaatggtttcccttattcattcctaaatgcagcatacctttttcacttgaggatattacaaagacattgccagtcattgaggttgccgatacgactttctacatttcatccataaaaacctaggctttgcgtttttattgcaaagaggggagtagttaatttctttctcatcatggtgacttcacccacctgtggataagtcggattccagctagctcagcactgaccccttcctcgtatcatgtgtttacacacgcctgactctcctgttgttaagctagaccaaacccgtctcttgtaggtcctgttggtgctgaggatcctctaaaacaacatgtcatcgtctcagttcgagcctgtggtaagataaggagcgctggtagcctgatagctctccattctctgaagctaaagcttccttttagctcattgtgtatttgctctgctttcaagagaaggttgttgtcaatgtatggtctgacaagagctttgtctagccaattgtagagcttgataccttgagacaacctggcaagtgagttgcagctaacacacatggatggacattttattcaagtgtatcataaaatttattatatattgtgtagaacttttttgcttatggtgatgttttacactgctgccacactaatagtcatgtccttgattctttaaattctttgaccaaagcatgtacaagccgctgctactat

SEQ ID NO: 3035 - DNA, 250 bp, Zea mays
ctctcttctctgatgagaaagagatgatgagagagggtgatgcacgtgttacgcttctaagaagcaagctccatggcctggtcgaaaggaaccgagatctggaagaggaaaataagcaattgagacaccaagtgagccaattaaaaggtcagatctcctctctcgaaggccaggaaactaataagaggatgctgtggaagaagctggagaattctgcaaccggcatcagctactccaaggaaaagcagtt

SEQ ID NO: 3036 - DNA, 396 bp, Zea mays
tgaggttcgtctttccaattggttgtggaaaaataggatattataaaaagtacttcactactaccatgattctgaggtggcgtataacatattagtgtctgaaatctgaacgcaaagaataattctgcgtgttaaattaaaatgacgaagggctatgattttaatttttggaagtttcttttcggcacatattgtcatttcattggccagtggcattactaacaccacgagtccctttaagtttctgttagtgtactctttgttagattctagcattttctttattgaaagtgttatcctaaacggtaaacagaaacagtcagccatttaccgtttagccattatttggcgtaaatggccatataaagttaggtggtttgagtagtacttatccgg

SEQ ID NO: 3037 - DNA, 359 bp, Zea mays
gagtgggcgagggcagaggagggactgtatgatgaagacgaagaagaggagatgagggccaagaaggagctgttgtactgcgcggcgtgcaataaaaagttcaaatcggacaaacagtggaagaaccacgagcagtcgaagaagcataggaataagattgctgaactgaggaaggcctttagggaggaggagtctttgaaaaaggcagaggagggggaaggtgattggaatgaagttgatatggggttcgattttaagcctacacaggagtcagatgatgcgagtgcattttcagatgctgcagaagagttagctgaagaatttgaaagtaattatgctggcaatgggcatcatggtaa

SEQ ID NO: 3038 - DNA, 939 bp, Zea mays
  misc_feature (477)..(481): n is a, c, g, or t
  misc_feature (501)..(507): n is a, c, g, or t
  misc_feature (516)..(517): n is a, c, g, or t
  misc_feature (559)..(559): n is a, c, g, or t
  misc_feature (573)..(575): n is a, c, g, or t
  misc_feature (604)..(606): n is a, c, g, or t
  misc_feature (647)..(652): n is a, c, g, or t
tcacactgtctgcttaaagtttgcatagcggtgtcgtttattaatcataacccattatggcaatgttgaaaactattgaactacgctctgttttaaactggttctattgtacttaggggtgacaatgtgctctaaattttacacaataagatttaaagataataagatttaaagatcggataggatcgggccatatttttattcatttttgaactaaaatttatttagggccctactattttgtgaaaagcatttggatcgcaatccattaccacccctaattgtactcaatgcagaactgttctgttttattaagatgatgtgattttttttggttctatgttgatttttccagcaagtggttgtggttatgttgtcattttagttcaatgcttgaatgtttgttcatataccatttcacttttgaacccctcccactgacactatcaactataatggactagtaaaagaggcatnnnnntgaattattgaaatgtttcnnnnnnnactgaaaannaaatctaagatgtttcacaagatgtgaccgaaaccaacttcntaggacagtacatnnntatccatcttataaatgatatttgttgtnnncgcttaccggtaattttcttgtccactagcttatcttgatnnnnnntgttcttctcagtgtaattagggtttactgggtttcgtgggtcagcctctaagaagtaagaacacatggtattgtgattttcaggatcaagctcccctctggtgctaagaagattgtcccaagtagctgccgtgccatgattgggcaggtcgctggtggtggcaggactgagaagccaatgctgaaggctggcaatgcctaccacaagtaccgcgtcaagaggaacagctggcctaaggtgcgtggtgtggccatgaaccctgttgagcatcctcatggaggaggta

SEQ ID NO: 3039 - DNA, 388 bp, Zea mays
tcacgaccgcaccgggtaattttctttctgccgccgctaccctaccaaatcacaaagaatctgcaaatttccatctcgtgcgctctgttacgcccagttgtagtaattgtttccgttatggtggcaaaatattgaagtgtcaacatcagtgtgaaggatataaccgtctgattgttgtgagttgtgtttaacgccgtcaggcgcccatccatgagctgattcagagatatatatttttttctgaacttatgattcagagatagttaaaacctgtaataaggatgaaccttattgtgagagaaagtaaagctaatttattttgactttgattgataccagcaaggtattgtttattttgacctagattgataccagcaaggtgttgatg

SEQ ID NO: 3040 - DNA, 330 bp, Zea mays
atcaagccaaccctctcccttgtagggatacaacaatatcttacgctttgggacaccctgggtgagatcgtgctcactcttcaggaggatcaccatgtgtggagattcgagtcttcgggccttttctcttctaggtcctgctacaaggttctgtttttgggctccatcaccttcgaaccttggaaaagactttggaaatcttgggctcctcctaagtgtaagacctttttatggttagccatgcagaataagtgttggacagctgacaggctgcaaaaaagaggtcttccccatccggaagcatgccctttctgtgaacaagagcaagaa

SEQ ID NO: 3041 - DNA, 342 bp, Zea mays
cacccgcttcaaggccttcgtcgttgtcggcgatggcgacggccacgtcggcctgggagtcaagtgcgccaaggaggtggccaccgccatccgcggcgccatcatcctagccaagctctccgtcgtccccgtcaggagggggtactgggggaacaagatcggacagccccacaccgtgccctgcaaggtcaccggcaagtgtggctccgtcaccgtgcgcatggtgcccgcgcccaggggttctggcatcgtcgccgcgcgcgtgcccaagaaggtgctgcagttcgctggcattgaggatgtcttcacctcgtcccgtggctccactaagacccttggcaa

SEQ ID NO: 3042 - DNA, 367 bp, Zea mays
taacgaatcaacgtggctattgacagaatcgacggtcgacgatgccgaccaccagagccgaccataacgagcacgacatccagggcacggcaggggatgacagcgttgtggtgaacaggaaatcgacgacgggcacaaaaggcatgacgctgggcataatgaaacgacagcgtgcccagatctcgtgtcgcccgaccatgcccgcaaccaatacccaccacgcttccgctgcgcacagtgatgcgacgaccagggccatggcgaacaaggagctgggcaggttcgatggccacagacgagcgcagatcggcgcgacagagacgaagaccaggcgtggcagcaggaagggcgcgccggtgagcagaga

SEQ ID NO: 3043 - DNA, 370 bp, Zea mays
tctatgaagaatgaaacattatgtctaaactaacataaaatgcttttgtgtagtgcataaaaatgatcttttcctctgatggggtgaagttcttttcctactatattggtccatgagttgaggttcttttcgtctcatgttctaacctacaaaaaagggaaaacacattaaagaacttgagtaggaataaccaaacaagtaaaaaaccatatggattacttgcattacataatctaaaatacacctgctaagtacttagtccctccagtgtccgcagtacaaccataagtgttgaaacactaacaagtcacagaagttcgaagtcataagtgctgaaacactagaagacaaccataatccgttaacactg

SEQ ID NO: 3044 - DNA, 748 bp, Zea mays
tccactgcctcaactagtgttaccacctatggttcattgttgtgtctgcttcttgtagcactgttggtctacaaacattcatatttctctcaacatctggcacaggtaagcccataagccctaaccctagatctccatatttagttatttcagttcttgatgagcaaatatgaaactaaatcagtttgctaataagaaatttaactacttttcctcttgaagacctcctatccctatatgaacccacatccaaaacccctctagcaaagtgtggctagctttcccatgccatgaaccttcaacaatgatagtatcagtaatgcacttccataaaagggttcatatttaattttagtttttatttttggtgttttaattaagctttgagacttgatttgaagtattaaataaacccttcaaatttctttctaactttgataatacactattcaatgacaatgcacttccttaaatccctatacttcacagcatgccgccttccaaagcacgccgaaagaggtcacttcgtgatatcactgccaccgttgccactgggactgttgccaactcgaaacctggctcatcatcgacgaacgaggggaagcaacaggacaagaaaaaggagggtccacaggaaccggacatcccaccattaccgccggtggtggtgaatatagtcccacgacaaggattaggatgtgaagtagtggaagggctactcgtgcctagtcggaagcgagagtacaag

SEQ ID NO: 3045 - DNA, 306 bp, Zea mays
aatccgagacatgacgctaaggtcaaggaattgcttgtttcagtgtgcaatgctgcggttgagactttggtgaagaccactcaccatgccctgtacagtactaatggcaacttgggtgcaaatggtagtgtcagtggcaatgccaatggagctggggaagggtgggtggagacggtgtcgagcacgttggcagttcctagcaacaggaagtttgtgcttgatgttacagggagggtcacatttgagacagtgcggtcatttctggagtttgttctttggaagctgcaggatggggcaaggaagggc

SEQ ID NO: 3046 - DNA, 716 bp, Zea mays
aaaagaaatagcatagaagcaactatgtttggtgccatatatatcactatggccaatatgtacaaagatggctgattctgaccatcaccaagccaactttttattgttcttgcaagtccagtaggattctcccaagtgtacgcgtaagtcacaggtaaaatcacaacccatgcagcagcacatattaacttcaagatatatcgcagcttgactgcaaatgacatgtttcttcttgctttccaaccaaatatgaggtctaggattgctgtcacatacataatagattcattagcattaattaaatccttcctcagcattaagacacatatatgcaaatggaagaaaatgataattatttcggaaacaacgatgaacaaagtttttttaaggttcatggctttatggcagtcacccagccaatatttctctggagtaaaagcaaaagataggcaaaaaactgagtagggttcagggtatttcaatgagcaggacaacttaataaggtacatgatgttgtgcacaatgcacaaagaccactagagagtaaaaagtgtaacaagattgccatgtagggctctgttacaagtagcaactactgagatcccaactagggagtgatatggcaaatatgtaaacagggagatgaacggaatgacgggagtgtcaaataccttgacccaacttcaaaattgcagcagtaataaatatgctcaaaa

SEQ ID NO: 3047 - DNA, 486 bp, Zea mays
cgatcgagttacccttagttattagacagacatggcttcgttccggaccagctggcattgcttgctcgccgcctgcctgttcctgctcgcttcggcggcgcacgggcagcagctctcgtcgtccttctacgcggcgacatgcccgacgctggagctcatcgtgcggaccaccatgctcacggcgctcctcgccgagcgtcggatgggcgcgtccctcgtcaggctcttcttccacgactgctttgtccaagtacgtacacgccattaacctatatatatataccagcatgatatgcagtcgtgaatgaatgaatcattcgcatatataatataactacgtatatatatactggcacgccaccatatatatataccagggctgcgacggctccattcttctggacgacgtcggcagcttcgtcggcgagaagggcgccggccccaacgtcaactctctccgcggcttcgacgtgatcgaccagatca

SEQ ID NO: 3048 - DNA, 380 bp, Zea mays
gaagcttttgcctgagcagtggtgataacttgtcacaacctgtcaatggctccaatgacggaaccactcctttcttcaccagcaccccaaacgcactcctcacacagcgtgcaatcgcctccttcctctgcacatcatagttgtcaatcagaagaaacaagaactcaagcagcatgttcgtgatatcagcgtactgagacactgaattcaccatcaggagcatagcaggttcaatattcatgacactacccatcccgtcctcgaagaacaaccagtcatagaacagcgccagcttcacattcgccacaacataacccttgctgcaactcgtcagcagccaacctacaaccgcccagcgagcaatgacaccagatttcatg

SEQ ID NO: 3049 - DNA, 293 bp, Zea mays
tcctgttcttccgctccttctccccacctcgttttggctgatcaaagttcttgttcgcgaacactttcctctgcctgacactctgagttcttggttaatgagcctgtatagacccatcggccatcaccagttcactactcgccaatcgacatgtcaggacagagctcaagctcctatggtgacactgatcctggcacagacagggcatacagcaccacctccagcagcatccggtggggtccgcacggccgcggcatgacggcctgcctcgtcgtcgtcaatgtcgtgctcgt

SEQ ID NO: 3050 - DNA, 463 bp, Zea mays
ctgcacctcctgtagctgtagcaccagcggcagagcattccgacggcctactgttcgacggccttgctctgggccacggcgacgacgtcgacgataaggccgaggcggaccgcgacgacgcagcgaccgtgaagctggagtggctgaggtcgcagatcatcggcgcggaagcagagttcgcgtcgccgttcgggacccgacgcatcacgtacgcggaccacacggcgtccggccgctgcctgcggttcgtcgaggagttcgtgcttcggaacgtcctgcctttctacggtgagtacacagctcctgttttttgtttccttggacaaacgaatacgcctcggtgctcatacgtgcgtgtgggtcggcgattggctctggagcgctgcagggaacacccacacgacggacagctacgtaggcatgcacacgagcaagctggccggggacgcggcgcggtacgtga

SEQ ID NO: 3051 - DNA, 202 bp, Zea mays
  misc_feature (178)..(191): n is a, c, g, or t
cgacggctccgcgcgctgccggcttgctgttttgttgcgcagtgagcagcacgccgtgatgcccgtcggtggtttgctgtttttgcgcagccccgtcgtcgtcatcgttcaccccggggagaccgcgtaaatccttgttcgattccgcatcgacattatttttctatgattaattatnnnnnnnnnnnnnnttgttttgttt

SEQ ID NO: 3052 - DNA, 473 bp, Zea mays
gttgtggccgaatatggtgatgtgtttgatggcgtaagctcactgcttgatgttggaggaggggatggtagcacagcgaggacaattagaaaagctttcccacatatcaagtgctcggtgttggatctcccaaatgttatcattgacatacaaccaggtgatggcatggttgactatattgcgggtgatatgtttagctcaatcccaccaactgatgctattatgctcaaggtttgtattttatagctattcaacaatactggaataaagggttaggatctattttcttcatgttaatatatctgagtacctaattggttgattcttactcttaccacagtatgtgctgcatgactggaacgatgatgattgtgtcaagatcctacaacaatgcaaaaaggctatatgttcctgcaaaccagccggaggaaaagttttaatcatagatgtagtcgttggatctccattgaaag

SEQ ID NO: 3053 - DNA, 932 bp, Zea mays
gagagtttggtggaagagatgcacacctgaatgtaagttactactaatatactgcaaattaatattcagtatctgcttttcctgttagttgattgattccagttgctccaattttatgtgctgttcattgatcttttttgagctcacacctgtaattttgtgaatggcatattggcatatgccatttagcacccacaatccgctttcttttggatataccacttgaacttccttaactaaagaaaaaatattttgaccttcagctgacaatttttttaaaaaaacaatattagacaattcattatgacctgcatgcctcaatgcatacactccccagatccagttttgattcttctgcgctatttcatgtgccaaatttttctatggagtttgtctaaaatggcaacatgctggttcccagttatacattggtcttaggctcttagcatatcattgatccttttgtgtaataagaaattagggaatctactttcacatttagattacaccaaatttatggaagctttcctttacctcaacatcgtcccagaaattcttttcccagcgatatacatgggtttcgtctatatgcgctaagtcactgttatgttcctttcagctgttgcgttagccctttgccagtcagacccggtactgaatgatgggcatggtggcagcgattcatctcggggcaatgtcttcgaaggtgttcgcaggaagttcatagagaaggttgtggcccagcatgaagagcgggaagaagaggacagtgactaagctaatacttgtgtttgttttccgcagctggcggatccaatttggttccaatgtttactgatcttatgtgatttttgtgggtgaaatttgccagagttttctgatacctggctgtgcggctgaagtttttgaaagttcacgggtcttattgccta

SEQ ID NO: 3054 - DNA, 388 bp, Zea mays
cttctgttgcagccattccaggtcttgcattgggtggtggcctagagttgactatgagttgtcaggctcaaatacctactcatgttgctcacaccatctgctcgcttgttaacaacgttatggcatcgcaggctcatgtcgtcggacaagggatcgtagaccgcgccgcgttcagtggcgatcaccaatggatcgtccaaggtactgccaatggtcacgggctctcctccaaggttgctgctgaggtgaacaatcagtttagagttggtattcagactactgcgattattcatgtgctgccaaggggtgtcctacagtttggctctactggtttggctttgggaaacaaaaaaattgtgatgtttgcaaagacgttgtgttctcagct

SEQ ID NO: 3055 - DNA, 367 bp, Zea mays
atcagcaacaaagttggcaaattggctgggaattcagacccccaaaataatagcaaaggaacactggacacccatattctggccagcaaaagtaatagcttaacatatttctagtaaggatccaaaatagtcaacagcatttgcaataatgtaagtaaataaaacaaataaagaaatggttagcattccaatgaggtcagaggaagaatacaagaaatccttgcttcaattagttgttcactgcatgtactgcttagctgcaacagaagaaattttactatagtcacaaactgtcagtagataaactcagattatctacacaatacccagtatctttaagtgaccaaaactatgtagcagcaactgc

SEQ ID NO: 3056 - DNA, 421 bp, Zea mays
atgcgatatgatatatgaagacgctaagcagccttcatattcattcctttggtcttattatggtatggcttgtttttgccatgcatgcatatgcgccagcccagcttcacgtacatggtggacagtaacagtagtggtccttgactccttgttgcagcatcgacgatcgatcgagaggagccgccattgcagtcggcggtgtcgctagctgccgagctcatcatcggcggcggcagggtagtgcagcagggtctgcgtgcacaacagccttggcgccgccgaggacgaacctctccatggcgtcgatgacgtgccgtccatgcgcgtacctcgccaggctcgccgcgttgctacttgccacctccagcagcaacctcacctgccgctcctccgccgtcaccaccatcttctggatcacaaa

SEQ ID NO: 3057 - DNA, 776 bp, Zea mays
ttgcatggtgagaatgtttgcccattttttcacggtgaacctttgctgacttttcattcatgattatttacatttcaatttatagcagtgatattgaagatgccggtgattgcaatgataaccttgtgaaagcaccttcatcaaacaacgtaacaggtaatcactcagtaatgaagcagtcatattgtcaatgcataaacaccaatgtttctgagactatctgtgtaagatcttgaaatccttttgaagacgccttacctgattggacaaaatcttgtaaaagtcactcataagttaaagctaaaaataatagtggttctgaccagcagtcttgaataattaaattgctagtccaattctgcatgacacttctattctgttgatataatgttacttgctggtgaaaaggttttgttcctaattttgcgaaggatctttgtccattccatgtttgtatttattgcattaatccagttctctacatttatgtagccaactttaagaaaaagggtaagagaacactggagttggtgaatttgcagaatagctcagatttaactgatgttgtcacaaaagataacgtaagtcgagcgaacaatgcatgatttcatttgtatcatagaattatatataattttgcttttgcacaggttcgacagattagagcaaggaaggtgccagtgtaaacagctactcacatatgatcttggtatttatgtaatttccgtccgatgtaaataaatacttagttctgaaatcatttatacatgcatatc

SEQ ID NO: 3058 - DNA, 314 bp, Zea mays
ctcgccgacgagtgacgacgaccatcccccaaccccacgccgcggagccgcaccaaatctcaccccgcatcctttagggttagggttctgcccgcacctgtgaattccgttgcgaaatctctcatctcctgagtcgagaatcgcagtttcccgctcggctcgtttggggaaatcggttattttcgtccggccgcgtgggctctctgaagcgtttgggctgtcggctatttgccccgagttttcaggtaagaaatcgcgttcggtctggaatttagttttttttgctgacttctgacaagaaagctgcgtttttt

SEQ ID NO: 3059 - DNA, 957 bp, Zea mays
  misc_feature (473)..(484): n is a, c, g, or t
  misc_feature (493)..(495): n is a, c, g, or t
  misc_feature (500)..(507): n is a, c, g, or t
  misc_feature (515)..(533): n is a, c, g, or t
  misc_feature (546)..(954): n is a, c, g, or t
tggatggtactttgtttgacaacgctaacatcatgctgtccagaagggaattctattccacagctgatgttctgcaaatattccagcaggtcagttatttgaggagaccagaaggctattatatcatcgaacaagtttcttggtgatgtcattactatttttgacatttagttaatggttgctttcatgcaacaacgctatttgctgagatcaatgtttagttttttttactgtgaaataggttatcatcaagtccctcgtaatatttctaaactcaaaactgttggcgggaaaactacgatgtaaaataattattagagttgtgatttcccatattgatttatgttgggctaatagtaactttgttgattattagatcacatgtttcatttttttcttcgagtcgaatctagcccattggtagcaacgtgatgtctgaatgttaaactgggatgcctctggaaattgtacannnnnnnnnnnntttattcannnttatnnnnnnnntataggcnnnnnnnnnnnnnnnnnnncttggaacattgnnnnnnnnnnnnnnnnnnnnnnnnnnnnnnnnnnnnnnnnnnnnnnnnnnnnnnnnnnnnnnnnnnnnnnnnnnnnnnnnnnnnnnnnnnnnnnnnnnnnnnnnnnnnnnnnnnnnnnnnnnnnnnnnnnnnnnnnnnnnnnnnnnnnnnnnnnnnnnnnnnnnnnnnnnnnnnnnnnnnnnnnnnnnnnnnnnnnnnnnnnnnnnnnnnnnnnnnnnnnnnnnnnnnnnnnnnnnnnnnnnnnnnnnnnnnnnnnnnnnnnnnnnnnnnnnnnnnnnnnnnnnnnnnnnnnnnnnnnnnnnnnnnnnnnnnnnnnnnnnnnnnnnnnnnnnnnnnnnnnnnnnnnnnnnnnnnnnnnnnnnnnnnnnnnnnnnnnnnnnnnnnnnnnnnnnnnnnnnnnnnnnnnnnnttt

SEQ ID NO: 3060 - DNA, 187 bp, Zea mays
tcaagaaaattataagtagcacggttgctgagtacgttcaaaaggtatatgttattccacaactctctgaagctaaaatgtaaaattgttggttatgcttctttgacgaatgtttgtatggggttcggtattatgtggtgttatgcaagggtagtttctattgccatttttttggtttggggggggg

SEQ ID NO: 3061 - DNA, 366 bp, Zea mays
ggcacagccagtgataactgtcaacagtcagtctatttaccgcgtctgctgcctgctggctgctgcctcgccccgcgtgaatcaataatcattgaatccattctaccgctgctcctcctccttgctctgccgagaagccggcgatgaggggccgcaagaggcagcaggtgagcgccagctcggccgccgcgctggtgaaggggagggagagcaccaagcagaaggagaaagaagctaggaaggagaaggaggcgagggaggccggcagggagccggcggcgaaggagaggcagatgaggcgcaaggccgggaaggagaaggagacggagacgggcggagaggggaaggagccagccaaggagaagg

SEQ ID NO: 3062 - DNA, 862 bp, Zea mays
gatttcagcgtcaaacaaaatgctaaaggtatgttcagtgtatttgaactttgaaacaaagcggtataaaagagttcttatcatttttgttcaattatcatacaattttaacgtctttgtctcaggaagagtgccaaagggtatcgacagagggacagaacatgcgtacggaattgtctgaaaaatttgatcatgccataaaggttgacagctcaaaatagaaaatacatcatctgattatgatatatgatagatatgtacaagttcctttttttttgcttgtatgtctaagttttagttttagctcttatttatcaaattgtcatgatatttctgtagggtgtcagtgccaaacttgaggagcagagagttgagcgcatttctcagctagaagagaacaatacgtaagatactaaccttatttatattttgaatattaggagtccaaccaattagtccattttgttagcaactcattgtcaaagtgccttttgacatttctagtccggtacactgacagttgttgcttttgtaggttgagaagtaaactgaaagaccttgctgatcaatataacattactcagcagaaatatgctcaccaagtatgctatttattcctatgtattaatagatcttgaggtctcattaatatttgtataacaatattgctcttacagtcttactagttttaaatgttatttgttgcgctcttggttaacttgttatggcatgtgtagttgaaagagaaaatgctggaacttgagcttgctgatctgagacttcaacaacatcaagagaaggctgctcaggaacatacacaaatgcagttgtatgctgagcaagtttctcagcttatgactac

SEQ ID NO: 3063 - DNA, 812 bp, Zea mays
acactggtactctgaaagttcctcacatgatgaccagccaatcacagaatctgcactccaggatctatctttgggtgacaaacaaggagacagagaacctgacaaggtgctgcgctatcattctatctagtcattcaaaattgttagttgagatatgtgacttctttgacacctaatcataagtatctaaaccacttgcaattcttttcaagatggactacattcaattttcatgctagtagattctgatgcgtgcatttttttatttaaaaatatggaacctttgttattcttttcaagatggattacattcagttttcatgctagtagaatctgatgcgtgcatttttttatttaaaaatatggaacctttgttattgcacccttttgatgagaaaccttgttatgtgcagccacagagaagctcaatgcgagttgcagataaaaagcgcagtgcatctgaaaagaactttagtctggatgttcttcgcaaatacttctctgggagcctgagggatgctgcaatgagccttggtggtgagccctactgtattgttacgaagtctctgttaaatctagatttgctgtgacattcacagtactgattactgaagataatgccatcattgtagaagaatttcttagattaggagattatggaatgaactgcttcttctgacacttgcctataaacaccattgcagtttgtccaacgacattgaaacgaatatgcagacaacatggaatttcccgatggccatctcgaaagataaacaaggtcaatcgttcattgaagaagatagagaaggtca

SEQ ID NO: 3064 - DNA, 577 bp, Zea mays
tctttcaaagaaaatttgatctttacggaagcaagaagatccaaaaacaaaaatgatattgctggatcgatcctgtattcagttaactaatataaatgtatgcttggcaggtgcgctgatttcggctctctcccctgtagcaaatcttgttctgaagagcgtgccccgggttagtgaatccgagcacccagctagtaaccctctaaagcatagtcagtgtcatgatcataataagaatatcatctgatggacactgtttgtagggggctgcaactacttgttacttggcattgcaccctaatgtcaaaggtgtatctggtaaatacttcgctgattgcaatgaagcaacaccgactgctgtcgcgagagactcagagctggcgaagaggctatggtcgttcagcgaagaacttgtcaagatctatgctgatatgtcacagacgacacaggcaagcgaagaagaggaaaccacggttacgaaagacgttttccaagacaagtagcgtaatatatgttgctgcgttttctacgttttgtacctgtcctctgggcccgaatggccagtgactgtaatagc

SEQ ID NO: 3065 - DNA, 343 bp, Zea mays
gctgctcttcttcctcagccttgctcttccgctgcagcctatggtcgtccgagctgctccgtcctcgtcctcgccccgccgtgactgcccgagcaagtgtggcgacgtgagcatcgagtacccgttcgggatcggccctggctgcgcgatggagaaggggtttgagcttcactgcaacgagtctcggtctcaggacggccgccgaagcagcaccgcgtacttctctgacggcgacctgccggtactggccgacatactgctgctccacggccaggtccgggtgatgagctccgtcgcctccatgtgccccaacaaccgctcgaccacgtacctcctgaacctc

SEQ ID NO: 3066 - DNA, 278 bp, Zea mays
gggggtgcgtttatctgcatttgatttgatgagcaatactcaagctgggtaaccatgctttttatctggctgtaataggagtagcgagtgagagaagtctggaatgatccatatgcttggtgggtaatgagtggtctgtgtagcttcaacagaaatgtttgtgaaagttacggtaagaattactgtgcacgcacgcgtggtggttaactggtttatctgggcgtgtgctatggagcctctcatgagtcatgaaacgaatcgttgtacattgaactagc

SEQ ID NO: 3067 - DNA, 346 bp, Zea mays
cagaagtatgttaccgaatattgaaccaatggaaggccttgttagagatgaattcctttgcagatctgcatgcatttatagtttcagtctttcagaagtaacattacaacataatgtcccaattaaatgtcatttgacacttagcatgtaaatgctggtaactcaattgaacaattaaggttactgaaaaatgtctgcttgcaggattcaacactcaacttctcaatacggcaacagtgtcatatgctgttaaggattaagggggcaaacctgaaatttttattgctttcaccgcatcgaagtttttgtacgtataccccacaaagctcagatctttggagttcag

SEQ ID NO: 3068 - DNA, 392 bp, Zea mays
gccacccgcaagcacccaaccagtcgagtctgctgccgctgctgtagacgttgattcggtcgagaaaggcccaggtacgacaccagagcaaccggcgaagcgaagggcacccaacgttcgacgaggacagagaagggtgctgcgaagcgcaacgagagaaggaagagcgacgtaggggggggatattgttgctgtatactaaatattaacggcccaaattaaagggggcaacacatgatccctagctaggttaactagagctatagcaatgactggccgtttccacgcgtacgagatgcgtagtgtgcatcatcaacctgtatccatgttgtattatcgtaggagtcgtaggccttacagtgaccacgcgtactggttagagttggtcgttc

SEQ ID NO: 3069 - DNA, 359 bp, Zea mays
tgatacaccaaacatgtttcccataaattctaagtttaaattagatcattcaatcattcatcagtataaagaaatttgggtgagctttatgagacacagcatgaaatttgcatttggtagttttatgcaccaaggtgaagtgcagcataagtatgaaaaagcaccatatttgatgtacagtatcaataatttagggctgtgattaagcatattaggtggcagaacaaggaaaacatcacatgttgatggcatattggacaatccttagtagtaagtagtaacgaattactgagagtaggaagggaatataatgacgacaaacatttatgtagttggaactccaaataagcaccaacacc

SEQ ID NO: 3070 - DNA, 380 bp, Zea mays
  misc_feature (234)..(236): n is a, c, g, or t
  misc_feature (296)..(298): n is a, c, g, or t
gataccggcgagtttctccgagctcaagaacctgacgctgcttaacctgttccggaacaagttgcgcggcgacatccccgacttcgtcggcgacctgcccagcctcgaggtgctgcagctgtgggagaataacttcaccggcggtgtgccacgccgcctcggccgcaacggccgcctccaggtgctcgacctctcgtcgaacaagctcaccggcacgcttccgtcggagctctnnncggggggcaagctggagactctcatcgctctcggcaacttcttgttcggtgccatcccannntcactcggccaatgcaagtccttgagccgcgtccgcctcggggagaactacctgaatggctcaattccgaagggtctattcg

SEQ ID NO: 3071 - DNA, 500 bp, Zea mays
gcatactctacagggtatcttcgatcatcatggactagggtgttagcttgcctgagagatgatgggcttccgcacacgatgggttcatcaagcacactcaaagccgcattgaaggatagattcaaaaactttaacttggccttcgaggagttgcacaggacacagacatcatggagggttgtggatcctcagttaagagaagagctgaagatctcaatctccgagaaggttcttccagcataccgttcatttgttggaagatttcggggacaactagagggagggaggggttctgcaagatatataaagtacaaccctgatgatttggagaaccatgtctcagaattttttgaagggagaaagtcaaatgcttgatgaacccatcgtgtgcggaagcccatcatctctcaggcaagctaacaccctagtccatgatgatcgaagataccctgtagagtattgcctaatctgaccacgacgcttgcgaatccagttatcac

SEQ ID NO: 3072 - DNA, 422 bp, Zea mays
ctctccgtcacctatctcaaccgcactgccgacgccaccttctcgctgcctcgcagcgacgacaccaagcacatcaacatccgcctaccgcctggacctgcagcctgatctcatgcatgggatcggtccgtcgagtagaaatgtactactagaatttaagaactaaatatactgtggtgcatcagctgtgttaattggtacgtgtcactaaaaaataagtccgtggattgatacaactactactatacgcgcgcaactatctcctgcttgacctcttatgatgaaactagtgcaatgagtgtgttgtgatggtacacaaattattcgtgttagtgcacctagcgcgtagtatctttaaaaactctgttgtagtcaaccatgcttgtacatgaaagaacccaagaaacgaaggatgatgttta

SEQ ID NO: 3073 - DNA, 382 bp, Zea mays
cccgttaccgcatcgccctgggtgttgcccgcgccatcgcctacctccacgaggagtgcctggagtgggttctccactgcgacatcaagcccgagaacatcctgctggaggacgacttctgccccaaggtgtccgacttcggtctgtccaagctgacgagcaagaaggagaaggtgaccatgtcgcgcatccgcggcacccgcgggtacatggcgcccgagtgggtgatccaccgcgagcccatcacggccaaggccgacgtgtacagcttcggcatggtcctgctggagatcgtgtccggccgccgcaactacgggttccggcaggagtcggtgggcagtgaggactggtacttccccaagtgggcgtacgagaaggtgta

SEQ ID NO: 3074 - DNA, 383 bp, Zea mays
tcttctctcgtcctcgagcagccccaacctcgtccagcagctggtagagaaatcgtctgatatgttaagatccgtgctgaccccacctaactttctcggccgattacataacttagccccctgataagagggtgcctaatttacgagaagcctggaaacaaatcaaagctgccatggcaattcaatgactgaagtgttgttgatgaggctgttttcagtgcaccgctataggtctgggtatccatggccatgctgtggtttcaagaccagagttggcggatagttacgtacacaggcggcaaatgtgtctcttagccgctgtttaagtgcaccgctgtaagtttgggtgtccatgtccatgctgtggtttcaagatcagagtt

SEQ ID NO: 3075 - DNA, 358 bp, Zea mays
actcacttgcacctgcttgtacatctggtgcctcaaccgaggtatcctctatagtcctctccgctggagcatcctcatttagtgcttcaattgtggcaccaatagcagttttttcggcgttggtggtatttgcatctggtggcgcgacaatcgcatccttcagagtattctcaactgtagtcgaattctcatgtgccacaactgtggcattctctacaggtttctcagctgctgtagatttatcatctagcaccttaacatcttctaccatgtcctcagctgttctagcttcttcaactggttctccagctgcagtttgaccttcagttgtctccccgattacaggttcagcagtaac

SEQ ID NO: 3076 - DNA, 362 bp, Zea mays
  misc_feature (18)..(19): n is a, c, g, or t
gtggcggggtctccgcanngcacccgcaccgtctcccgcaagatccgcagcgcgttcatcgcgcggcagacacaccccgcctcccttctatcctcgcccgagggaggggaccacctcgtcgagccgccgccatcgcgggaccggttgcccggccggcctgcgccaggggcttcttggagaagagcatagacaggccgtcgtcgcggtcagggttgccctcgcgggagttgccgaggctgttgattagcgatgacgcgttggacaacggcgcgtgctgcgccaagaccatggtggtggcctcgccggcgtcgacggaggtggccaccctcgtgcagcacagagaagacctcgtcgtggatgtt

SEQ ID NO: 3077 - DNA, 722 bp, Zea mays
gacttttctgctagttttgcgtttttctcttttatttttgtcatctcctgttgtagcattggaattttaagtatttccccttaagttatgtgtatcttctagacttttgtgttcagcatcacactctttgcaaactcgatagcaagtggaccatgccatcttgttaaccatctgaaacagaatgaagaagacccagaaactaaccttctttatagcactgtcagtgtcagattgtgttggaaatatatatttcttagaaatctttatgcaaaggaatttatgccattatgtgaaacagtagcgatatccttatccatcggcaatactgtccaaactaaattagtttgtaaaattggcacatgtttaattccatcattctttttgctctgcactcagctgaaacaagcgaaaaaggaaatcgtgaccgcatgcaaagcagcctcaacatttttgaccggcacatcgtcaagcgcctcttcaaatgcggaggatacgggtggctcaacctcgacaggaaattccctcttcgagggggcatggatccgaagtatcatcggtatgacaatgaagccgtcgaagagcctagtctgtgtagatagttcagatagcgacagctccgggagcgaatcagaatcagatggcgatcggcccaacagcgatgacaacgctgagcgacaagctaaaggcgtgaagcaggagcgaggcacgaaaaaaaagaataa

SEQ ID NO: 3078 - DNA, 380 bp, Zea mays
cacgggtgaacgggtcgacgcagaggcggtccgcagcgccagttcacggcgtcgctgcactgttccaggcagcacacaatagtagagctagaacaggcaactctgtaagcttcactgacctttggagaacgtggaacaaggattacacgggcaatcgggcatgcgactccctggaaatctctggccacggcgaggtgggtgaatcggctgcgtggtcaccagacaaagggaaaacaccacaggatacatgagctgaccaactaagtgattgaggagggaaactcaagcttgtaggcacaaccacaaagacacccgagagatcaactaagctcgaggataggagagcaacttcactgcaacctgccctatggtgactgaat

SEQ ID NO: 3079 - DNA, 364 bp, Zea mays
attccagcctgatgtttgcactttagcatgtggtttggtggctgataatctgctcgttcaaatttacagcaaaggtgttaaggtctgtttgcctacagtatacgctcaccctgaaggtgcccctttaacttctccaatttgcactgactggtatcctgctatcactatcagtgttggtgctgtaggacataatattgttgttgttgctacatctaatccttgttgcttatatgtccttggtgttagatcatcatcttcttaccagtacgagttgtatgcaacacatcatgtgcaattgcagtatgaagtatcatgcatatcaatcccacaagaggattgtatacatgataatgtatctttcagc

SEQ ID NO: 3080 - DNA, 356 bp, Zea mays
ctctttggtccattggagtttctggtaatcttttctcatggtttttccaaccaactacagcttacaaagataacttgcatgttttaatgttgttgctaatgtgaacctatcaatagtagtgtttaaatagttttatcaactagagaagtatcctaagactacgctaaagattttttttgatgtaagaactatgctaaaggttgccttcccaatcccgcattacttttatttcagaaattgacatcaagcgcattcatttctatgcccaaatcatcagctaatcctcgcaggcacagaccaccctcagcttttatagaacgccccaattgatatgaatagatttctggatttaggag

SEQ ID NO: 3081 - DNA, 347 bp, Zea mays
gaggaagaagaagacgatgtcatggctcagcacctgcttgttgcagcagacaggtataacttgccaagattgaagctcatatgtgaagataaattatgcaagtacattaatgtgggaacggtggcaaccatattggcactagccgagcagcaccattgccatggattgaagaaggcatgctttcgtttccttagctccccggagaatttgaaggtagccgtggcaagtgaaagcttcgatcatttgagcaagaattgcccctctgttatgaaggagttggttgccatgctcggcaccttacttgagtaaggctgggttttgtgtgttcttgtgttggtgtgtgctaa

SEQ ID NO: 3082 - DNA, 577 bp, Zea mays
gactgcagttttattttattggcgctcagtctccattcagtgatgctgacttgacctgagtctctaatgtaatttgtaccgagtttcaggaagcttttgagcggagagattcagcagcaactgctgcagctagcgccctgcaagaggcattgatctctgaatctgtgatcaggaacataaggtatttggggatatcttctcttttttttactcaatctaaaagccaaacccgtgcgtttcttcagcaggaaactggtgtgactggtattttgtttacttctccgcttacagcaagttctctgaaatctgcgcgtccgcaagggtctccaatccgttcccaacagtagatctcttccttgtcgtctgtgaggatgctctcaagtggaagaccatcgctgccgagtcggtggcgatcaacggggctgaagaggaggaactgctggagaagaaatcgacttggcactgggtcggcgctgcgttagccactgatctcgaggtcctcaagcttctgaacggtgccactgggcccttctcccggacgcggagcagcggcactaccaacaagccaaatgcatct

SEQ ID NO: 3083 - DNA, 387 bp, Zea mays
aagtatatctgctgctgctatctaccttgcatgtcagcttgaagacaaacgcaaaactcaggcagagatctgtaaggttacgggcctcacggaggtcacactacgcaaagtgtacaaagaactgttggagaattgggatgatttgctcccccctgactatacacctgccacaccaccagagaaagcttttcccatgaccaacatttactcagggcgctcagcgagtggcaaggatatgtatcaggataagatattcgagagtattaagcaaaaatgccctgagcctgcagagcctgaccacatggtcgtggtgaaagaagagggagacaagaaaacagctgctcttggccgtccgcctacaaaacttgaccatcctgagttaggcaa

SEQ ID NO: 3084 - DNA, 340 bp, Zea mays
agacagatgttggaacttggatggtgccatgcgtacatatgttggagctaatgcggtaatggaccgtcggccaaattcaatcgcctctaggtaccacaccggcgacggcgtcttcggcaaggcttgtagcagtagctcatgcaggtagtgatgacaagggactgttagcgaagaatgtcgacagtggccaatggtcatgtaaattgttcatcgtatagagaggtgcaagtgacaaatagccacggttttgtaattctgagctaggattagctattgagaccctgtaattcgtctgggcagacctcaaactagaggtcaacaacgtagcctggcctattgt

SEQ ID NO: 3085 - DNA, 343 bp, Zea mays
gagagcgctttcctgataagcactttgatcttgaaactgtccttcatgcaaagatccgtccactcacagttgctcacagtaagtcattcattgggtttttccatcctcaaggcactgaggatgtaactggattcgacttcctcgacggtgcaatgtcattcgataacatctgggacgagataagccgagcagcggagtgctcctccggaaagcctgccctctacattgtcagttggaacgaccacttctttgtcctcaaggttgacgccaatgctatttacatcattgacacgctcggtgagaggctgtctgaaggctgcaaccaggcatacatcttgaagtt

SEQ ID NO: 3086 - DNA, 610 bp, Zea mays
gttttctgtatgttttcagcatttatgttgtagattagttctaagaaccactgaataactcctgcagagtgctattggtgagggcatgacacgtcgagaccattcggatgtatctaatcaggtacctattatgagtccataggctttgttttcagacatgatgtgtaagatgaattgacatctactgttttctgttcagctttatgccaactatgctattggaaaggatgttcaggccatgaaggctgtcgttggagaggaggcactctcgtctgaggatctggtctgttgcgagtgaaataaattcgtaagttagttctttttcagacccccaaaacttaatgttctgttccttattgcacagctttacttagagttccttgacaagtttgagaggaagtttgtgacacaaggagcatatgacacacggaacatcttccagtcactcgatcttgcatggacattgcttcggatcttccctcgcgaacttctccaccgtattccagcaaagaccttggaccagtactatagcagagatgcttcccactgaatcactgatcgttgatcagtgttccaatattttggcaagtgcagctttgaataaattgaa

SEQ ID NO: 3087 - DNA, 393 bp, Zea mays
ctggctaacatgtccgaggtcttctgcaccgggatgccgccgtcgatgaacaacttccgggcatggatggagctgccggcgccggcaccggaggcgttcgacgccgggccgccgctcgcttctagggacaagatcgacctggagatggggcacaagggcggcgtgcaacaccatactggtgttccacccatcttgcaggggctgcattacgcgcaaatggagaagaattacagtgccagcgtccacatcaaggaccggcgatccgcggaggcgccggaccccttcatgatcccggaggcgccgcgacacgctgcagcaggagaagcttggcctccagctgtgtttcatgacgacggagtctaatgatgttacgagcagcgggcaagagtccgt

SEQ ID NO: 3088 - DNA, 424 bp, Zea mays
cggcgcctcacggtcgcaatttattgcttgcgcaccgcctcgccgctttggcgtggggcgtttgcctgtgtggcgcttcgcaggtgccgtggcttgccgcttccttcgccgtgctcactagtcaccagagagggaggaggctctggcgctctgcttctgctgccgcttcttcttcttctcctgctgctgctcttacggagataagcagggggggccgggccggggcagggggaggtgacagctgagctgactagctgagtgaagcatggggatggacgccggcggcggcaagctgccgtacagctacgccggccagcaggacggagggaagctggtgaagagcgtcagccgcgtggagccgcgcaggttcggcctgggcctcgtggcgggcttcctcctcgtcacctgcgcctacttctccacc

SEQ ID NO: 3089 - DNA, 788 bp, Zea mays
ctgatatttatgttctcgggtaatttttctctcagataaacctttttttctctctttcgggtgggttatacttaaacatgccgccgacttctaaagggaaaaaatcaataacgtaaaccttttatatatattttttgcaagaaaattgtccacgtacatatttatttttgaagaaattatgccttctcaattgaaattcatttaccaaacagatgcagctggacaagtatattaaaggtggcagttaagagagctgttactcatatactgtaggcccacatgctatttggttatgaaatttgacactacctttttatttttgaatcaacattaaaaagatgcagaactgcttcaattactaatattccttacaaattaaaaaaaagctccatttaccatgaaaactgccgctacctttcagatttcaagagattatcccactggaagtcgggtatatgattggaactgaagacactcgtccggtcgcagtatgggagcatatcatccacgaaactttgaacaagaagtgtccggataaatcgaagtccaaacgccacagtgactctcccccgccagcaaggtttaatccattagactatgttcttgccgtggagaatgagttgcataacgaatccaacagtgatagcgatggggagcttcatcggccgcacaatgcagaatcatccgattcagctcgacgccgtctccagccattggatttagcctgtggcgttcacaattataatggggataaaaggaaaaggctgcagtatgtacgggtaataagc

SEQ ID NO: 3090 - DNA, 612 bp, Zea mays
cctggtgggcaacaaggtcgacatggacgcgaagcgggtacgttacgcggctttctttacgatcacctgctgctgctgcctgccgccgctgctgggcggcacccccacgcggctggttttccttttttttctcttccccgtgccctaacaaactcccccggcccctgtcgttagcaggtggtgtccatggctcaaggccagaagcttgcagacgagtacgggatcaagtttttcgagacggtaagagtccgttgattaacaccagctcgcaggccggttgtcgtattaacaccctgctaagctggtgagtgtgtctgtatgcagagcgcgaaaacaaaccagaatgtggagcaggtcttcttcgccatggcgagggacgtgaagcgaaggctcaccgagaccgttgccgccgcggccgaggtagctccgtagctgtgttatccccatcccgttgattgattgccatgttaagtcgtcgcctctaataaatcttcacaaaaccatgcgcagcctccggctatccagatcagcaggccggactcgggccaggccggcgcagcctcgtcgacgaggtggtcatcgtcctgctgtagcacctgatctgccgccgcg

SEQ ID NO: 3091 - DNA, 377 bp, Zea mays
tcagaactacatagatccaggaagcaagcaagcaaatccttcctgccatggcggcctccatgtacatagatcccatgtttttattaatttcgtctagctgggggtgggggggcgtgcacctgccatggcggcctcctttatttagctttatataaggagtaggatgtaggatgtctaccatatgtgtgtagcttgggattaggctgcaagaagataagcctgcttgtacaaatatggcttcctggaacaatgacattttgggggcgcaacgcaagaaagatgaaagaacaatccaggaagcagcaggtgttttcttcttcttcttcttttgccccttccatgatattcgcgtgtcaaaggctctcctaaagcgagta

SEQ ID NO: 3092 - DNA, 668 bp, Zea mays
agggataaatcgactcgtcaagaaatcgtttcagttgccatgactccagtaggcaatatgattgttgcttgactacagttttgtcttccactacttagcttatttgtttgttttattcttacctcgcgattttatgatcaaatttggtatctgcacggtgcttaccccgggcttgtcggatgtacttgaagaaggaagccccaatgtctgtgctagatccactatgccattcagtgttgcaggccctgatgaattttgtgattggtctgtgtcaaatcactgccatcaatcaatcaaacgaatcatcaaaccaaacataataaagaaatggtctattacgaaaatttgtatccattgctttgacacagaccaatcacaaaattcatcagggcctgcaacactgaatggcatagtggatctagcacagacattggggcttccttcttcaagtacatccgacaagcccggggtaagcaccgtgcagataccaaattagatcttaaaatcgggagcgaggtaagaataaaacaaagaaaatacgggcgaggtaagaataaaacaaacaaataagctaagtagtggaagacaaaactgtagtcaagcaacaatcatattgcctactggagtcatggcaactgaaacgatttcttgacgagtcgatttatccc

SEQ ID NO: 3093 - DNA, 549 bp, Zea mays
  misc_feature (469)..(480): n is a, c, g, or t
  misc_feature (489)..(498): n is a, c, g, or t
  misc_feature (506)..(530): n is a, c, g, or t
  misc_feature (534)..(541): n is a, c, g, or t
ctgctttcgctgcacttcctcgagcaggggtgggatcttattgggggagtcgtgttcgcatgcttgctgtgctcgaagcacctgttcctcgtggcagcgccggtgtactttatgtatttgttccggcattattgctgtggccggggtgtcgtgaaggggctgggaaggctcgtgctgatgggttctggagtggctgctgtttttgccgcagcatttgtgcccttcgtgtactatggtcaggtgagtgaatctggttgcttaatttaattttggattcaacgacttgtttgtatcatggttgcttatctgtaaacgtctagtttctgatgaaagtaagaaactgagaaacgtggcttgtgatttgtgaacagttgagacttgatgttaatttggcattaaatccggtaaaggagagtaatgcatcgtgttgctgaatttattattataggagctcgagctgtttcagctnnnnnnnnnnnnctaatgagnnnnnnnnnnggttttgnnnnnnnnnnnnnnnnnnnnnnnnnaacnnnnnnnnaattttct

SEQ ID NO: 3094 - DNA, 484 bp, Zea mays
ccgctctacgtagctaccttcatgtccttcgtctacgtcgccggctacctgctcgtggagtgcttcttctaccacagcgtccatgcagccagtatcgctccgtactgcttcatcgcaggtacggtagcgaccctgtttatggctagtaaataaatgccttccgtcattagctctgactgatggcatgtagtatatatatctaactaaattttcctttttcatcgtcactgctgcagggacatccatggtttggatgctgcttcaatggaactcccatggccgtggccgccgtccccgtgaggctagcaagcagccctgatccaacctctctggttcttttgccatcgatgtgattggggcggtctactatacagacgatgaataaattatttatttacaaaaaattgtattatagatataagatgcacaccgagttccgtacgttgttgctgttgacttgttgaatgtaagaagtgacgactag

SEQ ID NO: 3095 - DNA, 374 bp, Zea mays
gcgacgagctgcgggtggcgcggcgcgtgaggcagtactcccgcgagctggaccgcaagtcccggatgctgcggcaggtcgagaagagctactacgactcgtacctgcccgggggcatgtcggtgtggcactgggggaggcaggcgcacgatgcgggcaacgaggtggcgcagcgcagggacgagatcgcggcttgccggaagatggtggaggacgagatgcggaggcatgccaaggccatagacgccacgaggacggccacggtcacggccgtgcaggggaagctgcctgccgtgttccagtcgatggccgcgttctcggcgtcgcttgcgaactcgctggaggccgcgtacagggttccacagcagaacaac

SEQ ID NO: 3096 - DNA, 384 bp, Zea mays
atccttagaagaagttaagccttcgtgccaccagaacgtggtgagagaccaaagcaccgactccagtgactcgccctatccaacccctctggtgctcaggggtgacatccagactcctggcaccgtatacgccgccgctcacaaggaggcttggaagcctgggaagcgcgcgagggcgttcatctaccctgtcctgcgccccatcgagaacaagatgcagtggatggaactgaaagccgccgagtctcctactgtgctatcacccaaccctccaaaaagaaggaacctgagcgcagcaggttccggcgacaaggctcaccagccgcctacacgttcagcgttcgccggatcttcagagcacggatccttcccaaatacttacag

SEQ ID NO: 3097 - DNA, 1026 bp, Zea mays
  misc_feature (65)..(66): n is a, c, g, or t
  misc_feature (959)..(961): n is a, c, g, or t
ctcaatcatctctgatcctggttcaaccaaagaaacaagttccattcgtcatgcaacaaaccatnnataaaacacttgaaaaccacccttccttctctaacccttcggatccagggaaaagggggggggggcacttacgtgcacaaggcaatgcaccatgcttgcatgaaatgctccatatgaggggccacgatgtctggacagacccaggtaagcctcccaagagtgatcgcactattttcaacaagtgacttgttcaaaccctgtcaatgtgaaggggggaaaactagccatttagttgaaattttaaatgaaacgtgacataacaaaccttaaaatcacccacctctggggattttaggatggtaatcaagcacgaaacaacggtgatcaccacaggtgctatttctttgccaatctggaaacaaataaaatatatatcacatatatgtacgaaacttcataaaataccaatcagtacctgtatgtcaaagacattactaagagcacacaataaaataagctctgctgtggcctgtggggccagtgcactgcaactttataagtgacataccacggggaaacccatgccaaacagtttcaactttaacagcagcaaaatgtaagttaaaccaaatggtatagaagtaggcactaaccttgattgctaattctccaatagcccaacaggcattgttagctactgataccgcatccttcacagactgagggttctgcagtgaaattgagtgagaaatgaatcaagataattataataacaacatatagaccacagaaatgcttaccagttgctttgctgcaacagtaagaaattcttgaagacgtggatgcaaatgtattgggcaaacctagtacaacaaagagttattttttttgtagagtgaaaattatgtcaaaataatatgaactatggtggtacgcagtcaaccctagaaagnnntgcaagaagggcaagggcactttgtcgaacatcagctgcttcatccatgcagcatgcaaaagcag

SEQ ID NO: 3098 - DNA, 529 bp, Zea mays
tctccctggccatggttgtcgttgggcgcttcttggtcaagttgttcctgctcgaagttgctgcgtgggtgatgtttgccttcctagagacatacacgaggctgttctggtcgtcggagtccctgtactacaaccccgcctggcacgtgatcgtctcttcttgggaaaccgtcgtctacagccccgttcttgatcttgacaggtcaggaattctccctcccttcccaactctacgctgtcgctgcccatgcatggcatctctctatctactgtctgctgctatactactgtgatgttagtcatgttacccttatatgctgcggttcgatctacctgcacagatgggcgttcccgatctgcgctgtcctgttgtttttggcgttttattggcgttgcctcggtggaaggaggggaattgcccggtcactgctacctctgtacaacggggcttattacagaagctccagtcgcacaagaacagactgatccctcgaaccatgcgcacaatcacaccattagcgtgcacata

SEQ ID NO: 3099 - DNA, 479 bp, Zea mays
ggtctatccaacatatgactttgcgtgcccatttgtcgatgcattggagggggtaacccatgctcttcgttccagtgaatatcatgacagaaatgcacaatattatcgaattcttcaagacatggggttgaggagagtggaaatttatgaattcagccgattgaatatggtttacactcttctaagcaagcgaaagcttctttggtttgtacaaaacaagaaggtcgaagattggacagacccacgttttcccactgtccaaggcatagtacgtcggggcttgaaggttgatgcattgatacagtttatactccaacaggtacacctttgtgctaatgtgctcttgctttaccttcatatttcctgattgtttattcctgatttcatatccatatttcatacccattttttattttttgaaactatatatttttttgttgttgaagggtgcttcaaaaaatctgaatctcatggagtgg

SEQ ID NO: 3100 - DNA, 722 bp, Zea mays
gttcgtctgcatgcatgcaaagaggaggaggaggaagaagaagaagatgcattttatttcggtttttcttttattattattattattcctcattgcggcaatgcggctgtgcatgctttgatcaacacttacaggcccaggcttagagaccagatgcagtactgcacggatcacccagaggaagtgagcaagctgtccagagtgaaggcccaggtggatcaggtgaaaagcatcatgatggaaaacatcgacaaggtaattaacaaccaaccttcgatagttacctgtgctttcattcatcagttatccaattctgggagagggaggggattcatttgatggaacaaatgtttcaggcctttgatcgcggacagcagatcgacgggcttgtcacaaggacggagcagctccacgacgaggtctgtacgcgttttttcttccagttctctctgttcgtatcgttgacagtaccgcctatcccttgagcaacttgccggtgtcgtcagtcagacgcaacaatagagaagaattgaaacaccaacaccggccggctctaattgtgtttgtggcaggccgttgatttcaggcggcaaggcgtgcagctgcggcgcaggatgtggtaccagaacatgaaggtgaagctcatcgtcctcggcgtcgtggtcgcgctcatccttatcatagtcctctcaatttgccatggcggatgcagcaagtgatta

SEQ ID NO: 3101 - DNA, 388 bp, Zea mays
ttcttcgagaggagatgtgatgtcgattcgagcatcgacacagcaatctcccttgcttcagccaacagcctgactatcttgcatccttcaatgtcagaggcagccttgctgctgatcttcttgaactgcttctgtgccttcttggccaagcgagcgtaagactgaaccttggcctgaagagacacgtcgtctcctctcttgagagccagctgcatctcctggacgctgaccctgagctctgcaaagttctcttgcatggcgttgcagaggtcaagcaggacaagggagcgatcgagctcctcctccactgccttcctctgctgacgttggttgccggccaaggatgtgagctcgtcaatgcagctgtagatgcccaccatcttgttga

SEQ ID NO: 3102 - DNA, 377 bp, Zea mays
ccaacagagtgctgccagaatgagaacggctgtacttctggaaagaatgcattcacaaagtcgaacggttgtggtgactctgagacctgtgcagaggggcatgtaggggatgcaccagccatggaatcccggtcccagagtcgcaagcaggcatcagatttggagcaggagacctgtcttgatgacagcaatttggtggcccgtgcagctaggctcttcgccccgaggttaggacagttagatgacaactacgagtactgcgtgaagattatccgttggttggaatgttcaggcctcattgagaaggatttcaggatgaaatttctaacatggttcagtttgagatcgacagagcaggagcgaagagttgttatcac

SEQ ID NO: 3103 - DNA, 575 bp, Zea mays
ttccctgtttttgtttcgaatacaaatttgtatgttttgaatgggattgctaaagtgatattacagttactttctgtcggtttaaagtctgatgataaatggagtgtggagtatggactactaccatttattcctactgcaaaatcatttaaaatggatatagttttggccatgttactacaattgcaacgatggataagttatccctgcttgttctttatgggtatgtgttctagattctagaagattaatgcttgaacccatctaacaatgttgtggctttaaccgatttcaggtgtggatctgatttgtaatggcttattaggatttaggccaggtgtgatctggtttgtaaatgaatctctttgccatgcattgagttgttttttctgtgctgtctcatggttacactctattggcattgtacagttcatcagactaggtgcaagtttttttcctgataaaacatcaaaaaggtctaaattacatgtatgattcaggcatgttttcttaattttatgacagtcactgatgttctgaataaaatactactattttgtgacaatcttatagca

SEQ ID NO: 3104 - DNA, 369 bp, Zea mays
tttcttgttaatggaaaaccacctagttctccaaggttgggaaatggggtgaattatcctttggaagtagagttatgtggttgacaagatcttgaaaaactgcatatatttttttttcatatgagcatgtgcatccattttctcatctcctgggaaattttctgacaataaatgcacgaaccacattaatgtttggtggtgcaatttaactaagtatcattcccaaatagcttcctatgtgtggtaaggcagtagggcactgctatttatagaatttgcactgagcacgtgtctacctttgctgttttacattagatgattctcattgtagtttatatcttgttaccaccattacctactgtcatccac

SEQ ID NO: 3105 - DNA, 369 bp, Zea mays
  misc_feature (109)..(110): n is a, c, g, or t
tttcttgttaatggaaaaccacctagttctccaaggttgggaaatggggtgaattatcctttggaagtagagttatgtggttgacaagatcttgaaaaactgcatatanntttttttcatatgagcatgtgcatccattttctcatctcctgggaaattttctgacaataaatgcacgaaccacattaatgtttggtggtgcaatttaactaagtatcattcccaaatagcttcctatgtgtggtaaggcagtagggcactgctatttatagaatttgcactgagcacgtgtctacctttgctgttttacattagatgattctcattgtagtttatatcttgttaccaccattacctactgtcatccac

SEQ ID NO: 3106 - DNA, 375 bp, Zea mays
ccgtcaccgtctggtccgccttcttcatgtggacgctgtcgtgagctcctcgaatcaggggccagggccggccgaggcaatcgcttctggccaacaggcactctggttagagacaactgcaggcaggcaggctgtgtgacaaaccagtttgaacagctcctcgcgtcagatgtctcagatctcgcaaaagaagcttaatcaattagacgaccaggccctagctagatcgccggcgtatcttctggggcttaattgatcagctgttttgattgaatgatgaatcagatcgttcgggcagttgcagttgcagctcgtacatgtttgtaaaacttgttgcattgatcgtcgctgtcactgcactaaatgaacacagga

SEQ ID NO: 3107 - DNA, 636 bp, Zea mays
cgaatacacttccgtcgcgggctttggtccagtgcacacgcgtgcaagatgggtaagatctagcgtaaaacacatctgagttgcgctgattcacagatatatatttctataccccgggtgtttgtttcgcacacgacatcttgcacaatgaagtttgataccactggcattgcatcatagtttaaagtctatagacatcatggtttctgtgacattgttttctggtgtcgtgtgcttctgaagtcacctcctagttaggctttactgctcatttggcacaccgagagctcagaactgcagactaagagatgttactttttcattgtgctcatcatgtccagttcaacgatatgatcaacgtggtgttctcctcgaaggcgcttgttggcggggcggtggcgtattttctggacaacaccctgcacaggcgcgatggcgtcgcgaggaaggaccggggccaccatttctgggacaggttcaggtccttcaagaccgacccgcgcagcgaggagttctactccctcccgttcaacctcaacaaattcttcccgtccttctgatccttgctggtgctggtaactgagagcagaaaaaatggctttggactgtgattttgttggcaatgccacgccgccc

SEQ ID NO: 3108 - DNA, 380 bp, Zea mays
  misc_feature (375)..(377): n is a, c, g, or t
ctataagggattattatagctactatgcacctggacagagccgtagtcccttatattttataggatgaagtgaaggcagtacatgttgtatggtagtagcaaatttgacgtgatgaaatccatcctaacataatctgggccgatatgagcaggaagggaagtgcatggagcctggagttgtgagcttggcggacatcttggggaccagggttgcggaccatgttcctcaaacgcccaacaagatatccgaggacatgatcagatgcatcgcggccatatacataaggctgagagacgtcccttccgccgccgcgcagcatgccttcttcccctcaccgtgctcgtccttctcttcagcaagcggactgtcttccnnntac

SEQ ID NO: 3109 - DNA, 353 bp, Zea mays
agtggaaaatggccagagcaaatgcgattattagggagcaggaagctgaggtggaggaggagagcgccaggagaaggactgcgaaggatggaaatcagaacgatgcaaacacagggctcttcttgagggccgctgttcggccattcacttacagaaatcttgtcaaggaaattgttctgatgagacaccacatcattgatggggaaatagtttagtttgcatgaggctgtattctcacatcattgatggggagatagtttagtttgcatgaggctgtattcagtttttcagattagggatttgcccatttcaatttacaaatgcagagcttgcatttcgaaggtctaaggcca

SEQ ID NO: 3110 - DNA, 380 bp, Zea mays
cgagcaggattcggacggatgctcgcccataatggttgctgccaagatgggaaacgtcgaggccttccgcgccctcgtattcgccggcgccaacgtgaagctgagcaacaagcgcggggagacggccatcgggctggcgcagcagagcaagaagagagacctcttcgagcaggtcatgctcgagctcgcgctggagaagggcatgcctggaggcttctacgcgcttcactgcgcctcccggcgcggcgacaccgcggcggtgcgccacctcgccagcacgggctgcgacgtcaatatccccgacggtgacggctacaccccgctgatgctcgcggccagggaaggccacgcgggcgtgtgcgagcttctcatctcctaca

SEQ ID NO: 3111 - DNA, 673 bp, Zea mays
  misc_feature (528)..(541): n is a, c, g, or t
  misc_feature (543)..(548): n is a, c, g, or t
  misc_feature (557)..(669): n is a, c, g, or t
ggcgagcatggttctttgttcaggtacttacatcagcttcatccagtgacgaagacaaatagttcaagatgaaatcgtctagatctccttctagaactgaatccgggtcagatacttcatagttcgtccggagatctttgaccatacggtatggctgacaaaacacaaaaagaacaattatttactgatatgatgtttgcacttaagatatccatctttactctatactataacacaatagaaagattatgacaaaaaaataatagaaaaatttatattctcttttttcaaaacatcattagttagaaagatcatgtcacaaaattttccagaaagtaatcactagtttgcagcttcttaatttttaaaaatcctgagatgagtatggaaacaaaacagaaacagaatgactaactatatagactagtagcttaaagggaacacagataatgctactgagaggtcacaatttataaaaactcgacctacggggggtaagacagcccccgagtattgtattaagaaggnnnnnnnnnnnnnnannnnnngaaaacccnnnnnnnnnnnnnnnnnnnnnnnnnnnnnnnnnnnnnnnnnnnnnnnnnnnnnnnnnnnnnnnnnnnnnnnnnnnnnnnnnnnnnnnnnnnnnnnnnnnnnnnnnnnnnnnnntttt

SEQ ID NO: 3112 - DNA, 796 bp, Zea mays
aaatatgttcgattgtgaaactgcaggacttttttttgctgatctgatacttgtgcagaaacgggatcatgattgtttgactgatggagaatggaaatgtgaaatttttgggggtagattatatgctgtagtttctcgtggtgttcttgatatgataccgggatattttgactccgatgaatattgagcaaaatgtcgattttggagctagtgagttagcttaatacagtatgtaggctctgtaggtaatctgcattctcatcttataattgaagtacaattccctgtctgccaaatgtgttacataagctcgaattcaacttggtgcatagagtagattcatacagaagttcatatccatattctcatatgtataaagttcaaacggaaacttttttttatccttgttctacattgcatataagtttgcatatttgtcttcctacaatgcaggtgccaattcctgctgaccaagttcatgccatcaatgatgaactgtcatccgagggggctgcaggggactacgaaactcgtttaaagcagcttgctaagaacggtgtgatcgaactgtcgccggtgtccgggttccccaagttcgaccttatgcttatggggatggggcctgatggccacgttgcctcactcttccctggccaccctgttgtcaatgaaaaccagaagtgggtcacctttgtcaaggactcaccgaagccgccgccggagagaataacgttcactttcccagtgatcaactcgtccgcacacatcgcacttgtggtcaccggtgctggcaaag

SEQ ID NO: 3113 - DNA, 384 bp, Zea mays
atggaggagccccatatggatcatcttgcagctgtgaagcagatcctgaggtacatagcagggacaagagattggggcctgttctattcaaggagaaatggagggagtgatgagctcttgggctatagtgacagtgatatggctggcgacttggatggcagaaagagcacatctgggatccttttctttcttgggaggagtccaatcagctggcaatcaactaagcagaaggtggtggcgctatcaagttgtgaggcggagtacatcgctgctgctactgctgcatgtcaagctgtttggctggcacgactgcttgctgaaatcaggaactcagagacaagcagacctttgctaagggtggacaacaagtccactatctcgctg

SEQ ID NO: 3114 - DNA, 458 bp, Zea mays
tcgacgccgcgagaatgtcaacatcgtagcagccagtttcccagcaggccttgtaggctgcaatccttgccatgggggctcctccccgccctcctccggtgcccagaccacctccgtagctcatgtccctgacaaaccttccggccgctatcgaggcagtgtggctgccatgccccgagctgtcccttggagatacgaacttgatggcgccaccctcttctgtttggtatccgctgaggtaatatctgcctcctattaccttcctatcgtgcatgttttgggggggtaaataatgggtggctttagaaaattccaatgctggaataccgtaccgtgggttggttttagagcgtgtgtacctgttgcaggtgaaatttgacggtgagttcgcgtctcctccttggcattgccctctccatcttttgggaaccggaggcatcccgtggtcactgaaacta

SEQ ID NO: 3115 - DNA, 711 bp, Zea mays
tccgctcctgagcgccgctgctggttctctgttcttggccaataaaggcgagccgatgacgatgcttgtccgttcgttcatgtacagtgacggggagacgctggtgtccgcggacgacgtgcggatcaacctgtggcacgcggaggtgacgcgccagtgcttcaacatcgtggacatgaagcccgcggacatggaggacctcgtaggtgatttcgttgtttttcttcttcttgtccttccttacccaccgatcgtacgtacgtaggactaggagtggtatactagcatatgctgtcctccagtttgtgaaagccgcagcgatcactggcacttacatgcattacattacatccgagattccgagtgttgtgttggctgggtgatgatgatgaagcagaggtgatcaccacggccgagttccacccgtcgtcctgcagcctgctggcctacggcagctccagcggcctcgtcaggctggtcgatctgcggcgatcggcgctgtgcgaccacagcgtgagaatgcgagtgacttctgtcttctgcaacaaccctccaattgaactctccacgcacggcgcaccacgcgtgtgtgcgctctttctttctttcatttttttaaactgtcgcttactgaatgaacaggttccaggaccgcgagaaccgcactcaccccagcacatttttcagtgagataatctcctgcatcaccga

SEQ ID NO: 3116 - DNA, 659 bp, Zea mays
  misc_feature (473)..(475): n is a, c, g, or t
  misc_feature (515)..(526): n is a, c, g, or t
  misc_feature (595)..(602): n is a, c, g, or t
  misc_feature (615)..(630): n is a, c, g, or t
  misc_feature (644)..(647): n is a, c, g, or t
ctgagttgaattagtgggtgaatatggcctgaggtgcaagcgtgagctgtggcgtgtgcagtatgccctcagccgcatccgaaatgctgcaagggagctgctcacccttgatgagaagaacccccgtcgtatctttgagggcgaggcactcctgcgccgcatgaaccgctatggtcttctcggtgagggccagaacaagcttgactatgtgcttgcactcaccgttgagaactttctgcagcgccgccttcagaccattgtcttcaagaatggcatggcgaagtccattcatcatgctcgtgtgctcatcaggcaacgccacattaggtacaaacaataagatttgttcccctgaagattatgtttttgtgatatgatggttaactagtaacacatttacttaaacaaagctaatgccatgggatgtgtagtatttacacctgtattttactggataactttttcttacaagnnngtgggtgtatataagtttgtgtgagcacactgttttatannnnnnnnnnnnaattaaactatctatcttcctgtttatgttctggggcatatgatgagaaactttatgcaactcacgacnnnnnnnngagacactttgtnnnnnnnnnnnnnnnnatattttctctgannnncccctttttctt

SEQ ID NO: 3117 - DNA, 377 bp, Zea mays
acgagctcctctgggccgcgctctggctccaccgcgccaccggacgcgccgagtacctggactacgtcgtcgacaacgccgacgacttcggcggcaccggctgggccatcaccgagttcagctgggacgtcaagtacgccggcgtccagatcctcgccgcaagggtacgcgtgctagctgcgtatatgctactgtttttttttcctttctttctttctttctaccctgaatatatataatatatattaaaaaacgaaaggacgtacatacaatacaagtgcttacgtgtcgtcgcgcgcgtgctttcatttcagctgctgctcagcggggagcactcgccgcggcacagggagacgctggagcagtacagggcgaag

SEQ ID NO: 3118 - DNA, 388 bp, Zea mays
gcttctcccaagggagtgccgagagccatgcagggtgatggggtacgacgtgcccaagggaactaccgtgttcgtgaatgtctgggcgatcagcagggatcccaagcactgggaggacgctgcgacgtttagaccggaacgattcgaggccgcgggtacggttgattttaagggcacggactttgaatacacgccgtttggggcgggccggaggatgtgccccggcatggcgtttgcgcaggcaagcatggagctcgtgcttgcagcgctcctgtaccatttcgactggaagctgcctggtgggatgctgccgagtgaattggacatggcggaggagatgggcatcactgcccgaaggaagcgcgacctttacctgcatccagtcgtt

SEQ ID NO: 3119 - DNA, 362 bp, Zea mays
atgtcgggctcaccgagttttcggtgcgctgtcgcggatgccgtcgcttagctcgtccaaatcctggccataattcccgtcacgacctatgtcggcatgctgactcgacgttgtcgtccttctttatcctcatcttcgcctcgacctcgcgtggtgctcggccgtgcacagctgctggtcgtcgacgtccctccgagttgtcggtcgtcgctcatgttcacctccgtgtgctgggtggcgtgggtggtaatgtctcggcgcgctgttcattggtggttcgaggatgtgcttgagttagagatgttccaagtggatactggacgaccttacaccgtggacacatcgaagatccatagcatact

SEQ ID NO: 3120 - DNA, 393 bp, Zea mays
gtcgggtagctgctgctgacgacgacgaggaggaggagttcgaggagaagcggccgcgtcggcgcactgcggacggactcgccatatactcggccgatgagctcgggttcggcaaggccgacgccggtggcaccccgatgtgcccgttcgactgcgactgctgcttctgagctctgagtttgtcggctgccgccttccctgccggaggtgatttgcacgaggctaattccagtgtagttgtacttgatgaattcggtggcgtgtccgcttacatctgtgctctgatgaaatggaaattttgatcctgaaattcagagtcaatgcttactgactggagcattaagaatttattatgttgacacatctagagcttgttgtttgttgatcagccgt

SEQ ID NO: 3121 - DNA, 357 bp, Zea mays
agcatttgtcaaaaccgcgacatgataagacccacaagcaacctccacaacaccgccacccccaagctgctcttcgaccaggcgaggataccttccatcattatttggattgccaagctgtccatacacagggcttccaacagtaaaaatgtgccctgaggtagtcaacccaatcgtaagagtatggccacatgcagccttatggaagttgtaatctatcaacgaagggacgcatgttggtttcagttttgaagacctatcaccatgacccaggcgatatttgtctccatcaccccaagtgaacaactttccagatgaagcatttgactgtgaaatgataacctcaacaacagcagc

SEQ ID NO: 3122 - DNA, 350 bp, Zea mays
tgatgttacgcacgtcgcactttatttcctgatgttgagcttgcagctgattgatcgtaaatgctgaggacgtgttctgtttttggtagttagtatgctgctgtttgtgggagatatgtgaggctgcacctgggaggcttggaacaacaactcttttggttatatccttgtattgagcattgaatttgtggatggactggtattgattgccttctgcatatacaaaacataaggatcaccaatctgttgccaaatcctgtacaacaagcatctttcttgctgagcagcagcacacatgatagtttgggttctggaggagcatgtgtgagtggaccagcgtcattagttgt

SEQ ID NO: 3123 - DNA, 285 bp, Zea mays
tctcaatgctctacttgctattcgtaaggaggtagacatgatggagcaggatgcactggagagcaaagcacggtctgacccagagaaggagaggatggaggaacaaattcaccttgctgagcctgcaaagacaaggcctagacaattcactttcaccccccttcctcaccagaattgtacgaggccagtgacaatgactcctacgactcggacaggtccactaggtatagcatttggaacctgtaatagtggtacctcgacctttgtcgtagtggtacaaatgca

SEQ ID NO: 3124 - DNA, 360 bp, Zea mays
gtcgagaccgacgccgaggccgaggggctgtttgatggcgagacgagggtggtcgacgagcaagccgccgcggggtggatgctcgtcagaggccacgacgtgctcgacggctccgcggctacgacgcagacgtacaggtatagcaacgaggcggggaggtatgagcgagccatcgacacactggatggtgcggtgctgagcgacaacgtgaccgagagctactgggcctcgggagacggcttggcttggcttgctgctggacccgcgggaggaggtgccatggaactgtgacggccagcagtttggacattactgctatgtaggagtccgtcgtcagactgggagttgagttgtccagac

SEQ ID NO: 3125 - DNA, 590 bp, Zea mays
  misc_feature (459)..(459): n is a, c, g, or t
  misc_feature (515)..(519): n is a, c, g, or t
  misc_feature (534)..(538): n is a, c, g, or t
  misc_feature (561)..(575): n is a, c, g, or t
  misc_feature (580)..(585): n is a, c, g, or t
gtataaacgatacagaaaaaacaatttcttccaaaaagtaaacatctagttcgtttgaaaacatacaagctttggattttgggaggcaatgcatgatggtttgtcgtttgatagatcccatagtttcacctacgtttgcagatgtgttttagcaacaggtttaaacgtatctatatgccaccaaactattggaacgtccttaccattttatcaactgagcctgttgcgagaaactgcaagaaaagaaactagcatcagtaatctggaccggtggatgtgtttctttccctatttaacaaagaactatatagcaaaaagaaaaacatacattaggggcagacgggttgaaggagatggaagaaacagccttatcgtgtgcatgaagggtatacatagactggccagaagaacttgatgaagctgttcgcttatcgaaggcttgaaccatcccattttcangactgacctgggagattatacagaacatactacagttacagggtttcataccatcnnnnngtaattaaattaccnnnnntacataataataataaaaaaagnnnnnnnnnnnnnnnaaacnnnnnnattca

SEQ ID NO: 3126 - DNA, 303 bp, Zea mays
aacctaatgcatgggccgtatctcatagtactccgtcagttctattttatttgtcacggtttagtttaaaaatgaactaacgaacaacgaatattcgaaaacggttatgataaatgagaactttgttggtatgatcagctaatgcatggagctatcggttgtgatggactttggatgctcgctttcttttcgatctaacccgggtgttaaccctttagtcctggctggtgtaacaccaattgggactagtgcagaccttttagtcacgacgtctataaaacttgggtccggaactaatacaga

SEQ ID NO: 3127 - DNA, 478 bp, Zea mays
aatgagttgctgtatggaagggcgggctatctgtgggcttgtttgttcttgaataagcatctcagcgagaagacgatccctctcgagcacattgtatgttaatgctgtagttctgttatgattttatgaaaattcttgcacacaattcgtttttaattatactcatgtgaagaggtcttgcacactggaaatcttattgtatcaaaccccttcaactgtagaattctgtggcgaaggacattattaatgagggaagaggttttgcaagcaaggggagtagccctctgatgtacgaatggcatgggaagaaatactggggggctgcgcatggtcttgctggaatcatgcacgtgctaatgcacaccgaactgaaaccagatgagcaggatgatgtaaagaacaccctgcggtatatgatcaagaacaagtttcctagtggcaactatccctcaagtgaaggcaatgaatcagatcactt

SEQ ID NO: 3128 - DNA, 319 bp, Zea mays
tctataagttctggccattgcttctgcggaatctcaataccggcaaccttggcaataacttgggaagcagtggatctggcacttgcaacaggagatgtgagagtttgcagcagcaatcctttaatttgtgctttggcaccagcatccagtgccagccatctctggaaaagctcattcttcctgtgctgctcctttgcatccagtgcattcttaagaatcaagccagctaacctgcggctctcctcaggtttctcttcattggccaactcacttgagagagagagcaagaatccagggaggttctgctcctggaataaaa

SEQ ID NO: 3129 - DNA, 658 bp, Zea mays
aatatttttcactgatgcatataagccagttggcaaagcaattaagaaagctggggtagagatccaagcttcaggtagacaatcttatcccaatacacagataaacatgttcataagttcaccataccctttttcttcagcatactccacaacgaaatcatttagtgatccacccttctgtcatttgcatcttaacatttttagcgcagaaaactccaacaagctccatcccttaacatttttagcgcctgcagtttctctacaagataacgcctttaataatattccttttactgacacaggggaagctgtgtacgttgatgatatccctgctcccaaagattgcctctatggggcatttatttatagcacacaccctcatgcacatgtaaagtcaatcaactttaaaccatctttggcttcacagaagatcatcacagttatcactgcaaaggatattcccagcggtggacaaaatgttggttatagcttcccgatgattggagaagaagcactttttgcagatccagttgctgaatttgctggtcaaaatattggtgttgtggtaatgtttcctaagttccctttcacatttcacaaaactgttcttaagtttatgtctatccaaccttgctgcgtcatgttggtttttctatca

SEQ ID NO: 3130 - DNA, 857 bp, Zea mays
  misc_feature (52)..(56): n is a, c, g, or t
  misc_feature (715)..(715): n is a, c, g, or t
  misc_feature (770)..(772): n is a, c, g, or t
  misc_feature (776)..(777): n is a, c, g, or t
  misc_feature (782)..(784): n is a, c, g, or t
  misc_feature (791)..(793): n is a, c, g, or t
  misc_feature (798)..(821): n is a, c, g, or t
  misc_feature (826)..(826): n is a, c, g, or t
gaggggttcccacggcgcccccagccgcgtcctcgaggggtacctcatggcnnnnnttttctacgagccctccacgcgcacgcgcctctccttcgaggctgctatgcggaggctcggcggggaggtcgtcaccaccgagaatgcgcgcgagttctcttccgccgccaagggggagacactcgaaggtgagctgttgagcttcagctgctttgtttaatacagtaggttaaattatgtatgcatcggtgacgacgagggggttgtttgcgtggacaagtcggtgtctcaattgcattatggatgctgttgagagtcggtggtgcctgagcacactcgagtaggtgtggaaacgagcatgccaagctttctgccagttagcaattgccaaatttccatttcactcaaagttccagtcaaatttgagatcagaactggatttaatcgaaaacaaaggaaaatgacgtagtggattaccttgtcagttgtagaaattaaatttgttcttaatttgcaatttggatcaatttttaccattttccgtatcttgagcgaattccaggtcactaaccatgtgtatccatgatgcagataccataagaaccgttgagggttattccgatattattgtactgagacattttgaaagtggagctgcaaggaaagcagcagatactgcaaatattcctgttattaatgcaggtgatggaccagggcnacatcccacccaggtaaatgttcactttctgatcttccctcctgtctcactttannnagtnncgtcnnntgtcatnnntgggnnnnnnnnnnnnnnnnnnnnnnnnaaaantgacagcatgtaaaaaatggattttttgaat

SEQ ID NO: 3131 - DNA, 345 bp, Zea mays
cacatcgctgggaccctggctaccgagaacttgacgttccagtcggagacggcgagcctcgtcttcgggtgcatcgtcgtgaccaagctctctccggggtccctgaacggcgcgtccggcatcatcgggctcggcagaggcaagctgtcgctgccctcccagctcggcgacaccaggttctcctactgtctcacgccgtacttcgaagacaccatagagccgagccacatggtcgtcggcgcgtcggccggcctcatcaacggcagcgcgtcgtcgacgccggtgacgaccgtgccgttcgtcaggagccctagcgatgacccattcagcacgttctactacctg

SEQ ID NO: 3132 - DNA, 347 bp, Zea mays
gcgcgagttccatcacccgatccgcgtcaacttcttcttcgcgccgtggatcgcctgcctcttcctcgtcaagggcctgccgcacccggtgtggaccatccaccacgtggtgtggtacatcctcatggcgcccatcttcctcctggacctcaagatctacggccagtggatgtccggcggcgaccgccggctgtccaaggtggcgaacccgaccaaccacctcgccgtcgtgggcaacttcgtgggcgcgctgctgggcgccaagatggggctccgcgaggtgcccatcttcttcttcgccgtcggggtggtgcactacctggtgctgttcgtgacgctgtaccaga

SEQ ID NO: 3133 - DNA, 923 bp, Zea mays
  misc_feature (15)..(16): n is a, c, g, or t
ccttccgactccggnnagaagcagcgacggtgccggcagtcggttactccactcggcggcggcccatcctttcctgttttctcctccagtcctacaaatacaggacacaacacgcttgctcttgtgatactctattaaggtacggcctgaagatgagagtcctcttcatctggtgagaacgaagctccttttttaaaaaaaggaatacgacgctcttatatgcttacgtggattttgttttagtttttcgctaatatatattaaagaatgttttgcttgaggaactactggtcgcctgcatttgcttcagtaaaggaggggcctgttcgacatcatataaagtttaattgtgtagtggtgagcttaatctactgtgcgcatgcggtatgcttagtgctggcggaacggccaatcagattcctatattaattgcaattgtgcaacaggtttgtggtgccaggggtccaagaccgagatatccccgtgtatggaaaactcgtaagaaaattgggactatttccaagtcacagaagcttgttgaatgtgtgaggatcttgaacgtttctctgttgaaatttaattgtgtctgtgtactcttgtgcatcaccttgacatcctgttgagcttgctgcattaactttagtccattcccacaatccaacaaagaaggaatatcttttcattcagcttttgcagcaaaatttcagttatctgtatttgtagcaactataagtctgcatggtttcattaaccactttttaccaaatttcactcactctacctgtatcactgtatgttacataaggggagaaacatagtttgtgtaggatgccttttgcaaatactcattttcctatggacaaattcaaattgggtgtctgaaattacatgtcaaacttttatcatctcatgcagataaagtc

SEQ ID NO: 3134 - DNA, 531 bp, Zea mays
cctgcttagtcatggaagaggtgatgatgatgctgattcaaaagaaaaagaaattcagtacatgctactactagacagtaagtttcctttttttttctctaaatgacgtgtgttttttgcagtggatgaagttgtcgtctacagggatggcgagagatcagctgaggttctgaggaactcaggattctcatttctgactttcaagccctacaacgggtacagatgaggttctgagagtttcaatttcctctcctcccccagacaaccagattgattaggtgacttgtgacaacgcaggttgggccattatacgatccctgaagaactggacgacctctgcaagtggcttagttcgtcgcttggcctcggccgatctcgctaaaagaatagttttttttttggcgtatgcgcaatgggtttggtgacagcatatattttgaggggaggtttggtttgatagcttgtaaaacacttgatgctagctgctctcttcgcatgtggcttttgtttccgtcgtcctaatttacgtac

SEQ ID NO: 3135 - DNA, 409 bp, Zea mays
catttccaacgagaccaatgccgtcgaacgcaatggaaagaatctgcccgccgatgcactgcacgccgtgccaatcaacggggcagtcgtcggagtccagcgcgctggtggggttccagggaatggcctggcggcgggacgggtcttgccggatgcctcgggagaactccagcagtgcctccatgtctgaaccagcccccgccgaggcagcggagcacacggcccagatcgagagccacaacaagatgagccgcatcgcaagatcctgctgtgcagccaggcaattgaagcaatgctcatgcaaatgggatggatttttcgagatacggagcttaagatgaaaaaggcagtagggtagggtttaagctcccttggaaccgagaaaggggattaaggatgaaaggtttga

SEQ ID NO: 3136 - DNA, 377 bp, Zea mays
gtaagatgggtaagaaaattagtactaagaagcaaaagaatgacaaaacaaataggcagtttcaagaaaatcacaaaaaggctgacattgtggatttgcttcatgaagatgatggagatgaaggcacatacatagactgcaatgaaattcgaaaacaaaaaacagatgacgtgagagtaaaatctagaggcaaaatgcaaagtggcaagaaaaaagtcagcagatgtcaggcaagtgatggttcgcacaatggaggcaaggaaatgaaattatcaagtgacatagaagtgtgcaacagaagaggagatggaacaacggcagccaattttgaagaaattccaaaagaaaaggccgatgctgtgaaagtgaaacccaag

SEQ ID NO: 3137 - DNA, 372 bp, Zea mays
tgggaggtagcagcgccatgggagaagcttggttggggagggctgccggacctacaggtgagtgcgcatggaagaagacgcaggggaaaacaagcgccggtcttggagaagaagttcctatgcgcaaggaacagagaggagggaactggagagagaatcggtagtcaccaggggaggagatgcagaggggcgccatggggaaagtgttggtcgcctgcacttggagattccatgtgccatgggagatgcagggggggcgcctgttcctggagccgagcacataggcgagcaagattctggcgaggagtggcgccatggaagggagagcagagacaacggcgccgtgcactagggatagaggagcagggagaa

SEQ ID NO: 3138 - DNA, 298 bp, Zea mays
gagcgcgagcttgagggaggggaagacggagcacggccatggagaggaacctcgagggagctgcgcgcgtccatggcgagctgggcgtcgagcacagggaggaatgagagtaggggcgcgacggccagttgccatgaccgagcagggaatggcggctgtcgggtcggcgaccacgcactccgtgttgtcgcccaggaccgccagcagcttgccgtcgagactcaccgacgtgcttttgacggaccacgggaaggtgagctgcgtgagaaggctgtgaggataaatgctaaaggcgaga

SEQ ID NO: 3139 - DNA, 665 bp, Zea mays
tcaaaacccagtgcatccgagttcaggtcttcaggcttggcaggtgaagatttctcgagaaacccctggaaacaactggcttccgtttccggaccttgattcccacacctgccatgcccctcaaatgcctggtggttctgctttacgtcatcctgatgaacttccttggtttttcggactgtaaacatgccttcgcatccagaaacctaacaaagataaattactgattgcatcgtatcagggacaatattgtttctaagttactgagtgtttcttcttggtccaaatcggagcttcaggttgtccaaaacacgggtaacattgagaagtcgtggatcgtcagaaggaatctctcgcgcctgaatttgaaaaacaagggagcatgagcagaacacgaatcaagaacagccagatgaaccagttcgttttaattcttcagagcttaattgctgacaggtgacagcagacaaataatttcagtgtacaaacagttgagacccaaatgaatatgtacatcaaggaccaatatagtaagttagcaactcattctatagttaggaagtactcaattattcatagatgttttcaaggtgaagaaagtgtaccaagtcacaagttcaagatactaaagcttaccgtcagacccttgtggtatgcctcaacac

SEQ ID NO: 3140 - DNA, 373 bp, Zea mays
actgccccagggcaggcagcaccgcccttgcgccgctggacaccacgacgcccaacgcgttcgacaacgcctactacaccaacctgctgtcccagaaggggctcctgcactcggaccaggagctcttcaacagcggcagcaccgacagcacggtcaggagcttcgcgtccagcacgtcggccttcaacagcgccttcgccacggccatggtcaagatgggcaacctcagcccccagaccggaacccaggggcaaatcaggcgcagctgctggaagctcaactcgtaaactactagctacgtactacgcccaatgcaatgcgttatggcaggcagatcagagccaatcaataataaggcctcagctcgctctct

SEQ ID NO: 3141 - DNA, 441 bp, Zea mays
cgagatgatgacacaagagacgacattacataagatcgtccatagcagcatgttgcagttcctctgtagaatcaatgaaggtcagctactgcgcatcatcgaagaatctgcaaagaacggcgtttctgcagcggataatggttgcattaccttgttgttgaaggagctttgcaggattgacaaggtttcaagcgcagaaaaggcgttgcagacgtttgccaaaacagggctggtcccgacaacagagatgtacaacattcttattgacggctatagcaagatcagggagctccaagcggcattcttgctgtatcgccagatgaaatcgcatgatcagcttgtacctaatgaagccacccatgaggcactactgctggctgtgcgcaacaacacaagcatcgtctactgggaggacgtggaggagttgtttgagaagaatgg

SEQ ID NO: 3142 - DNA, 320 bp, Zea mays
cactactgcacacgcagcagcagtttcagcagcagcaccagcagcatgtggtgaaagaggagagtggcagcatgatcgtgttcggcagagaccagcaaagctgcagctcatgggacagcggctgcgcacatagccagcagcagccacagtacggcaatggccatggcaaggagctgggcttcgacggctacttgttcggctacaacaacggcggcagcagaatgaagcatgacaactgcaggctgatcagcagctgcagatgctcaccagcaagcccatcagcaggtgtcggtggagtacaactacgaggagatcaagca

SEQ ID NO: 3143 - DNA, 375 bp, Zea mays
ctccttttgttgcttcgtcactaaggacgctacaccagttcatcactcgctacttgtccactagtccagtctcggatatctcagctcggacgcctaccgatctgtccgtttcctacagccgctccccaaaaattccaactgattcctccgcctcttccgagttccccagaatccccagtttgatgctgcctctggccccctgcccaccgattggatcttggtcgatttctccgttcttcagatcctgtgcgcatccgctctaggtagtggccctttgctcggctcccttcctcctccttcgcccatgctcggatctttcaatctgcgccggttttgagttcttgcccctgctagctgccggccgtcaaaggctag

SEQ ID NO: 3144 - DNA, 295 bp, Zea mays
atggatcaggctaccggatggcataaaagggcagcgacggggcacatggagccaggtcacagcacggcagatcgcccagtccaccggctcctgcagtcctgcccctgagctcctcccctcccctcggaatcaacgcggctgaactgaaccaacctccccgatcgaactggccggctgagcgagcccccggccccacgtatacttttacggaaacgcccacaccgccggctcgtcttctcccgaacccgaacctaccctccccgattcaaaccgtcgctgccgtcgccgagagagt

SEQ ID NO: 3145 - DNA, 394 bp, Zea mays
tttgtgctggctgtctacctcctccggtgcttgcaaagaagagctcagcaatttaggtgttgtccacctcacacctttattcatcaacttcttgcccccctcgacatgtcaaaatcccgtctttttgccgctaaggcacttcacacatcaccagcgtcgttgcacttcacacatcacggagacgagtggcgcggctaaaaaaaaatcaaagtaagcagagtagtcaatttcctctgatcattgggcacacactttggcaggtcactgcaacccatcatcggctggtgagttttctccttttgctggtcaccggagaggagcttgaagagccagaggccccatgtgaagcagcagtcgctgctgccgcggcatcgtcttcgctcttgtagctgag

SEQ ID NO: 3146 - DNA, 530 bp, Zea mays
tttgtatcatacattgtattttctttgttatgccatctgcggcgtcttatgttaaatgtcccaatacacgagttgtgaagcattttatagctgcagctacaatcgtgagatatctaactggcactgcacattactctttcaggaggcagagaagcatctttcagacatggtgaactcaaaatctctgactgcgaagatcgacaggccgatgggagttgtgagcttccgagtagttcaggactgcaacggcacacttaactcgtgggctacaaacctcgagcagcttcttgaccttgtcgagaagagctgtcaccagatacacaaggagactatgatccacaaggcggtattgaaagcttgactgattggcgctggctgtttttgcttcgtaagtaagatactgtaccagcagaaggacggggatgctatttgttgctgaactcttgctgcacattatttgaattcttagatctgcaatcagatacctactcctgaaaagctgatccggctcctcattcaaactcagttct

SEQ ID NO: 3147 - DNA, 356 bp, Zea mays
  misc_feature (348)..(349): n is a, c, g, or t
tgccctatggtggtgcagggggcatctctagctgagatgcagggtaaggcggcctcccagactccacctcctgctgaggcgtgggggaagagttctgctgctcctgctcctggtgtcggtgctcctggtgtcggcgctcctggtcctcgtgcaggcgacgatgcagtctctccaggtgactagactgacctggcaccatgagactgtgacagccctcccaagttatcgggcccacgtgcaccaatccttgccttaatggcctcgggtggctgtgcacgtgtaccaggtaacttaacaaggctatcgagttcaccaactggaactcatcatcccaaggatctcccacannacaggta

SEQ ID NO: 3148 - DNA, 824 bp, Zea mays
  misc_feature (331)..(335): n is a, c, g, or t
tctttggtttgaggtcaaagtaggatgaggcgggggcgacaccgtcccctcaattttttgggatcacgccgtcaccaaaaaattactccggtatttatttcaccccacgtgattctcatccaaacactatagaaactgtagccatccccttccatccctccttatacatccaaccaaacacaccctaaatgtttatattgtggggagctaggccacaagaagaacagccctaaatgtcctttaaatggcacgaagaagaggcgtgtgttttatgtgttgatctttgttcctgtttcctgttctgttttttttttcaaaaacttacagctgnnnnntattcttataggccaaggaagcagcgacataactctactcaaaaatggttttatgtgttgatctttgttcctgtttcctgttctgtttttttcaaaaacttacagctggtctgtattcttataggccaaggaagcagcgacattactcaaaaatggtttcctcgcgacgacagatttacacaagaacctagaacaccgcatttcgacaaagttatacaagaccctggtacaccacatgaacagccatcgtcttcgcagccacttccaagggtattgataaaaaaaatcactccaagaaagaggaagtcggttccactaagcatggacgagatgtagtatctgttagttgtatcatccatgtgttgtcagcatgtgactgcagacatgtgccatgtatcagacttattgtatcagactacgttcagcctacttgttagtagctgagttattgtgtttcctactacgttcagactacatctatcagactta

SEQ ID NO: 3149 - DNA, 362 bp, Zea mays
gaaatggccacatacaataaatgcctgggagaaattgacctcatgggcattccacccgccccaagaggcttgcctcggattgaggttacattcgacatcgatgccaatggaatcgtgaccgtctcagccaaagataaggctacgaggaaggatcggaacatcaccatccgatcttcgggtgggctgtctgaggctgacatctagaagatggtgcaagaagctgaactacgtgcctagaagaatcaggaacggaaaagccctcatcaactaatctaattcttttgtccattattttgatgagaagtccatccctcgataagtgttcccttcatgagtttataacaccaactccaacatgctca

SEQ ID NO: 3150 - DNA, 389 bp, Zea mays
aggttttgcgcaagcatgaaggaaacaatatatcaaaacacatgacacgaggcattttaacctaacaattaatataaccacaacacccggttgcagccgtccagaaaactgacataactaatataaataattaatccagtccatgaaccaatagtaggaactagcgaatcaatgtactattactagtcgatgtaaaattcacgagaacgacgatgatttcggttgagaccgtccatcaagcacttagcgcgtgatgaacaacgttccacacgtcgtcgcccaacagctagaatttcactccaattatcaaccacacacatcatcaaattaaaaattgtgccaagcgaaggggcacaacgacgtgcggatacacagacctggagcaagac

SEQ ID NO: 3151 - DNA, 577 bp, Zea mays
  misc_feature (571)..(574): n is a, c, g, or t
cttcagatgatgctcctcaatcacattcagccagttgccgcggacaatttggttggcctcttcgattgatgtagcctcaggtattgccctctttgcgatcgacattgttgcaggctccgcctctgctgcagcctagctcattcaacatcaaattgtcagtatgagcgtgcacaaaatatgatatccttcggctgtttttttttcaacggcgtcacattttcaagattttagagaaagaacggtaacctaggattgttacgaaaagttgagctgcagattatcagagtatataagaaaacaatgagaagctgacaacagaaaagttaattaccagccatgatagattcccttcgtcgtaggcatgaaacgggttgagatagtctgatcaagagaaatgaggcgttagcattatgtactccagtttactttacttcatatagggtatcttttggtcgaatataatgctgaaattaatcaacggaactgaaggaaaggaaaggaaaggggaagtgagctgacagtcagggtacacgaggtttgggtcttggattctctcgaacacctcgtacannnnaaa

SEQ ID NO: 3152 - DNA, 458 bp, Zea mays
atgatatcttctatccattgatgtctcaggcagtccaaggagcttcataacaatttggaactggcacaaaagagcattgtagaccatacttctgctcagagaaaacgaaaggcgagagtaatttcagagtatgctgttatggcccgttctatcattcgtaagaagtttcagcagttccaagaatctgctatagctgaaagagtgaaagaagaagagaatgctgtgaatgatgccaaatctgacagagtgaaggatcctatgccggcaaatacatctgccattggaaagatacagaacatagataccagcttgggcatgtcagccaccggtaaagtactaggtgagaactctgttgtttttatattaccattaatctccacgccttctgaagattcgttaaactgtcaaggttttcttccttttttgtacttagatgatgaagatgaggttccagaagt

SEQ ID NO: 3153 - DNA, 347 bp, Zea mays
gggggcaagaatccaagacgaatgccaagaagaaaaacttaggacgctcactgaagtgtgcccatgccgaacctgatggggagaaccgaaacggttgcagcagcactgatgcagacgagaactcacttgcagaaactgctgcctctgatcaggagaggaaggcggtgctgcaggaattgagaatcgaggtggatacatcgcgagctgacaattccgatgacaacaaggagaatctgtcgagcgctccgagtgatgaagaagcattgaacaattcacattctgaaaatggaaacagacagttggagaacaatgataatgttcctctgaacgaaaatgttgctctgaag

SEQ ID NO: 3154 - DNA, 569 bp, Zea mays
atatgtgaactctttgttggcattttcagattcataaacggtcatttgggtgatgaatatctgactattaacttgcaggataagcttggtcctttctgtagaagcgcagtagattgtgctgttgtattagacacaattcgcggaacggatgccggtgatccatcgtcgcgtgaggttgctttgggtgatccatttcatgttgacatcaccaaactcactgtaggctacctcgatgacgctgagatggaggtagtacagagcttttaatctgctcagctgtctatagttttgtgtattgatcattcctgatatgctcctctatcacggtacatgttttcgtcgtcgtgattataccaggttgtcgatgttctttcctctaaaggtgtcaagctggtccccttcaagctgaactacactgtggaatcagtccagtccatcctgaacataacgatggacactgatatgcttgcgcactttgataactggcagcgggaaggacatgatgatgactatgaggcgcaagaccagtggccggtagagcttcgtcgtgcacggttaatcccagcggt

SEQ ID NO: 3155 - DNA, 347 bp, Zea mays
acctcaacgccgacaccttcacgttcgcggccgctgatggctccggcggccaggtctccgtacccgacctggccttcggctgcggtctcttcaacaacgggattttcgagtccaacgagaccggcatcgccggcttcgggcgcggcgcgctgtccctgccgtcgcagctcaaagtggacaacttctcctactgtttcaccgacataacgcggccggagcccagctccatcctgctcggccttccggccaacctttacggcgacgccggcggcgtagtgcagtccactcctctggtccagaacttctcgtctctggaactatactacctgtcactaaagggcataacc

SEQ ID NO: 3156 - DNA, 720 bp, Zea mays
  misc_feature (662)..(665): n is a, c, g, or t
  misc_feature (672)..(686): n is a, c, g, or t
  misc_feature (689)..(715): n is a, c, g, or t
tctcgccttccgtccctgcgcatccgccgtgcccatggacggcggctggtcgaacggcggcgccacctggtacggccccgccaagggcgctggatccgacggtacgtacgtgtgcaattaccatgcatgcgtcgcatgcgcggccatgatgcaagtgtgcatttattctcattgcgaatgatatgatagactacgataatatatatgtgcgttcacgatgcatatacgtaggtggtgcgtgtgggtaccagggtgccgtcgaccaacctccgttctcgtcaatgatcaccgccggcagccaatccatcttccaggacggcaagggctgcggcacctgctaccaggtacgtcagtattgttatatatatacgttcatggatctgttcatgtatgcatgcacagtgcaagtccactgtaagtactagctagctaaagattactaattgttggattgcacacatgcatcttgtaggtgaagtgcaccggacacgagtcgtgctccggcagcccggtgacagtggtcatcaccgacctgtgccccgacgctacgtgccaggtggagcccgtccacttcgacctgagcgggacggcgttcggtgccatggcgaagcccggccaggccgacatgctccgaaacgccggccgcctacaagtccagtacnnnncgggtgnnnnnnnnnnnnnnnggnnnnnnnnnnnnnnnnnnnnnnnnnnnggggg

SEQ ID NO: 3157 - DNA, 596 bp, Zea mays
  misc_feature (542)..(544): n is a, c, g, or t
  misc_feature (576)..(581): n is a, c, g, or t
gggcgcagacgtttcccgtgcgcaatcggtgaagagccgcatcgccaggagcaacgacgcgcgcaggctcaagaactggatcacggtgctccaggaagcgcaggccgccgtggccgacggcgccgactgtgctccgcaggtcagcgctcgtccgccacgatatgtgccacacagctccatgcatgaccctctgtacttcacgtgtgacaaacgtattcctctcggtgcacttatctgctaggtgatggcgttgcaagccgaggcgttgctgaggctgcaacggcacgacgaagccgactcgcttctcagcggcgccggcgcgccaaggttcggggtcgacgagtcgaccaagttcttcggcaccttcggccacgcctacttcctcatcgtgcgagctcaggtcgacatggctgctggaaggttcgttcattcccgtcctgtcctgccccgacacagaaacgcactccccctctccaaacaaaacgtggcgtggttgacgcttgaattctcgtgaccacatcacggtaggttcgaggacgcgnnngccacggcgcagacggcgtttcagctggaccnnnnnnaccgggaggtctcgg

SEQ ID NO: 3158 - DNA, 391 bp, Zea mays
gacgatggagaacacctcagcttcttaagcacccttttctcaatcctccagttccaagggatttacctccctctgacgatgatccatataggttgctcattgagaggatcagagtccactgggataacccaatggttcaaaaacttcgtagtttaattgaagaactcgatggggatcagtaaaaatgggtttttaacaatcctgattgatactcgatctagggcctgggtagtggtggcacaagtgttttagtttctgtattgttcctgattgatagggtactgttgtaatttgtaattagagagtggcggcatcggttggagacgtcggagcatattatgatgccctggcatttttgcttcctcgtgtttggaggttgatgtgacacttt

SEQ ID NO: 3159 - DNA, 244 bp, Zea mays
ttgtctaaaggaagagactgatcctgagaaaatgcttacacgtggaactcagattaccctgtttctaagagtatgttgctatgttcatctgagatgtcatgaaatgtttttttatggcaaccttgcattaatatgtcttctatagcctgatgataagtacgagtttgcggacccttcaaggattcaaggcttagtaaaaaattactctcagtttgtgtctttccccatatacacatggcaggag

SEQ ID NO: 3160 - DNA, 496 bp, Zea mays
  misc_feature (483)..(484): n is a, c, g, or t
ttctttcatcgaccataaaattcgatattttcgtcaccatggcaaccctcacacatgactccactattttgtgttcttctatttatttcacggtcgatagtgtgatatcgaaccccatcgacaagacatgctgaaaatattcgaacccgaaggtccggttcacatgacaatgcaaataggtcatcactaatgtcttctccatccacgtaacgtagttttgcaatctaaacaatagaataataatatggtgaaaatcaacacaaattatattttttaataaatattatattggcataaaacttacatgcttcttaaaccagaaagaaaattgcttatcatgggatttttgaacataaggagttccttgatccgctaactcttccttgtatatcctgtaattatgaaacatagttaattcgaacatcgaatctaataattagcaagtcacacagataaattagaattatatcagggtgttatacnncaaatatgctca

SEQ ID NO: 3161 - DNA, 500 bp, Zea mays
agtagatcgatcaaactgcagcgttctgtctgccccatggttttcagaaacaactgccgcaaacaagttcagcagttgagctcacatctgaatgcacctctcactcacctttcctgcagtgctgctgtggctgctcaccgcggcatgcatcaagaccgggaggctgaagatcgctcggcgcgcgatcgacctagccgaggcgaggctcgcgagggacggctggccagagtactacgacggcaagctgggtcgctacatcggcaagcaggcgaggaagctccagacgtggtccatcgcggggtacctagtggccaagatgatggtggaggatccgtcccacctcggcatgatctccctggaggaggagaagccgaccaagccggtgctcaggaggtcggcctcttggacagggtaaggtagtggcggccacaaaaacggcagcaggacccgagttctggttctttgagctaacatctcgaatttctctgcaacttcttgct

SEQ ID NO: 3162 - DNA, 406 bp, Zea mays
cagaggacgacctcagcaacctgcgctacatgcacctggtcatcaaggagggccttcggctccacccaccattgccgctcctgctcccacgggagtgccggagctcgtgccaggtccaggggttcgacgtgccggcgggcacgatggtgttcgtgaacgcgtgggcgatcgctagggaccccagccactgggacaggcctgaggagttcgtgcctgagagatttgaaagcagcagcgtcgacttcaaggggacggacttcgactacctaccgttcggggcaggacgaaggatgtgcccgggcatggcgtttgggctcgtgagcatggagcttgcgctcgctagcctcctctaccattttgactgggagctgccgcctgggatgacggccgcggatgtagacatgac

SEQ ID NO: 3163 - DNA, 506 bp, Zea mays
  misc_feature (474)..(479): n is a, c, g, or t
  misc_feature (482)..(496): n is a, c, g, or t
gcctcctgttgccctggtctccattgggccctttgccagattttctttcgcctctccgccggcgacgaacaccaccaccaggtgcgcccaccccttcttttccctctctgccgcgcgaaactgagcacccaagccctaacttaagccttttgtattcggatctgatctaattacgaagtttatacatatattatacataccactaacttcgattttttcttacaaaacttatcgggtgtacatgtgtacactcatgtcatttactgagtcttcctagtagtggagcttgggcatgaaagtaggagggggcaatatgatatggaatgtaaggagaaggggtatgttagcgttccattattatcacttaaagtggtgaaactgttttctagcttaggaggggccatggccactatgatcttaattaagttccgccactgacatgctcttgaactgagcactgaataattgatcagnnnnnnctnnnnnnnnnnnnnnnattttacttt

SEQ ID NO: 3164 - DNA, 727 bp, Zea mays
gagtaagcgctgaagagattgatccagatagagtggaggtttgaagcttcaacttatttgcatgaatatcatttttatttgtatgcttggccctcatatctctttactacacgcatatggtagggtttcatatgacaaaaacttgtgttcccaagtatgcacctatttttgcatgtgaattgcagcattccaagattgcttaaaattatttagttgcttcgcattggaaccaatttctattcttaaaaggtaccatcattcattgcagtcacgatctgtgtttgtcaagaacttaaatttcaagacaacagatgaatcattgaagcagcatttcagtacaaagctaaagagtggcagtcttaaaagtgcaacggtatggattattgtatgtgctcttactatgtatatcaggagcatactgttttatccattttctttgtctgtctttaggttaagaagcatgttaagaagggcaagaatgtttcaatgggatttggttttgttgagtttgactctgttgaaactgctaccggtgtgtgcaaggatctacaggtaacacccatccctcctcttttgttttctttttttcgcctctttcccttagatgctcatatagatgtgcagcatgctaaatgtttctttggttcatagggaacggttctggatggacatgctttgatcttgcaactgtgtcatgtgaagaaagatggtcaagcggcaaagaaga

SEQ ID NO: 3165 - DNA, 660 bp, Zea mays
  misc_feature (649)..(651): n is a, c, g, or t
caggggccgtttaaattgatggatatcttgtggtatcaacagcgcctcgtagtcatctaccatgacctgtcaacaaagcaagcaagcagtcaagaaaacttgctcatgaaaaaaaaacttgcgacgcttgtcgcaagccggtacataaggcagtgttacggcattccctaccttgtatttatgaccatgaaacgtatactcgacaagtaatagcttcgggtctccaggacaaggatcgtagaaacccattattccagacttctttatcccgtcatgaagctgcaggtaacagataagaaaattcagtgcagagtaaccatgcaactatttgctaccttgcagaaaagtgtaaatttcggggtttcaagcgcgtatatagaattccaatctattttcaggttgcaacccatacgcaaagccagtggcaaaattgcaaatgcccagcagaaacttgagtaggttcatatcttgggaaaaaaaaacacttgtcaccaatgtaactcgaatgtaccttgagctggcctgcctcagtaacgaggaagttcagtgggatggtcacatcaaatacttgtgaagccatgtcattgtgtatatcattcaattcactgctcattttgattttttggcgactgccatatagagccttcgnnntcaccaatc

SEQ ID NO: 3166 - DNA, 446 bp, Zea mays
ctgcgacttcccctgcattaaggatgacctcttctctctaggtcttacaaccctagacgtggaatcaggatcagtgtgcacggggaaccagcaacggcagcacgtacgtggaaccggcaccgacgaattgcacggggcagcagacaatcgtcgcctccttgactccatccgcgaccttcctccatccgtggtgccagcaaactgcacgagaagacctaggtcaggtgtcctttactttctttgatactgctttctttaaccacttattacttgttctatgtttgataataaattttaggcacagatgtaagtcactactagttgcccatgtttactagttagttgttcatgttcactagtaggtagccaaaagtactcaattaagttatgcttgttaattttacctaggtgactcggtgctagccacactattacaagatgcctcc

SEQ ID NO: 3167 - DNA, 672 bp, Zea mays
  misc_feature (246)..(246): n is a, c, g, or t
tgccggattcagaccaacctttcgtcatcaatgccaccgaagagaagtgctcccggccgatatccgcaagatatagcgtattcttttagctcttctttttcagcctttatcagttccttaccaaataagttttggaagttaaaaatttcatcctctgaagtgtcttcagctatttctttctccttttcgggttctggggccataatttcttcggtggctgcggcagcttcttctgcggccatgttntctttgccggattcagaccaaccaccgcgcgcacgcggtgcccgacggcctgcccgtggccgtggatggttagatgcgatgcggatgtgaggctgcaacccggcgagcgcggcgccgccgtccgtcttgcgttcaaacagacgagggatacgccggccagacacctgcacgcgtgcgcacgctgggagggggagggcggtcaaggctccaattatcccttggtcgccagtcgccacgacgcgttgccgaggaggagcaggcggcaggccaactcagtggagtggaagcagaagcgtgctgggtctgggttgctgccgtgtgcggtgcccagtgaccagcctttattttcccctcctttttttgtttctgagacggaggaaacggagtaggagtacttttggttgctttcgtctccgttctctatac

SEQ ID NO: 3168 - DNA, 335 bp, Zea mays
gacgtcgcaagatcaagagcgctgtcgcaccacaagtctgagatgtttcgccgcttcaagcgcctggttcaggtccgtcatgagctactggaagggaaatgcgaccttggaaagtttgtagacgaggtctgcctcatcctaaagtacgtagtgagccaatgcttctcggatcaagatcagatcgacactgtgagccgtgatacagaggattttgatggagctaagccatcaggtgcggttacagcagacggtacgcatgacactgaaagcgctaaaccaacagcgacttcagcttttcggacagaagcagatggagaaccagttcagtcagttga

SEQ ID NO: 3169 - DNA, 348 bp, Zea mays
gtactaccagtcctactccatggtcggcctcggcctccccggcagcgggcgcgacggcatcgaaagccacgccgcgtacgatgcccgcgaccctctcgcggagaagaagaccgagatcgcccagtgccgccggaaggtggaggacgagatgacgaggcacgccaaggccgtcgaggtcacgcggtccatgacgctgaacaacatacagaccggcctgccgggcatattccaagccatagctgggttctcggggacagtggtcgaagctcttgatgtggtctgccgccgagctgggtctgtgcggtagaagaagctctttgccatcaggattaccaagagaccatttgc

SEQ ID NO: 3170 - DNA, 409 bp, Zea mays
gtacttcgacaccatgaaggagatcggcgcgtcgtccaaggcgtcctcggtgttcatcccgcatggccccggagcggtgcgcgacatcgccacgcagatccgcgacggcctcctgcagggatcctctgtcgccaaacactaagctgcctgcctgctgttgccgctgctgctgctgaagaacaccaccaccactattatatatataatataatgatgatcttggtaccagagtgatgcttgtctatattgttcatcactcatcgtcaccatctgctaggatggctatctttatgcttggggattggagaaaaccttatctaaccttttagggaaccggtaatatatatataatgcagcatgagtttgcagtatgttcatcagaaccttttagagtgtagatgcatgaatg

SEQ ID NO: 3171 - DNA, 349 bp, Zea mays
cttgattttgatccaaatatcaaatagatatttctacaaacaataacctcctggccatattagggatctggatatagttggagttgtatgacacaatagatgaaaatttacttttctttttcagcgtttcttatatggtgccacatggaataatttctcaaaaaaaaaccgtctatttcaaattgtcagtgtttttccattggaaagctacaacaatatatagcccatgcaaaaacccaaactgatcacatcagattgatagatgttgaattaatagatgagaacattttcatgtcctaacttatgtgctgtgcttagtatagtataatttgcaacctttcttccaggg

SEQ ID NO: 3172 - DNA, 419 bp, Zea mays
agtttcagcaggcctcacccctccaatccaggaacagcagcacgagaagccgaggcagcaccgccgctactccgcctcgatgatcttcttgggctctgcgaaccagagaagaagcagccatatagacctatcgatcatgccgatcaaagggtaagacgaggcatgaagggattcggaccgtgtaactcgggcggtcgggcatctttgccccaacccacgccgcgtgtagcctctaggtactggtccacgaggtggcggcacttctggtggtggttgatcccctcgatgcggtagcaccagcggaggcgctcccggatgatcttggcggtctcgatctggatccacttctcccgcaccaggtgttcccggtactccagcatagccaccgggtccgcatatgggttcttcgggtcgaagtt

SEQ ID NO: 3173 - DNA, 298 bp, Zea mays
  misc_feature (246)..(248): n is a, c, g, or t
  misc_feature (257)..(258): n is a, c, g, or t
  misc_feature (269)..(277): n is a, c, g, or t
  misc_feature (291)..(294): n is a, c, g, or t
tcgcttcggaagtttcaacagtcttcttcggagttatgcttgaggacttaattgtttctagaacatctagcacgttgaccattctttttcttttcggagtcaccgctggccccttttggatttttgttgtgtcaacatttgctgaaggacttaaaacttctgatattttggatccctcagctgatccttttgcttcttccattttttctgttgttggcgcttcggccatttatgcggtttctggtnnnaaggctggnngttcaacctcnnnnnnnnnagaggtttctccgnnnnattc

SEQ ID NO: 3174 - DNA, 433 bp, Zea mays
gtcgctgactcgcggggtccgctcggtcatccagccttgcgctcgcgtttggttcactggtagtggggccgccccgtcagatgaccttcttccccgcgtgaaccggatcgcgctgaccggatcctccacgatcgcgcggctccgttgccagctgaagttgttacggcctccaccatttccgcactaacttcgccctgttatctagccgagacctcgcgacctcctctcttctcgtcctcgctcgcatatgctcagatttccccgcatcgccacacgccatgaccacccgcgcgcgggtcgggtgtgtggggactgtcctccgccgtaacccagcaccgctcctctctggttcatagccgtcccactgccgctgccgcggggctctgctggcggccatcgtcacctatacccgaccgccatgggaggaagctgt

SEQ ID NO: 3175 - DNA, 307 bp, Zea mays
tttgtagttctgtttgcttgattttgtgttagttgtgtgtttcttttccagcttgctgagattgacaatcatggaaaactggcatctaatgagatcaacataaatcttctgtcagttttttaattgtgttgtttgtatgctttctttccagcttgctgagattgtcaatcaaggaaaactggtgtctgatgagatcatcataaatctgctgtcaagacgcctggaagagggagaagaaaagggtgaattggggttcatccttgatggctttcctcgaaccatgagacaagcggtaagctaattattg

SEQ ID NO: 3176 - DNA, 398 bp, Zea mays
attcttgacgtaggaggtgaacatcttcttctcccccgtcatatggtttgtgcatccgctatcaataatccagcttgaacccccggatgcataaacctgcaaggcaaatttaggcttgagacttaggtacccaactcatgttgggtcctacaaggttagcacaaatattcttagggacccaaatgcaagttttgtctcccttgcattttgcccctaacttcctagcaacaattttcttatcctttctacaaatagcaaaggaagcatttaaagcacaataaattgtagaaggttcattcactactttcctaggagcatgaatcatattctttctaggcacagcatttttcctagacatatttctaccatgcataagcgaagaactagaagcaaacatg

SEQ ID NO: 3177 - DNA, 375 bp, Zea mays
gtcggaggcggttccgaccaggcgactaacccggcgacgggccggcgattcgacttccgccaccgtcttcaaccttcaagccatgcgcattgtagcatcggccatcggaggccgactgagtagccctaactgatcgaccctctcattccacccctgtcgagcaagaaggccgactgagctgcacacgtcgaaggtattttttcttgattctaagcttgctaccaccatcaaaacctaacttcaacctacctgaaacatgaatcagtccatgtattcaccgatttagttgtttttttagaaaaccccgtcccgccctggggattattacgggtttttgtttcattaggttggcgcagtaacaatgtgtgtttggtt

SEQ ID NO: 3178 - DNA, 390 bp, Zea mays
tgaccctctaacactcctcttctaaagacagtaacacctatatccgtaaaaagacagttgtagcccattttgcataattgagaaacagaaagcaaattgtaatctaaagaatctacaagaaaaacattggaaatataatggtcaggagatatagcaattttacccaatcctttgaccaaaccttgatttccatccctgaatgtgatcgctctttggggatcttggtttttctcgtaggaggagaatatcttcttctcccctgtcatatggtttgtgcacccgctatcgatgatctaacttgagcccccggatgcataaacctacaaaacaaatttagttcttgattttaggtacccaaacagttttgggtcctttggcattagatacaag

SEQ ID NO: 3179 - DNA, 304 bp, Zea mays
atttatagagcggatttttatgttcaagttgtgttatttttaattcttttataaattatgtaattttatctgattagttatgtaatcagatatcaacgagtagagacgcaaggcggatcaagagaggtgccctcgtccgcatcaacgccgagcttacccgtttcagcggtaggagctacagggttcttctctcgctaaaagctacagggctcttcgctcgcttttgcaacaggctcaaaatttatagcgttgatgccccggggactagatttgtgggggttctctttgtcatcatttcgagcat

SEQ ID NO: 3180 - DNA, 537 bp, Zea mays
tcatgggtctggtgcagcggtgagaactctcactgagtcaccaggtcgcacattcgaagcagcctcttcgtatttgcggggaagacttgcctcggtttattccttccccagacctcgctcctgtgtgagcctccggcactagatccgcccttttttatacgctcatgggcgtccaccccagttgacataagaagtggatgaaagaaccaagacgaatcagcaatgaagcaaaggccatgtagtttgtaaggtccctagtaagtcagcttcaacttgctaaacagctcatgacgagacctggagcaggaatactggtaagtcagcttcagcttgctaaacagtttcatggcgagacttggagcatgaatacttcaagtacttatcatgtcatatcagactcatttttttggctcatttattactgaattaaattgggatgaaagtcgaaatgcaaaacttttagatggaatgcagatcttctgatcttcatgtggttgctccttaagtgaagccatcacatcagacaaactacttggc

SEQ ID NO: 3181 - DNA, 354 bp, Zea mays
gtcctgggcctgaggttcggtctccttagccccaccaaccattttctggcgcttctgggaggagcccgaatcaagggatgggtccgagacaaaagacccatcggcgcgacgcagtcgatgtcgtctttcttcccccgacctcctggcggccgaatcaaggggtgggtccaaaacaaaggacccatcggcgtgacgcagtcgaggtcgcccctcttcccctggcctctcggcgacgtccggggtagaggagctgcatgcaggctccttgcctttgcccaagaagctgggccccacaggagggaccctgggggcgacatcagcaggctaggggcctcgaactggtgtaccaggtat

SEQ ID NO: 3182 - DNA, 455 bp, Zea mays
gcgcagaagaatgatgagaagatcagtgagattcggcgactgattctagatggcagaggcaaagattttcgagaagatgcagaaggcgtgatatggttcaaagaccgcttgtgtgttcccaatgtccagtccattcgggagttgattcttaaggaagctcatgagacagcttattcgattcaccctggcagtgagaagatgtatcaggatctgaagaagaaattctggtggtacggaatgaagagggaaatcgcagagcatgtggctatgtgcgatagttgtcgaagaattaaggcagagcaccagagaccagctggattgttgcaaccgttgcagatccctcagtggaaatgggatgaaattggtatggatttcatagtcggattgcctcgcactcgagccggctacgattccatttgggtagtagtggctcgtttgatctagtcagcccactt

SEQ ID NO: 3183 - DNA, 134 bp, Zea mays
tgatcaaggtggttgcactatcacggcaaaccagccacgattcctaagctcgattatataggtaaatcgtgctagtaccattgctactagtacataaattagcagctaaaaaaatgtcactatccaacaaggtc

SEQ ID NO: 3184 - DNA, 475 bp, Zea mays
tgctgaatttgtcattgtcacaaactagtgtgccatatagcatgtaattgttttcagtgttagattgatgtctgttctgctctgggcagtaagctatgacttaacatcacttaataaaacttgtttactcttaatgaaaaacgtggcttgatagactggtcattataaaaaaatgatgactgttgcatctcattgccctctaacagcctagtcttataaccaaacaataaacttgttgctcatctattgattctcagttctactagaaggctaggtgaaataagcaaacaatcagtatacttcatttctagaatcgtgactggctgtctggcatcactgaaaaatcaccattgtgttcatgctggccactagcccactactactgcatttatgatttatgtaagcaccgagtgaccattagcagctcaatttctctgtttgaccttagcaggcacgtgaacgttctccatgatca

SEQ ID NO: 3185 - DNA, 1019 bp, Zea mays
  misc_feature (463)..(908): n is a, c, g, or t
  misc_feature (916)..(967): n is a, c, g, or t
  misc_feature (969)..(1016): n is a, c, g, or t
gagccgagggactcctacgcctccgggatacagatacctcactcgtcaccttcgcacgaggcaactcacgcttggtgaagtggtccagctagccgacaggcgagtcctagtgctcaaaatgaggaaaaaacacggctccgtgccaaaaatacatacatgttcaggccccgacagccacaatgaacagacaccggcactcaaggtgccattacaaacggaactccgattccacctccgcaggtacgaacaaccccccacgattggagggcctacggagcaaccgaaggccgacggatggctcgccgccgcccgaagagcagcagcgataacaacttctgctccgagcggccgaacagcagcagcgatgacctcagggcggatgctgctgccataaaaccctcgcccacgtccccactcgaggggcgaggacaagcagaatgtcgtagagttggaggtcagtccnnnnnnnnnnnnnnnnnnnnnnnnnnnnnnnnnnnnnnnnnnnnnnnnnnnnnnnnnnnnnnnnnnnnnnnnnnnnnnnnnnnnnnnnnnnnnnnnnnnnnnnnnnnnnnnnnnnnnnnnnnnnnnnnnnnnnnnnnnnnnnnnnnnnnnnnnnnnnnnnnnnnnnnnnnnnnnnnnnnnnnnnnnnnnnnnnnnnnnnnnnnnnnnnnnnnnnnnnnnnnnnnnnnnnnnnnnnnnnnnnnnnnnnnnnnnnnnnnnnnnnnnnnnnnnnnnnnnnnnnnnnnnnnnnnnnnnnnnnnnnnnnnnnnnnnnnnnnnnnnnnnnnnnnnnnnnnnnnnnnnnnnnnnnnnnnnnnnnnnnnnnnnnnnnnnnnnnnnnnnnnnnnnnnnnnnnnnnnnnnnnnnnnnnnnnnnnnnnnnnnnnnnnnnnnnnnnnnnnnnnnnnnncccccccnnnnnnnnnnnnnnnnnnnnnnnnnnnnnnnnnnnnnnnnnnnnnnnnnnnncnnnnnnnnnnnnnnnnnnnnnnnnnnnnnnnnnnnnnnnnnnnnnnnnccc

SEQ ID NO: 3186 - DNA, 626 bp, Zea mays
  misc_feature (507)..(515): n is a, c, g, or t
  misc_feature (521)..(543): n is a, c, g, or t
  misc_feature (545)..(545): n is a, c, g, or t
  misc_feature (552)..(578): n is a, c, g, or t
  misc_feature (581)..(621): n is a, c, g, or t
tgagtgaagaggcactgcaaatgttccgatatttgttagaacagtgcatcaaaccaaatgctgttactatagctagcgtcttgccagggtgtgctagcatggcggctttgcctcttggtcagcagatccatggttatgttctaagaaacgcatatgaaagaaaatgttatgtggagagtgcactgatggacatgtacgcaaagtgtggcagacttgacctgagccattatatcttcttaaaaatgtctcagaaggatgaggtgacatggaactcgatgatttcaagcttttcacagaatggaaaaccacaagaagctctagatcttttccgtcagatgtgtatggaaggaataaagtacaataatataaccatatctgctgccctatccgcatgcgcaagtttaccagctatatattatgggaaggagattcatggtgttaccataaagggtcctataaaggcagacatatttgctgagagcgctctgatagatatgtatgcgaaannnnnnnnncttgannnnnnnnnnnnnnnnnnnnnnnanatatggnnnnnnnnnnnnnnnnnnnnnnnnnnntannnnnnnnnnnnnnnnnnnnnnnnnnnnnnnnnnnnnnnnncattc

SEQ ID NO: 3187 - DNA, 496 bp, Zea mays
  misc_feature (480)..(482): n is a, c, g, or t
gatctcactgcgatttctatacaggatccttaaagcacagacgcgcaagtataagctgcacaagaacgtttctctcttgtcagttgcgcagcgttgtccaccaaacttcactggtgctgatatttacgcgctgtgtgcggatgcatggtttcatgcagcaaagcgatcagtgagtacttctgccgacccgttacgccatatgttgggctcttcctagccttgctccgttgatcttacgtgtggtatttttaggttgaaacattcgaaaccgatccttcaagaagtaatgacgccagtgccgaagaagtcatcgtcgagatcgacgattttatcacagtaaaactctaaatcactttgagtaagcacagtaatagcctttgtggtcgcatgctgtggaaataagttgttgtgtttgtacgcaggtgttaggagatatcgcaccgtcgctctctctggacgagctacaaaactacgaacagnnnggcagaagatcgaa

SEQ ID NO: 3188 - DNA, 439 bp, Zea mays
gagccaccttccctctttaaaaaggctattgttttatcttccccacctacatttgttcagacataataaacacatacaaacgaagaaaacaaaatatgaaaactgcaagtgcaccaaacaatatatatcatgaactgtatcagaaagacaaaatgtaagggtttgattggtttagctgcagaggtacatacaagaaagtaatttaggacaaaaaagattgcattgttcaaaattatgttacattcctactctttgaaattaaaactccattggaaaaatacaggcagctaagaacacaactacagcgaaagagcctctagtcgagttggttagatggtctgagtagcactcctcaggtcctggattcgactcgccgtgggaacgaattttcaggctgtggttaaaaaaatcctctcgtctgtcccacgccaaatcatag

SEQ ID NO: 3189 - DNA, 460 bp, Zea mays
cttgtagccaactagcattatttgtactctctgatcgtacaaaatgaaataaaatgcagagcaccatgctttttaacataccaaaactctgatgttccaaatcgctgaacaaaagcagataaatcagatatttctcttgccgataaattggatccaactgctcggttcaatacgaccaagatctcttccttcagtgcagttaatctcaaatccagtgctcgaagcaattcattcctagcatatttaaccatcgcaaatgtcaaccaaatgaggtagcaaagtaaagtagcagagaaaaggaaaggaattttactttgtcgtatccgatgaatttggcccatcatttccctaaaagtggtgtttaaaaattaagtaggtgaatcatgaaagagtacaaccatgtaatattaaatccttgcagcactagaaattacctgctgtgctatggcaccagtaccaa

SEQ ID NO: 3190 - DNA, 518 bp, Zea mays
tctgggagcagtagtgtgtcgcaccatggtattgatactggcccttccatagttaggactgaaccaaaagttataggttggtacaaaggagaccatcaaataatttcaattcaaccactaaaccaaaagctataagttggtacgaaggagaccatcaaataattcaattcaatcaacattattaaatgtgcagtataactcttacgatatacaaaataaaaagcaacgtaggaaaacaatgatttgggttgtgtgaactttatatgatttgttgggctttaactctactttgttttcaatatctcagtatctacctcgtccttgttgcatgtttacagtaatgtatgcagaagtattatacatttcacaaaaaataagttaacctgaatcaataatttttaaatggatgttagtgtagttatctaggaaataatggtcattagccataattgatcgtttgtattaacacgtattccatcaatttgatactttccttttcttatgatatgccgaaccgt

SEQ ID NO: 3191 - DNA, 508 bp, Zea mays
tcgtccaggagctagaagccgctcggctggctgttaaggctgctgaagacacttctaccaccttgaaggctcagcgcgacaaggctatggacaaagccattcgcgcggggcggatcttgatgagaaggccgggtgtgattgttcctgacgacatgattgctgctgtcaacactgctcctgattctttgagttgtccttcttcatcagttgctcccacggtttacaaaaccgttccagagttaaaaaccgccttccaccagtaacggtttaccaacggtaaaccggtaaaaaccgaccggtttgaccaactcaaatcaatttgaatttgaaccggtttatctgtgaaaaaccggcgaaaaaccgctttaaaccgccggttaatcgcgaaattaactggtttttgctgtttttacagaaaatatgatttttttgataaaatttatttgtagtttgttcaattcacattgcacactaaatattaattaatccacacgacatgtattcacca

SEQ ID NO: 3192 - DNA, 469 bp, Zea mays
cgtcctggcggagcatgtcggcgagcgggtagaagacacggatcactttggcgagcacgatcgtcatgcgtgttatggcgggatttatttgttgtttgttggagaagataaggcttatccgatagccataacagattgtttgttagttcactgatggtacgaaggtttgttgcttccattgcgtacggatagccacgacggattgtttgttaggtcactgatgatgcggttggtttgttgcttccattttgcgtggaggacacagttagagagtatacgtgtgtgagaggaggcatcacgttcgtgaacgacgtgacaactgtaggctgatttagaataaatgaaaagggggtttttgtaaaattttgacgcacgacgaccattgaaactggtgctttaagtattgtagagatttagggggaaccgctgcaggagatgaaaaaatagagggtgaaatgttgatgatgtg

SEQ ID NO: 3193 - DNA, 505 bp, Zea mays
acagatcgacgctcagcagatctgcgtctttcgagcttcgacgtcgaaggtacgcccctttctctgctccaagtttttcatctgggattcaatccgtgtcccaaaaacacctccgttggtttaaccgtagggtttacatgtacttcacttgattaactagatggattcatttgttcatggcgatttgcccagttagggtttacgggttgtccaaatcgcctattgttaggcctttacgcttaactgatctgtcgttatcttgtacaccatgtccaaggcttttagttttcgagcatacgatagaacaagaagactcggctgtgattttgatattcgtcatcgtggtgtgctcatttttgtgtatccacctaagtctaacagctgaaataatttgcgctcatttcagttgtatgttgattggtcactcttgctggtacacaaattaatgttcatattcgtatgcgaacaactaagtacgaattaccgtttaattccacaacacaac

SEQ ID NO: 3194 - DNA, 501 bp, Zea mays
acggatacgcgcgcggaagacgtcgacacgcgccgaccacggctgggtcggggattcgataggagaaggtagatataacgacggcactgttaaaatatggtcgctttacttcacttggtatggataaccacagaatctacaaaaagctttgcacaataaagattcatccggagaaccacagactttagaaaaagctttgcagggtaaagattcgtctgaagaatcgcaaattttagaatagtttttacatgataaagattgaaagaagtatatattcagagtgtatggctcgtatgaaaaataaaacatgccatttattagttctacctaagaaagcgagaaatattgtagaatgcaaacgagtctataaaatcaaaagaaagttagctgccacttaccactaaaacctagtgactattaactagttagggcgtccagtgaaccctgctacacttcctcgaaagatttaggcttgctgcctttcttccatttgttcatggc

SEQ ID NO: 3195 - DNA, 386 bp, Zea mays
ccaagctggggagttcgattcaacaagaggtgactccaacggccgagggtaggagttggggaggggagtgctttacttcaaaatgatgcagcgttggagtctgattcgacgacggcgctgcagctgaaggttgcgccatgaatggatcgtcggtgactggctccatctctggtttgcactgtacgcggccgccgcctgagcagttcttctccaaggtctggtgagcgcgcgaaatgataaaatccttcgacgcgggatggcgcgaatcgctaaaatcaacgcgggaaccagatacgaacgccggatggggagctcgcccggcggcggagttttgcgcagctcaggcgatttttttcgcgtgcgacagtatagggatatggcatagg

SEQ ID NO: 3196 - DNA, 446 bp, Zea mays
tacccgctcgttgtcgaccccgtcatcggcgacgtcaggctcaccaaggtcctcatggacggaggcagcagcctcaacatcatctacgccgagaccctcgggctcctgcgcgtcgatctgtcctccgtccgagcaggcgctgcgcccttccacgggatcattcctgggaagcgcgtccagcccctcggacggctcgaccttcccgtctgcttcggaacaccctccaacttccgaatggagattttgacgttcgaggtggtcgggttccgaggaacctaccacgcggtattggggaggccatgctacgcgaagttcatggccgtccccaactacacctacctgaagctcaagatgccgggccccaacggggtcatcaccgtcggccccacgtaccgacatgcgtacgaatgcgacgtggagtgcgtggagaactgaaagggaaatgt

SEQ ID NO: 3197 - DNA, 505 bp, Zea mays
  misc_feature (454)..(454): n is a, c, g, or t
agggggagcacaagatgatcatgtgatggaggaagaagcgcaaccggcacctccaacccaagttcgagcgatgattcaaagggatcatcccgtcgaccaaattctgggtgacattagcaagggagtaactactcgatctcgattagttaatttttgtgagcattactcctttgtctcttctattgagcctttcagggtagaagaggccttgctagatccggactgggtgttggccatgcaggaggagctcaacaacttcaagcgcaatgaagtttggacactggtgcctcgtcccaagcaaaatgttgtgggaaccaagtgggtgttccgcaacaaacaggacgagcacggggtggtgacgaggaacaaggctcgacttgtggcaaaaggttatgcccaagtcgcaggtttggactttgaggagacttttgctcctgtggctaggctagagtcnattcgtatcttgctagcatatgccgctcaccattctttcaggttgtaccaa

SEQ ID NO: 3198 - DNA, 223 bp, Zea mays
gattccaattgtgtattttgtttgagatagaaaattcaaactcaaattcaaaatagaattcaattggaaatgaaaaacagaaataaataaaagaagactctacttggcaccttgggctgtattctccccgcgctggcccatctacgctcccttttcctcgcgctggcccattgccgtgccagcccaatagcacaacactgtgggcgccctgtgtctctaccac

SEQ ID NO: 3199 - DNA, 404 bp, Zea mays
gggggtgaataggcaaaacctaaaatttataaacttgaacacaaaacttcacccagagttagcgttagaatgagtattgtcgggtatcgtaattaggggttcctggattacgcccctaaacatgcttaaccccaaggctaacatcagacacattccccaaggtcaagagagtgtgaaccacgattcgcctgaggctccaatcggcagtcgctcaaaactctgccttgcccgagcatgtccttggacgagggacgtactcaggaaaatcctcgtcccgcccgaggtcccctctccaaggagccattgtttctgccttgcccaagatcgtctcgggcaaagaagacaaccccgagctaggactcaaccaaaggccacaggggacatcagcattcaatacgcatagc

SEQ ID NO: 3200 - DNA, 381 bp, Zea mays
tagactgagaaaatcaggatatttgacctttatttcatcgcaatttctttttggaggtgtgtaataaaattggacaagaatatgattttcagggtggtttgtgatcatcaagtgtcaaaagtagcaaatgatgacgatacacagtggttctgaaagaaagaaaaagtaggttgtataaatacttcatgtaaacaccaatcaagatcagtagtggcaaacacaaaagagatccatgtcacacgatacttctcaactgaaaaaaacagtaggccacaagcaacaccaaaccatgatggctacctataggtcaggccatctagtgccagacgcatgctctgcatgtatatttcattattttttggatagttgatccttaccatg

SEQ ID NO: 3201 - DNA, 463 bp, Zea mays
  misc_feature (245)..(245): n is a, c, g, or t
  misc_feature (435)..(436): n is a, c, g, or t
attcccttcatcatttccatggtcactattgggtaggctgacaaaactttgcgggttgatatttccttgatcattttctagccatctctcatcaccattatgtgaccgaattaagttatggaggactgcagcagcaataggtatttttgcttgattttccattttgtgaagggtagcaactttgaggattggaaatctcttctttatgacacccaaagccctctctacatgatttcttaaaacancatggcgatggttgaataactctttgtgattttgaggccttcgatgaccatggccaaactctttcaggtgatatctaaccccacgatatggtgcaataaaggaagtcgtattggcataaccaccatctactaggtagtacttcccagaaggtacttcaaactttcctacaacattgttcattgcagatcnnagaaccattgaatctgttgctgatcct

SEQ ID NO: 3202 - DNA, 513 bp, Zea mays
  misc_feature (504)..(508): n is a, c, g, or t
tccgttagttaccttcgtcatgccgtgctgctgaatgcgtacaggtcaggtatacgcgcgcgctgctgcggaggagcagagggcgaagaggaagagaggaaacagctgcgtgttcgcgtccggctcgtgagaaaacagctacctggcctgatcgctgttgtttgcggttgcagttgcagacagccatggctagagagctcttattatatacgtatataaggaagacacgcgacgtacggaggcgaccggagcgaagaacagtcatggcaggtgaggtgagcttccagtccaattgcccaatcgaatagacaagtcctactagttaacggtgaccggttgacgcgttcccgaggcttgcgttgcgttgcattgtcagtcgtcgggactcgggggtcagatcgattttctaatggagatgagactttgctttgcttaaacataaacgacgacttggcttgctccgagccgggccggactccagccagttccaacgtatactagccnnnnntacgc

SEQ ID NO: 3203 - DNA, 228 bp, Zea mays
ccctcgaccacttcaccggaacagtctcgccgccggtaagcccctccgcccttttcttccgccgcggctactgtttaaggtagaagaaggacctcgggttaggttctgtagaacccgaggggttttctgtaatgtcagcgactcatgtgaatagtaacctaaggactgattcgcgaggaaaacttagaaaaccgccagggaccccagtgcaaagtggatttccattta

SEQ ID NO: 3204 - DNA, 540 bp, Zea mays
ttgaacctcttctgcttttgagctctttttctcagactcctcttctaggccgatactagcttcggctgtcgcagcaggaatcgtctctgaagccaaggggatagcttcggcctgttcagcaatctctaccctctttccatcaagttttgcagttgtccttttatagaatgcaacatcagtctatgagttaaaaccttaacctacttcgacttaggcacgatggaagaggaggaggctaccattttcctcttcaacccttgttttcgagcaggaaaacagtaatcaggataaaaaacccaatcacataaaaaactttgtttaacctcctctttctgcgagcgccgaaggcagtgctcatagcttcatcctctgcttttgtgtaagcttccaacagctcatcactggtagcttcgatagccttgagccagtcatcatttggctcatcaaactaatttcttaaatggtaggtgtatcttaagtaaaccagaccaccttcgctggagcaggcagcagtctcctatgacatttcccaatcattca

SEQ ID NO: 3205 - DNA, 446 bp, Zea mays
ccgaagactgtgtgtgctatagggggtcctgcctatcccttagcgccatagccagtatctcagagtggtcccgatgcatggatctctaagatccaagactacctgaaggaaaatatccttcctgaagatcatgtgtccgcagagcgcatagtgtggttggctaaacgacacacgatggtggaaggggatctctaccgccgtggcgccaacgacattctcatgcggtgcatcacccaggaggagggccgtgagttgctcacggagatccatggaggagagtgcggaagtcattcttcatcccacacactggtcggtaaggccttccggcatggcttctactggccaaccgccctccaggatgcagctgagatggtaaagtcctgcaaggcgtgtcagttccatgcaaagcagatacacacaccagtttcaggctctgcagatgattc

SEQ ID NO: 3206 - DNA, 374 bp, Zea mays
  misc_feature (15)..(17): n is a, c, g, or t
  misc_feature (110)..(110): n is a, c, g, or t
  misc_feature (112)..(112): n is a, c, g, or t
  misc_feature (114)..(114): n is a, c, g, or t
  misc_feature (318)..(323): n is a, c, g, or t
gactataaagtccannncaatctcatcccatttccactgaggaatctgcaacggctgcaacaaacctgcgggtctctgatgttctgccttgatcctctgacaactgtcgnancnggccacatactctgctatctctcttttcataccgtaccaccagaatctcttcttcaggtcttggtacattttctcactaccagggtgtatagaatatgctgtctcatgagcttccttgagaatcagttcccggatcgatttgatgtcgggaacacacaacctatccttgaaccataccactccttctgcatcttcacggaaatnnnnnnctttcccatctatgatcagctgccggatctcgttgatcttctcgtcatcct

SEQ ID NO: 3207 - DNA, 443 bp, Zea mays
tcatcaacataagcttctacccgcttgccccaatgatcgtctaagcatgtttgaatagctctctagtaagttgcttcagtgttcttgaggccaaacgacatggaggtatagcagaaagctctaaacgggataatgaatgttgttttttcatcatcttcttttgctaggctgatctgatggtatccagagtagcagtctaggaaggacaacatagaacatccggcggtcaaatctaccacctgatctattctgggaagtccgaagggacccttcggacaatgtttgttgagatctgtatagtcgacgcacatgtgtcaatccactttattctttttgagtacaagaacagaatttgctagccactcaggatgcagtacttctcgaatgaaccctgctgcgaccaagcgagctagctcggcgcgaatagcctctgtcttgtcagg

SEQ ID NO: 3208 - DNA, 564 bp, Zea mays
tacaacctcagttgccactaatgcaaaatttgaaattagaagccccaagcgtgtgcaggtgagatcctgtaatctaaatatccatttttcatctatgactgaaagcagtttacttcagacactcacatgcatcgttcttaaatcttaattccaggatgattcacaaactgctccgtctgtttaataatgtttgtcctgttggcatacctagacggcataatacataaatatttaatgaatttgaattggatttcgtgctttttggatatacaacaaatattcacccaattttgtaaagagttacttcttgtgatcacaaatataagtctctttaggcttctcctgaattaagtatcttttgcctttgactatcaatatcaaaaattctatataaactaacgtcgtaagatcagccttactagttcattatgaactgtattttcatatgtataatcctttccatcaaagactatttattatttataaagatgttgctagtcaaagtgtcatattaaagattgtgctgatgtccaaatggacgttgtttttggtcggagtatgaca

SEQ ID NO: 3209 - DNA, 372 bp, Zea mays
ttacaggaaaaaactaaagaacagtgacctgcactcctgcagacagagtttaatttaatttaatgccatgatcctgttcatcgtcaggctgtgatggccctcttgcacagaaacaaacaggaattaatgcaatcaaccgttcttaaacgaaacaagcccccaggtggcatggcgtcattttagctaaagattcttccattgggatgcagaaaaaggctacgacaaagttcgcatggctgcagttttctgtgcagtataagaaagggtctaagactgtcttcagtggttccccctaaatttctctccctatatcccactcacgtgccacgtcagcgatctctctccccctatatctccacgctctacagtggt

SEQ ID NO: 3210 - DNA, 492 bp, Zea mays
aaaaatagatttagtatttcatatgatcaattaaatgccctagataaatatctagcactaccgaaatgagtgaaagcgaataatatcgataagtttgtttctgttaggattcaatccagctaagttaaaaataatgtagatgatgagtcgtgtctaggctaattatgtttaaagtgtatgatttgtttgcgatgtttgtgttaggtttgtttaatttagagaagcgtaattattgcgcttagtcgtatgtcgataactaatattatcgtataaaattgtacaacgcctcgccactaggtgtttaatacgctatcgtataacactatttagatttgtgtcattcttgtttatatgcattcatgtgcatcgtgcatctcaattaggtacgataattgatcgcgtgatgcagaagacaagccaagtcgaccccaagcgcggactaattcgcaagatgatgctggtggattaacctgaagatggataatcggaaca

SEQ ID NO: 3211 - DNA, 536 bp, Zea mays
taaagagctttgccgacagataacgtgtgtcggggaaagtcctgttggcaataacctttaccggcagacatagatctaccgacagactatctgtcggtaatgtttacattattgccgacagacatatctttgccgtcggacaaagttttgccgacagattcttgtgccaacagcttgtgtgtcgctaaaagtctatataccgacagattgtctgatgttattccctatgtgcagttaaaaaaacatgtattcaaatatatgctaatgaaacaaataataaactgattatgatgcacattacaagacaacttgaataatatgttgatcagaatatatgaaatttaattactaaaagaaagagatcaatctttgactttgaattccaacatatattgttttggaacacaatttgtgtgatgaacatataaaaaaataatagcatacatgttttctaaattctgaagtgatctttcagttctattacatgcaaagtctaaagattcatctagctagcaaactaaaatctctccatcagc

SEQ ID NO: 3212 - DNA, 457 bp, Zea mays
ttctctggaccgactggagttggcaaatcagagcttgcaaaggccctggcggcctactactttggctcggaggaggctatgatcaggcttgacatgagtgagttcatggagcggcatactgtctccaaactcattggatcacctccaggttatgttgggtacactgaaggaggccaactaactgaagcagtccgtcgtcgcccgtacacagttgttctctttgatgagattgagaaggcacatccagatgttttcaacatgatgcttcagatcttagaagatgggcggttaactgatagcaaggggcgcacagttgatttcaagaacacactattgatcatgacatctaatgtcgggagcagtgtcattgagaagggaggtcgcaagattgggttcgaccttgattatgatgagaaagacacaagctataacaggatcaagagctttgtgactgagg

SEQ ID NO: 3213 - DNA, 425 bp, Zea mays
ggtgccaatacctgtctcaacaagtgttattttgtgtgattataagttgggatttggtttgattgaaaactagatagaaaatttgaaaaaattaaaaattccctttgtctgggctcaacggacagtctggtgcaccagccgcgcacgcgcagaactcctctttcctgtccacggtctggtgtgcatcggacaggcactgtagactgttcggtgcacccataactcgtttttaaaaaaacttccccctgcccgagcccaaggccaggcattatttccctcttctctgctctagtttcactttgctcctcttacgatctcccctcttcggcgaccatcctcgtcggcggcgatcctccgacgaccaagagctccacttcttccccctctctagtgagcatccatgctttccctcttttcttctctcc

SEQ ID NO: 3214 - DNA, 510 bp, Zea mays
catggaggacttgagtacaatggccccgaccattgtgattgggaaaattgtggcatttgagatgtcacggaaaatgggtcgacaagaggagccaacttcctcaaggtcatatgcttttgcatgtgatgaaaggaagggtaaaaataaggctcccactccaagttcctcaagtgaagaagaggaagaagaagaaagtgatgatgataaagataatcaaccatcaacataatcctctgaggacgaagaaacaatccgacgcgtcgaaaaggtaatggggatgatccgcaagattaatctaatgggtgtgccctgtaggtcgaggatcttctctttaacattgacaggaaaaagcaaagaaagagaggatgtttcgcatgcggacagtccgcctgtggcaacacttttcttcgtttcttggactttgcttgatatttgttgatcttcacttgtgatcttcataatgtcttcttttgaggtgttgttttcctcattgccttagtccaagtcact

SEQ ID NO: 3215 - DNA, 390 bp, Zea mays
atatctctgcaaccagtaggcaaaatcctatgacccccacacaagaatggtagcttgtagggaggagaagaggttttgtgcactgaccaaggtgagagcaggctcggatgagcgaccacacgcgccagaacttgggcagaacgcacaggcacacgtgttcgaccctggtcggcacgctagagctcgcccaacccgcgcgcgcgctcaccccgacgtccggtcaagtccaccgtgcccactcgcgcctataaagtctccccgggcacctctcttcgccccacactcaccctcaccggccagcacttttccttagctccggcgagcttatttccgctcgccattgccgccagagcttcggccaccgtggccagcccactccagccaccctca

SEQ ID NO: 3216 - DNA, 352 bp, Zea mays
tgaagactggagaactgaaataatatctttcctccaaggcaattgtctttcaagtgacgaagcttataacaagagaatggaggcaagaacaagaccatatgtgataatagaaggggaattgtataaacatggagtttgttcaccactcctcaagtgtttatcaagaactgaaggtatggaattaatgaaagagatacatgcaggtctgtgtggatctcacattggatctaggcccttgttgggaaaagtttttcgacaaggattttattggccgaaggcagcttcggatgcagcagaattagtccaaaaatgtgaaggctgtcaaaaatgtgcaagagaccagaagcaacct

SEQ ID NO: 3217 - DNA, 426 bp, Zea mays
  misc_feature (162)..(162): n is a, c, g, or t
  misc_feature (298)..(298): n is a, c, g, or t
  misc_feature (300)..(300): n is a, c, g, or t
  misc_feature (379)..(379): n is a, c, g, or t
tgccggatattgcatcactgttacctattctagattcgagtttgttagagatcctaatagataggataggactataatagataagtattggattagatctatcatgtaacagatttggtttcgagtttgttagagttcctaatatatatatgatatggttgnaacagataagtaccagatcagatttgtcatgtaatcccccccctcccagcctatataaatacatgccatcataacaccttaagccattaatcaaagacccatatcatccatagcctcacagcagccaccgctcgcngnggggcctgccatcgtggacaggatgccgcagccctgttccggcgtgaacaggatcgtgcgggggagaaacggccctagncgtcgatccagtaatgaggtctcatgattgaatctcaaataccccca

SEQ ID NO: 3218 - DNA, 394 bp, Zea mays
gatcagtggaggctggcgggctagactcgaaatgatgccttttttagtgcacctagagaggatggatcgctttggttctagaataatcgacgacaatcgaatatgcgacaacactgatgagcacacgcgtacaaattacgcgggagcaattgtttgtggcccgatcttctcgaaggatgttcgaaacttgataaatatcgctgcgtgacctgacgaagaggttgcgcaccgcgagatcttgcacacgcgacgaacaaccgagacaatcgcccttccacgtaccgatgaagccagcccacgcaatcacgccatatagacgtgaaggcacaaactgggtgaaccgcagttcggtgttctacaactccctcgggaatcgaaagaacaagtctgcaag

SEQ ID NO: 3219 - DNA, 469 bp, Zea mays
  misc_feature (266)..(267): n is a, c, g, or t
  misc_feature (331)..(331): n is a, c, g, or t
  misc_feature (400)..(401): n is a, c, g, or t
cataggcttcggttgatctgctgaagcagccttctctcttttatgcttatactgttgataagcttcggcttcatctatattatgaatagccttcgaatccgtccaactcccttcagccctcctggcagcttcttgactcccgtgtacagcaatgggcccttgttccgaaggtatcttcatgcatagatatgctggatgaagtattgcttcgaaggcattaagcgtccctcgaccaatgattgcattgtatggatactccatatcannaatgtcaaagacaacctgttctgttcttgtgttatggacatagccgaaggtaactgacattgtnatcttgccaagtgccacaatctgtcttcctccgaagccacaaagagggtgtgttgcatcatgtatcttnncctctggctcttgcatttgcctgaaagcctttgcaaagatgatatccgttgcactgcctgtgtctact

SEQ ID NO: 3220 - DNA, 465 bp, Zea mays
caacattcacaagataacaaattcaaataaattaagttcttgttgctcctttttgccttactgtacataactatgttagtttgcttccatgttttcactataacaattgataaacttgcccctactgactctcaagaaaattagggtcacatagttcagtggtatagcaaggaacagtactgtagtttacaggagaaaatatattattagacacagaaaaaaggcggcaccgcggcacagagaaactaggcaagcaaataagcatcaatgcagccaaggaagtaccaccaacgtaacagaatccacataagtcatcttagtaatagagcataccaagttctcagcaccagggaggttagctctcttggccagattcacagcaagctcaaggttgtttaactgcatatcaaagttgtgttaaaataaatacctaatgtatagatcaggaaaggaagaccagaaagt

SEQ ID NO: 3221 - DNA, 497 bp, Zea mays
tgattttcctccatgttctcatcttttatgctgagctgctccctcacgcacaactccaccgacatctacgccgccggggagggcacgaacggctccgtccacaaccggttcaacttccaccccatgggtgacggcagcgtcgccttcgccctggcgtagctcaaggagggcaccgcttccttcttccccacggagctccccgcgagggcggcagcttcgctcagcgctggcgacagctttgacggcagccatggagggatgcactcgtcacggcttgataggatcttgcgggagatcgtgtcggactccgtgcctgccatggctcaggtcctgtaggatttccctagcgaaaccctggaggtgctgcgggaggtactgaaccttggctctgatcagaatggaacgatagttttagggtccaaattctttagggttgaacattgaaaaatctatttctctcatgctgaatagtggcctgcttattacatttggctcac

SEQ ID NO: 3222 - DNA, 516 bp, Zea mays
tgcacgcaattactttgtatgaggcaaacccttagggactatggctacaaattaaccaaagtccctctcctatgtgataatgagagtacaatgcgcatggcggataatcccgttgaacacagccgcactaagcacatagccattcggtatcactttttgagggatcaccaacaaaggggggatatcgagattgcttatgttagcaccaaaccattagatgagaaaacctttaccaaacttaggaatgagctaaacattcttgattctcggaattttgattgatactttgcacacatagctcatttatatacctttgatcatatttccttcatgtgctatgactaatgtattttcaagtaaattcttatgctaagtcatagattgaaagggaaatggagttttcggcgaagacaaggcttccactccactccatcgtattatttacccttcaccgtcttgtaacaccccaggtgttaccatggctagagcccaccttggcactaaaggctatgatca

SEQ ID NO: 3223 - DNA, 456 bp, Zea mays
ccgttggccgcgagcgttgttggctcgccggatagtccagtgcacaccggacagtccgatgaactttagccgtggcgcctccgctttttctcgagagcagcgagttcgtcgtcgggccagcctgggcaccggacagtccgatgcgcctcaggctggttctgatttggctgaacatagccaactcttttccacttcttttcctcttttcttggcaatgtctctagtacttagataaacatgttagtacccaacaacaatttaatagggctacaaacataccttggttcttgatgtgcacttctaaatcacttggcacatatgaacttagaacaatgtgttgggcatctaatcaccaaaacatttatcgaaatggcccaagggtacatttccctttccgcaggttccaggcagagtaagacaagggggcgctaacattcgaaatcctacccattagca

SEQ ID NO: 3224 - DNA, 381 bp, Zea mays
  misc_feature (276)..(276): n is a, c, g, or t
  misc_feature (342)..(345): n is a, c, g, or t
gagcccccggatgcataaacctacaaaacaattttagttcttgactttaggtacccaaacggttttgggtcctttggcattagatacaagaactttgggtacccaaacacaagtcttggagcccttgtgtttgcccccaacaaatttggcaactaccttgccggatttgttagtaagcacataagatgcatcaaaagttttaaatgaaatggcatgatcatttgatgcattaggagttttcttcttaggcaacttagcacgggttggttgcctagnactagatgtctcacccttatacataaaagcatgattagggccagagtgagacttcctagaatgaannnncctaattttgctctcaggatagccagcagggtataa

SEQ ID NO: 3225 - DNA, 509 bp, Zea mays
attaggcccacctacagttgtccttgtctcacagacatcagacaaccctgtaggtgcccctgaactacttgacaagttcggtatctttccttaccttaccaggaacgtttcacccgtcttgtagacattacaaaacatcggagatatagaagtgcggaagcaattacataaacttacatttatttagaaagtaagatcaagttacttattacagaccagagctataaacgagtgctgagtacacatatcaagggaggcaaaaactcctcccaagtaattatcaaacaaaaagatcctatgtggaggaccaagtcctcccgtatcttcattcttgtttttcttcattagataccaccttggagcaaaagcaataaaactttgtcgcttcctcacctaaaaacaacaaagggataaaccctgagtatggaatactcagcaagtcttacccgactaaggaaaagactctcaagggtatgctggataaataggagtcaaggagaggctttagc

SEQ ID NO: 3226 - DNA, 524 bp, Zea mays
agagccttcgtcttccagcggagagttcgaagggggaccacgccgttcttcatccattccacgccttcgccttcactacacgacggttcatttacagcgacctacggttggttgctaaaatggccttcagcgacctaccgttggtcgctaaaaacttttagcgacccataaggatggtcgctgtaagtgtcgtcgctaaaggctttagcgaccgacatctttttagcgaccgaccgtccgttgctaatattgtatatttagcgaccaaccgtgggttgttgtactatagatttagcaaccaatcgtgagtcgttatactatacatttagcaaccaacataaagttgccccgagttatagtcgttaataatgataatataccattaattagcattcaacaactgttacatatacaaaagcatcacgaatcaccaatttttatacacataatcacgtagatatacaaatttaattagtattgcataatgatagatccacatcacataaaccatcaacaagcaccac

SEQ ID NO: 3227 - DNA, 445 bp, Zea mays
acattccttatgacaaataatttagctctcatgtttcttcctcttttacagttgatatatggcttcaataatgcaagtcatgtttttaacccaccattccatatcaaggttgcttttagttttcacattcgtttttgatacattgttacatttgtatttttttctttttactttactcttctttttttttcattttagatactttgagaaacagagtttgaaagctgcatttgctactgcactagctgatccaacagtagacctaaacatgcaaatgtaagtttatagccttgctgaattaccaaatctaaactgcacttggagtaagtcatgtatggatttctattccaaatgtcttcactgctaatgatgcttgttttagaaatgtagtgtgaatgacaatgaaactaaccccacttgctgatgatgtagcaatcatcattct

SEQ ID NO: 3228 - DNA, 533 bp, Zea mays
  misc_feature (524)..(528): n is a, c, g, or t
ttctcttctgtgggttccccctcaagaatgtgaataacagcattcaacatattcacctgcacttttttctcaggaatatcaaaaccaaagaagccctgctccggaattccaaatccaaacaacctaagtttcttgttattttggcattccgccgccatatgcccagactctttacatttgtagcatagagggtcattcgggcagtcagcttgatggtgtccagattgagagcaacggaagcatctaatctccttgaccagaccttcctggattttagaatccctgccctgctgcattccaactccaaaaacagaaggtctccccctctctgaacatggctgagagccttgttccctatcacgattttcttggtttttgcttcccctaccccctgtctcattcctatcaaaagaacgattacccccaaagccacccctggctggcacaaaattcccacgccctctccagaaaccacccctccgaggaattttgttacctataaagcttccttgacgatgatgccnnnnntcttg

SEQ ID NO: 3229 - DNA, 357 bp, Zea mays
ctattggaaaacttgtaactactatgactttgtggtcgtcaaagtagtgacgcagcttgcgggcagttagaagtactgcgtataatagcttctgaacttgagggtactttttctttgaggggcctaggacttcactaatgaagtaaacaggatgttgtactggataggcatgtccttcttctactcgctcgactaccaacgcggtgcttaccacgtgagtcgtgcaagagatatacagtagcaaatcttcagctggttgagttgacgtagctcgccggggtggtttcagtactggtggtgttgtcaagaattttttcagagcatctagagcttcttgtgcttctgaagtccattgaa

SEQ ID NO: 3230 - DNA, 371 bp, Zea mays
gtcgtccagatggagctcctctaacctctcgagtttgcctatggactcagggatgctggcactgaaactgttccctccaagatcaaggaccaccaggtttctgagctcgcttatgccaccgattgacccttccagctgattgttaggtaaagacaagtgctccagcagggtaagggtgaagagctcatcaggaagagtgccagttaggtcgttgttcccagcgtcgagagacttgagcaaggagcaattactgagacccgaagggatccgtccgctgaactggttgtagctgagatgaagcgaggccaaggacggcgcgctggcgctggcacataggctgctagctggtatctggtctgctgaagctgttg

SEQ ID NO: 3231 - DNA, 500 bp, Zea mays
tttctactgtgatccagagttgccagccactgtaattgatcagtgtgtagatggtgttcgcgtcgtccatgcagacaagccctgctgttgcgcctgaccgtaaacggcctgccgacgctgctgctggcactggcagcaactctgacaacgtgacgacgtcccacgacgacgcgagctcgagcgtgccgaacaaagtatcggaggagctgctccggtgcctgctggccatcttctcgcagatggggggctcggctgctggcggcggccgaggactaggagacgaggaccagcagcaggcgctgtccccgtcgtcggtctccggctccagcgagagctcggcgtcgtcggaggcggacgcgtacccgcaggacccctacggcatcctggagctgggcgccagggacatcggcgcctacaagcggttccacgtggtcgacgccgcgtccttcgacggcaacggcgacacgcctctcgttcgtcggagactcaagtgagtgagt

SEQ ID NO: 3232 - DNA, 445 bp, Zea mays
ttctagaattaaaaactaatttctataattatttctcgggttttaatcccttctggactgggcctcaaataccagaaagagcaggggccctggtgcaattaatcctaagacacagttgacccacaagctggactgcgggttgatactcaacttctgcggggacttttatgcaaaacgctatcgcgaaggggtatccaacgccgagagccatacgattacaaacggacggccctgattagatcatcgccacaacagatcggtctacaaccatagccccaggatattgatccaacggttactgacttcgaaccccgctcaaagcacccgaccgttcgatcttagatcaacggtcgatcgtccactcaccgaatcgttatcttggaaataatcgcgcacgttgagctaggatccaacggttaccaaccaactctatcgcccaagccga

SEQ ID NO: 3233 - DNA, 445 bp, Zea mays; identical to SEQ ID NO: 3232

SEQ ID NO: 3234 - DNA, 236 bp, Zea mays
gtagtggactaaatcttgtgtataggatggatcaatgaatatatgtggttgggagggcttgagtatgtcaactagatgacttggaatgttgcttgggctcccacaccttgaagtggccggttggggtggtatttatagccaccaaccaaaaactagccgtttggtggggttgtctgtcgcatggtgcaccggacagtccagtgcacaccggacatgtccggtgcgccagccacgtc

SEQ ID NO: 3235 - DNA, 506 bp, Zea mays
tgtatgctaatgaatcgtctttgggagtccaattttactccccaaagggttattaggtagtctaagcttattgcacttatgctttttttcgaagcattacatattacagattaaaatttcatgtgactttttatttgttttttgccctccatttccaaattgtaattcgttttgctttgtcctaagttaaactttaatatctttgtccaaatttatagaaaaatacataaacatatttttatagcccatttattttgtattgtaccctctctgtttcaaatcttaagattttttttcttttttggtacattatttttactgtgtatctagacatagtgtatatataagtgcgtagcaaaaagtcttatgatttggaatggatggataagtatatgttaatattgtgtgttttttttctggggattccttcatagacaatattaagatgacttacaatttggaactgagggggtatttggaatataaatagggatggcattgcaaca

SEQ ID NO: 3236 - DNA, 506 bp, Zea mays
  misc_feature (109)..(109): n is a, c, g, or t
  misc_feature (276)..(276): n is a, c, g, or t
  misc_feature (283)..(283): n is a, c, g, or t
  misc_feature (361)..(361): n is a, c, g, or t
  misc_feature (392)..(392): n is a, c, g, or t
  misc_feature (410)..(411): n is a, c, g, or t
  misc_feature (416)..(417): n is a, c, g, or t
  misc_feature (429)..(429): n is a, c, g, or t
tgtatgctaatgaatcgtctttgggagtccaattttactccccaaagggttattaggtagtctaagcttattgcacttatgctttttttcgaagcattacatattacanattaaaatttcatgtgactttttatttgttttttgccctccatttccaaattgtaattcgttttgctttgtcctaagttaaactttaatatctttgtccaaatttatagaaaaatacataaacatatttttatagcccatttattttgtattgtaccctctctgttncaaatcntaagattttttttcttttttggtacattatttttactgtgtatctagacatagtgtatatataagtgcgtagcaaaangtcttatgatttggaatggatggataagtanatgttaatattgtgtgtnnttttnntggggattcctncatagacaatattaagatgacttacaatttggaactgagggggtatttggaatataaatagggatggcattgcaaca

SEQ ID NO: 3237 - DNA, 401 bp, Zea mays
atgtgtattcgttgggcgttgtagatttccttgatctgaccaacttgtttgttgcctaggactagcatcgaaatccacactgcttagtcttgcattatatacaatctagctcctgaataattgaattaaggtccatgtttcttttggacttaaaaaggttgtcaaagaacataatccctgtaccgtggttgaacaatcagtgtcttgtctggtagagttgcttgtcttcttgaatgggattgagttctgatatggctactactgtcaacaacaagggggtacaataataatacttggttatttgctaatacaatggctatgggcatttaacctcgacttgagagtcccttggatatgactacaagtactatcatcaggaggattgttgctaaccatgaagc

SEQ ID NO: 3238 - DNA, 414 bp, Zea mays
tgaacttgtgtgagttgcttgttcagtgcgtaactgtcaagaataatgaacttttgtcatgtgcatctgttatgtcgagtggtactcagttgttatggaactattatgcagctttatgcagttatatgcagctattatggagctatttgcttttgtctcaatgtttgttgtaaaaagagagagatggagtctatctttttaatccgaatttgtgatttgttttctaatctgttttgcaactatataatatgttttctaattgttttgtagttatataatttgttttgcagttatataatctgttttctaatatgttttcatgttcttataatctgactatttaactcttaattaatgacatgtagacgaacccttctccaactgttgttggaagtggtgatggtgaggattcaa

SEQ ID NO: 3239 - DNA, 345 bp, Zea mays
tgtttggtgacagacctgacaggcgtgccgcctgcaaggttaccctgacgccgtctgccagcggagtggacaggacgcattaaatgctgagagggcacatcgtctgtcagcgtggtggtaggcggcgcgtcctctccgtattaaatgcagagactgcgcggctttaggggccttacgtcaggctccgcccgttggcttatgtcacgggccacaagccacgcggcagcagcgggtctccgcctgagcggggagcgtagggcaaggcctggacacgtgccagcgccggacccttactcatgctggggttccccccatcccgggtccttgtagtggtccggatcttac

SEQ ID NO: 3240 - DNA, 454 bp, Zea mays
gccgatccttcaatggccgaggcgactaagaaggcctgcgatttctggggtgttccatgcaccgatgttcttcggcctactgtcgaagccattgcctctcacatcggtgttgctccatctggaattccacgaagctctccgagtcgaaatggtcggctatcagaggattacttccaacggatcgatgctatcgatttcaccatcaaacaagacgacggggctctgccacagaacctctaccgcgcagacatcgtgcttgccggcgtttcgcgtacagggaagacgccactgtcgatatacctagctcaaaagggatacaaggtggcaaatgtcccaatcgtgatgggagtggaccttccaaagtccctttttgagatcaaccaggacaaggtttttggactgacaataaacccagcgatccttcaggcgattagaaagaccagggccaagactc

SEQ ID NO: 3241 - DNA, 1053 bp, Zea mays
  misc_feature (636)..(637): n is a, c, g, or t
  misc_feature (665)..(665): n is a, c, g, or t
  misc_feature (694)..(702): n is a, c, g, or t
  misc_feature (704)..(820): n is a, c, g, or t
  misc_feature (824)..(1048): n is a, c, g, or t
tgttgtgacttgtgtgcgtgttggtactctgatttcgtgtcttgtgtgcgttgctcatccctcccttactccgtgcttctttgtgaacttcaaagtgtaagggcgagaggctccaagttgtggagattcctcgcaagcgggatatagtaaagtgaaagcaaaacaccgtggtattcaagtgggtctttggaccgcttgaaaggggttgattgcaatcctcgtccgttgggatgccacaacgtggagtaggcaagtgttggacttggccgaaccacgggataaaccattgtgccatctctgtgttgatctctttgtggttatcgtgttgtgcaagttctactctctagccacttggcttattcgtgctaactcctaatcaagttttacggattaagttttaagtttttacaggatcacctattcaccccccctctaggtgctctcagttccatccatggaacatgccaaggattgtgtcgctactatgttcccagtgacctcttagcaccacatccagttgcttagggggtcccgatgcatggatctccaagatctaggaccacctaaaagacaacatccttcccaaggatcatgtatccgttgagcacatagtgtcattgtctaagcgatacaccnnggtagaggggaacctctatcatcgtggnaccaatggcatttcatgcagtgcattagnnnnnnnnnannnnnnnnnnnnnnnnnnnnnnnnnnnnnnnnnnnnnnnnnnnnnnnnnnnnnnnnnnnnnnnnnnnnnnnnnnnnnnnnnnnnnnnnnnnnnnnnnnnnnnnnnnnnnnnnnnnnncccnnnnnnnnnnnnnnnnnnnnnnnnnnnnnnnnnnnnnnnnnnnnnnnnnnnnnnnnnnnnnnnnnnnnnnnnnnnnnnnnnnnnnnnnnnnnnnnnnnnnnnnnnnnnnnnnnnnnnnnnnnnnnnnnnnnnnnnnnnnnnnnnnnnnnnnnnnnnnnnnnnnnnnnnnnnnnnnnnnnnnnnnnnnnnnnnnnnnnnnnnnnnnnnnnnnnnnnnnnnnnnnnnccccc

SEQ ID NO: 3242 - DNA, 464 bp, Zea mays
taattccccactgccatccttacaaagactacccaaatagaatcaatacctctcattctcctcgtgaatccaatgctcttagttttttttaccgaataatgctcagttttgacagaggaatctcaatggatctgactggcccagcacatagccctgccatggctacggttctcttcacctcctggacgggcggctgatcactttccccttcccttctctatcttgcactcttcgctcactccctggcctcccatattgctttgaacctttagttttgcatttgatgcagctttgaggtgtccaatataattatataagtctcaccatgtctggtgatacaagtcaacgcggcaaaaaaaaaggacatgcaagtccttgtaacgctgatctagaatatacaagataatgagcatgcttcgccattaaaaaataaagcctagggcagaaaaaacttgaggaaacaa

SEQ ID NO: 3243 - DNA, 464 bp, Zea mays
  misc_feature (80)..(90): n is a, c, g, or t
  misc_feature (424)..(424): n is a, c, g, or t
taattccccactgccatccttacaaagactacccaaatagaatcaatacctctcattctcctcgtgaatccaatgctctnnnnnnnnnnnaccgaataatgctcagttttgacagaggaatctcaatggatctgactggcccagcacatagccctgccatggctacggttctcttcacctcctggacgggcggctgatcactttccccttcccttctctatcttgcactcttcgctcactccctggcctcccatattgctttgaacctttagttttgcatttgatgcagctttgaggtgtccaatataattatataagtctcaccatgtctggtgatacaagtcaacgcggcaaaaaaaaaggacatgcaagtccttgtaacgctgatctagaatatacaagataatgagcatgcttcgccatnaaaaaataaagcctagggcagaaaaaacttgaggaaacaa

SEQ ID NO: 3244 - DNA, 558 bp, Zea mays
cgaaggtcgaagggtataatcataattttttatttgtttcgagttattctatagacgcttcacgtgtgccttgaaaccaaaggtgtttgcattcagttagcttgcagcttctagttttcctaaaattactgtttgctactattgagatgcagtaggattttttgtagatgttcattagtatgtgatcatggtgaatttggtattgaacagataaggacttgagctatgaccatttggcttctggactgaagtcagccttggagaaagacaaaaatgcccttgattcagatcgtctccagaattacactggtatcttccttctcattgggatcttgttaggtttaagagttccttcattagcattttctgaacttctgcttctggttcaagggaatgcttctcagcttctatgataaactgtcgttttctggaaatgtcatttaactgtgtaggttgtggtaccagatgaatgaacagttacaagttgtgcttaactggatgttatctgatcctctcagtctgagtacccttttcatccctttattcttctgttgatag

SEQ ID NO: 3245 - DNA, 477 bp, Zea mays
agttgaaaaaagtttgagtttgcggaaatccttgaaagagcttcagaacaaatgcttaaactttggcaacactgtgcgtgcaacggctgaagcaggttttcaactcagttggtgctagttctaaaaaatttgaaccttcggctgaagacctgccaagcaccttcgaacatattgagggcgaagttgaggcgcttgacgaagttatagccgggcatggtgacttctgtgccctgctagcttctcgcagcacaactgtagctttcaagaagactggttgcatgcacgggaagatcgtaaacatgccaaacttcagcttatcaccaggagacttggctgacatcccagcctggcccaaagcattagaaatagatttataacacaaatttggacgaagggtgggcgaaacttagctggtgacgaagctcgaagtcatctcaagtcggtattaaacttgtacccgttgcttactttcacctg

SEQ ID NO: 3246 - DNA, 327 bp, Zea mays
  misc_feature (55)..(57): n is a, c, g, or t
  misc_feature (91)..(93): n is a, c, g, or t
  misc_feature (95)..(102): n is a, c, g, or t
  misc_feature (152)..(154): n is a, c, g, or t
  misc_feature (203)..(203): n is a, c, g, or t
  misc_feature (210)..(210): n is a, c, g, or t
  misc_feature (262)..(264): n is a, c, g, or t
  misc_feature (304)..(305): n is a, c, g, or t
actccaaattactccattccagttcctaaaattttgtaattttattctctatcannnagagcctctgttttgtcatgaaaacagtaagaannntnnnnnnnnacttaatcctattttaaacccataaaacctttgaaaattcataacttaannnctataactccaaaaattatgattcctgttcctaggattttattttaatntgtagantatttctgtgtattttgtttatatgtttggtgtaatgttaatttctctatannnactgtgcttgtttgtattgtggcgagtagaagagcccgtnnctgaggatcctggtgagcagca

SEQ ID NO: 3247 - DNA, 336 bp, Zea mays
  misc_feature (326)..(330): n is a, c, g, or t
acataaaaaattcagaagataggattatgagactaggtgcgaaaggagaaaaaaagaagaataggagatgccaattgtgtggtatagcagatggacataacagcagaacgtgtctgtctgtggaagagaacagggcaaggctagcaaaactggctaatcgaaagagaggacgaccagccggatcaagactaaacaataaaacaactgctccacagtggaatgaaacatcgactgctaaaaaacatcgtattgatgaagaagtggaaaatgaagaagtcgatgagcatatggaattgggcgaataatttgaagtgtgactaaagagnnnnngatgta

SEQ ID NO: 3248 - DNA, 336 bp, Zea mays
  misc_feature (140)..(140): n is a, c, g, or t
  misc_feature (277)..(277): n is a, c, g, or t
  misc_feature (326)..(330): n is a, c, g, or t
acataaaaaattcagaagataggattatgagactaggtgcgaaaggagaaaaaaagaagaataggagatgccaattgtgtggtatagcagatggacataacagcagaacgtgtctgtctgtggaagagaacagggcaagnctagcaaaactggctaatcgaaagagaggacgaccagccggatcaagactaaacaataaaacaactgctccacagtggaatgaaacatcgactgctaaaaaacatcgtattgatgaagaagtggaaaatgaagaagncgatgagcatatggaattgggcgaataatttgaagtgtgactaaagagnnnnngatgta

SEQ ID NO: 3249 - DNA, 390 bp, Zea mays
caatgacgctccagccaccgccaactcaagaatggtatatggatacaggtgctgaaactcacatgacatccaactccggtaatctttgctcctctcaatttccttctttttctactccatccaatattgtcgttggcaatggttctcttttacccgtcactcatactggctccgtcacttttcctgccacatgtggtcctcttcacctaaataatgttcttgtttcgcctcacctcattaaaaatcttatatccgttcgacaattcactattgaaaatagatgttctgttgaatttgatccttctggtttttctgtgaaggacctccaaacccagaacgtgatcgtcaggtgcaatagttccgggccgctatatccgctgctgtcatcag

SEQ ID NO: 3250 - DNA, 509 bp, Zea mays
ctgtgttcataaagcaaaagagaaattcatcacccgagttggtgcaaacaaaaaaaaacagtacataaaaaatggaagaccccttactcctgtggctagaattgtattagaagcacggaaacggtgaagagttccatcttccatgtttaaggcaatgactccttgacactttcctacaatattgttgctagttaattaatggatggaattataaccatacttgaaagttgcaataagcttcatatatcgttgagtcaaaacagcagcagaagaaatacagtgacgtgaactgcattgtaaataaaagtgcaattatataggagtaaccaagtactaccaactactggtactggctttcaacaaccacaagaaaacaattataagctaaagccaaggttcatgaaagtgtattgattgaaacagaccaacttagcaacaatggactaaagaaccaaatgctagaaaatctaaaacaaaacatctaataggaccttaaaggcatgctcctc

SEQ ID NO: 3251 - DNA, 455 bp, Zea mays
tctagctgcagcagcaatgctactccgagcaatgccggagccatccaccaccgaggggcagcgtatccagggagaactcaagaatctcctagaggatgccgcagcccaacaggccgagagctctgcctcccgaaggcgaggatgcccctcggagcatcgcgcaacgccctcccgactcatgcgggaggcctcggtccacaccgagcgcacacgggacaggacgcctgcagccccggatcgcctcggcgacgagcaacaccatcgcgaccgtcgagcccgcctcgaggaaagggtgcgccgaggctaccaccccaggcgcggaggacactacgacagtgaggaggatcggagcccctcgcccgaaccaccaggtccgcgggtcttcagccgggccatacgataggcgccgttttcagcccgtttccgagccccgactaccatcaccaagtactcag

SEQ ID NO: 3252 - DNA, 382 bp, Zea mays
aggtcagtcttataaatgccataagccaacgccgtggcagttgtctcatggaatagccgcaacggccggaggccggcaatagtagcagcatcaagaacagccctgcgctgcaaatcagtgaagtacacagggatgccaatgcagcaatcaacaaccgcagtcttcaggttcccctcggcaatgctcttcagattggacagcaccatggcaagcagctgagtgggggtgaacgtccgctcctcacccaggaaccgtacatggaccaggggaaatccatcgggcccctccgagacacggaacgggaaggaggcgatatcgctctgcacctccgggtcggagaacttgcggccgagcaggcgcttgatctgagagatggagtttc

SEQ ID NO: 3253 - DNA, 583 bp, Zea mays
gaacgttgcttcctcgtcctcctcggacacaaggacgcactgcacaccgcggcgggcgccgagtcagaaagcagaacactctcggaactcaaacacggacaataatcgcaggtggacaaggagggatattcgtacggtgcgaccgctgctgacgagggccttgacgaacacctcgttggataggacgtccagcttcttctgctcctctccctgtcgagcaaccaaggcagcggcatcgtcacatctcgatcaatctctctgaagaaaaagctagctagccgtacagcgcacttgcctgcacgttggtctcgccggcgagcccgatgagctgggcgagcccggccttgttgacggcggaggcgacgaacttgcagccgaggacgatgtgggagagcaggatggtgaagtcgccgcgggactcggggttccggctctgctcgttcagcacgtgccgcgtgatggtcatcaggtccgtccggtgcgcgtccgccgcgtggtccatctcgcctccgtccccccctcgctcgagcctggctccgaattcagctacctagctagcaggatagcggtgtggtggtgatca

SEQ ID NO: 3254 - DNA, 397 bp, Zea mays
ctagagattgatctctggtcgcttggatgcattttggcagaactgatgaaactggaggctttgttcccggggatatctgatattgatcagattagtagaatcatcaatgtcctgggcgatataacagaagaaacctttccaggctgttcaaacttgccagattacaacaagatttcctttaacaaagttgagaaaccgacaggccttgaagcatgtctgcctaacagatctcctactgaggttagcatcataaagcagctaatttgctatgacacagcaaagaggaccagtgctgttgatctgctgaatgatcggtactttaccgaagagccattgccggcacctatagaaggattacatgtcccggcatcaaaggacgaggatgatgacagctcaa

SEQ ID NO: 3255 - DNA, 210 bp, Zea mays
ctcttggcgtccttggagatcttggcgttggccgggagcgccttcttcatgatccggctcacgttcgcgatcggcaggaaccggtcctgctcccgcggcgacgagaactccgcgttgctcggcccgccggactcgttgtcggagtccggcatcgcggccgagccaccgaacagcactgtccggtcaagtcaaacagctctgaggagaaac

SEQ ID NO: 3256 - DNA, 406 bp, Zea mays
aagcatgaacccatgcatccatccaatggtttctgcagacccaaaatttggtagtagtgccacaccacagacttttcctcataattatgctgcctttgctccaatgatgcagtgcaactgcaaccaagatacgtacaggtcattcaccaacatgtcatccacgttctccagcatgcttgtttccacgttgttgtcaaaccctgccatccatgcagctgccaggctcgcagcatcatactggccagcagctgaaggtaacactcctattgatccgaatcaagaaaaccctgcagatggcgtccaaggaaggaacataggctctcctccaagcatggcttctattgtagcagctacagttgctgcagcatctgcatggtgggcaacacaaggtcttctccctttcttc

SEQ ID NO: 3257 - DNA, 509 bp, Zea mays
tcttgttgaggtcaactgccactgtggtcacttcatcttcctcctccttggcaacctccttcgagtctactgcttgtgggggagaaaagctttgcggaagcttttccctactgaacagcgcatcgaaagccagacgaccctgtcaacaaagaagtgaatcagaaaggcaatgatgcgtgctcaaaaatttggacagagtgaattagcatgttgttggtagattacaacctcttcggaaacttccttccatgaatcacttgtgcttccattgcttctaaatctgcggtggttagtgtcaccagctgaagagttgctgcaggaggcttgcttcgccttctcattagcattgtcctcctcaggaacattgcccgcatctacatcactacttgaaggtgtgttagaaccgcatgaagagcgatcctgctttttcttattcctgaatgcatcatttgtgccagctcctgtggtaggtgtggcatcagcattctgggcaggagatagctttaact

SEQ ID NO: 3258 - DNA, 429 bp, Zea mays
tagctaggtggactcttcgcccaacttctggtggtccttgacgaacctgccccagtaccagtggcgcgcgaagacgtgggccatggactcgagcggcacgcccttggtctccggcacgaacgccacggcgaaggcggtcatgacaaccagccacgacgcgtagaagaggaaggtgccgtacttgaagcagcacagcatggccaggaagaactgcgcctgcaagaagttgagccccaggttgagcgccacggccgcgccctgccccgccgaccgcacctccacggggtatatctcgccggggatggtccagtacagcgcgccccacgaccagctgaagctcgccgagaagatcagcgccaccaccagcaccgtcaccgcgtaccccttgggcatcttgctcccgttgccgaggtgtgatccgattatgct

SEQ ID NO: 3259 - DNA, 222 bp, Zea mays
gggcggacgtgatcctcttacgcataagaggaaagaggcagcgggcactcgtgcctggatcggctaaactaaagcggtactccgacacacagcgagaggggttgtttttttaagcgagatctagaagggggcggcgccatcagaccagcaggtggtggagcgatccgatctgatctggttagacggacgcggacacaccttacctggggcagtcgcgggcga

SEQ ID NO: 3260 - DNA, 429 bp, Zea mays
tgtacctcctcatcgaaagggcaggctagcattgcctcctttattaaccccaagcccaggccagatcacaaactagacagcgaaatctagttctccatgcggatgatgcagcggatgccctcccccttggccatcaggtcgaacgccttgttgatctcggcgaacgggacgctgtgcgtgatgaacttctccacctccagctcctgtgcagagccaagcagaattgcaggaacgattcttaacagtttttcagcaaaagctcggcaggtaaggaaactgaagaaacagcactttgcattttacctttttcatgtacagctccaccacatttggcagatcagtgcgtggcttatagttgccaaagaaggtccccttcagggtcctttcgttcaggaagttcatcgggtgggtcttgaactcagcgtcctt

SEQ ID NO: 3261 - DNA, 482 bp, Zea mays
accaacggctcctaaaccgaaaacagccactgtcgaacccttcggaggttttgcaacattaattgatgcaccaagacctaaacagagaaagaatttgtgtaactcagcatctcaagataaatgtactccagcatccacaccaaaatgtagtaattgaacttaccagtagaaataccacagctaaggacgcaaactttatcaaggggagcctgagggttgatctttgcaacacaaccgacatgcatgacggtgtactcgctgaaggtggaagtcccaacaaagtggtagataggcttcccattgattgaaaaccgcgacttgccatcgccaatcatcacaccgcggtcagtgttgatcctgagcaaatcacacatgttgctctctgccgacttgcagtgggcgcactccttgcactccccagtgaacacaggaaggacatggtcgcccggagctacgtcagtcacaccctctccaacactctc

SEQ ID NO: 3262 - DNA, 258 bp, Zea mays
tagagcaaccactgacatgcttctcaaatccagtgaataataccagtccacacggacttagtgccaactagcggcaacacaaagcaatggggaactaattcgaacactaccagcctactaatataaaaaaaagaagtgagggaacaggaaatcagctacaataatagcacggcacagcttcagcttcgacagcatagagcatctaaaacaatgggctcgaacaatatgcgctctcccaagattactgtccgtcaccag

SEQ ID NO: 3263 - DNA, 416 bp, Zea mays
tcttgctttaataatatgcgaactatgttgaggaatgaaataaaataagttcgggtaaaaattcaagtttctgttgtcctgaccggtggtcccgcctgcatgcacactccccagcgcgggcacgtcctgtgccactgccttgtgggcccggccgcatgcaagcgcatgccttggagttacggttggagttggaggttcccccacctggcgacgcgaattagggctgggcaaaaaaaaacccgaaatccgaattttgttcgggaattttgggtagtaacttgcaaaacccgaatttattttgggcatcataatcgggtacctgaattacccgaactttcatgtgtcatgtactcacgtcgtgtttaattattaatttgtacatctataattatgtgtacgtgtgcataacttgtgat

SEQ ID NO: 3264 - DNA, 994 bp, Zea mays
tattttatcagaaaagggagttttgttcttgacatctgtccttattataggcttatagcctccagtcctccacccttacacactgtttcttgtagctgttggctatgatcggcgaacaattcgactatggtgatgaaatttgtggagcagtggtcagcgtgcgtagcaagcaggaaagaatagctatctggacaaaaaatgctgctaatgaagctgctcaggtacggtcgtatgggtgctgcagtcgcatctctttctaagttgcttttaaaaacagcttgtttcctttctcctatgaaatcatcacacttttatgatagttttcggtttcacgatgaatacttgtacaacaacttatatattttccatgtttacaaataatatactttttccctgatacaattcaaatattatcatgcatgcaaattgtcaggtttgagttattattacatataagcgtgctgtgttatcgatgtaaccctgatatacgaaagaataacgaggaaaacagaagggggtgttggttggggatccggctggtagttggccatttccatggtgctatgttgagaattgttttttgacaccatggtttgcagtattattttttttgggggggcttatgtaagttcatttggatgccagcatcctcctgacatgcttgacataaggttctgaacatgtccccccttcctttcagataagcatcgggaagcagtggaaggaatttctggattacaaggactccattggattcattgttcatgtgagtaccagtgcttattgcttaagccaccggcccctcctctcataaggcgtgcctactctcacttggctctctttggctgcaggacgatgcaaagaagatggacaagggactgaagaaccgttacacggtttgatcccaaagagtagtagcatgtagggtggttctatccgattccgtagcaccttgcagagtgtgttgaaggttctctatttgctgaggagttgc

SEQ ID NO: 3265 - DNA, 994 bp, Zea mays
  misc_feature (46)..(58): n is a, c, g, or t
  misc_feature (73)..(73): n is a, c, g, or t
  misc_feature (152)..(152): n is a, c, g, or t
  misc_feature (205)..(205): n is a, c, g, or t
  misc_feature (277)..(277): n is a, c, g, or t
  misc_feature (298)..(298): n is a, c, g, or t
  misc_feature (329)..(329): n is a, c, g, or t
  misc_feature (389)..(389): n is a, c, g, or t
  misc_feature (406)..(406): n is a, c, g, or t
  misc_feature (418)..(418): n is a, c, g, or t
  misc_feature (428)..(428): n is a, c, g, or t
  misc_feature (449)..(449): n is a, c, g, or t
  misc_feature (472)..(472): n is a, c, g, or t
  misc_feature (549)..(549): n is a, c, g, or t
  misc_feature (556)..(557): n is a, c, g, or t
  misc_feature (576)..(576): n is a, c, g, or t
  misc_feature (585)..(585): n is a, c, g, or t
  misc_feature (592)..(592): n is a, c, g, or t
  misc_feature (596)..(614): n is a, c, g, or t
  misc_feature (617)..(617): n is a, c, g, or t
  misc_feature (642)..(643): n is a, c, g, or t
  misc_feature (657)..(657): n is a, c, g, or t
  misc_feature (662)..(662): n is a, c, g, or t
  misc_feature (664)..(665): n is a, c, g, or t
  misc_feature (667)..(669): n is a, c, g, or t
  misc_feature (671)..(672): n is a, c, g, or t
  misc_feature (678)..(678): n is a, c, g, or t
  misc_feature (687)..(687): n is a, c, g, or t
  misc_feature (698)..(698): n is a, c, g, or t
  misc_feature (724)..(724): n is a, c, g, or t
  misc_feature (782)..(782): n is a, c, g, or t
  misc_feature (795)..(795): n is a, c, g, or t
  misc_feature (797)..(801): n is a, c, g, or t
  misc_feature (834)..(835): n is a, c, g, or t
  misc_feature (837)..(837): n is a, c, g, or t
  misc_feature (908)..(908): n is a, c, g, or t
  misc_feature (935)..(935): n is a, c, g, or t
  misc_feature (944)..(944): n is a, c, g, or t
tattttatcagaaaagggagttttgttcttgacatctgtccttatnnnnnnnnnnnnncctccagtcctccanccttacacactgtttcttgtagctgttggctatgatcggcgaacaattcgactatggtgatgaaatttgtggagcagtngtcagcgtgcgtagcaagcaggaaagaatagctatctggacaaaaaatgctgntaatgaagctgctcaggtacggtcgtatgggtgctgcagtcgcatctctttctaagttgcttttaaaaacancttgtttcctttctcctatgnaatcatcacacttttatgatagttttcggtntcacgatgaatacttgtacaacaacttatatattttccatgtttacaaataatatacttnttccctgatacaattcnaatattatcatncatgcaaatngtcaggtttgagttattattncatataagcgtgctgtgttatcnatgtaaccctgatatacgaaagaataacgaggaaaacagaagggggtgttggttggggatccggctggtagttggcnatttccnnggtgctatgttgagaattnttttttganaccatgntttnnnnnnnnnnnnnnnnnnnggnggcttatgtaagttcatttggatgnnagcatcctcctganatgcntnncnnnannttctgnacatgtccncccttcctttnagataagcatcgggaagcagtggaangaatttctggattacaaggactccattggattcattgttcatgtgagtaccagtgctnattgcttaagccncnnnnncctcctctcataaggcgtgcctactctcacttnncnctctttggctgcaggacgatgcaaagaagatggacaagggactgaagaaccgttacacggtttgatcccanagagtagtagcatgtagggtggttctntccgattcngtagcaccttgcagagtgtgttgaaggttctctatttgctgaggagttgc

SEQ ID NO: 3266 - DNA, 552 bp, Zea mays
  misc_feature (36)..(36): n is a, c, g, or t
  misc_feature (70)..(70): n is a, c, g, or t
tcgctggggtggggaggagagccctgctgctctccntgctggcgccggcgctcctgctcctcacgcaganggtggtgcagcctctccagatgacatcgagcacgtaatcctgcggaggcaaagatagagatagtcatcagaagtgcgcgtgtggacgtagcagcagcagcagcagcagctaaacagtagataaacactagagtacctggaggcaaaccgaacaggcgatgagctcgccgctggcgtcgacgttgctgcgctcggtgaacctaacgacggggagcgcgtccatggcgaccctcgccatgccgttggtgccgcccgtgtcgaagatgtcggcgtggtctgcatgcaaggccggtgtgtccgctgcgctcatctgcaggaaccgacgagggcgtgccgccatggaagagagtaaggtttgaggtgactccgtgactgtgtggcgcgcgcggacgcacctggctctcgacggcgctgagcacggcggggtccaccttctcgcgcacaaggcggccggtgagcaagctccagatgacatcgagcacg

SEQ ID NO: 3267 - DNA, 271 bp, Zea mays
acggacacggacacgcgggttccactgccgcaactgcaacggcggcagcagcagtaaccacccaacctaacccgcgcccgtcaaactatcacggacggaaacaccgttccggtcaacacgacagagagatgataggaaaaagaaagagaacaggcagagcagcacagacactgaaacaggaagcagcggccgagcagagcattagcaaccacgcggcacgccgccacgcgtccacgcgcgagtgctggagtgtccatggaggtcgtcgagt

SEQ ID NO: 3268 - DNA, 373 bp, Zea mays
atcgacttccctgagtttctcaacctgatggcacgcaagatgaaggacaccgactctgaggaggagctcaaggaggccttccgcgtgttcgacaaggaccagaacggcttcatctctgctgctgagcttcgacatgtcatgaccaacctaggtgagaagctgacggacgaggaggtggatgagatgattcgtgaagccgacgtggacggtgatggccagatcaactacgaggagttcgtgaaggtgatgatggccaagtgagatgatgtgcctgttttgaagctagttcctctcttgatggtagtagctagtctagtgttggagactgactgcatttggtccgccttgttcctctcgctgcatcaatggacat

SEQ ID NO: 3269 - DNA, 627 bp, Zea mays
tggtcggtcttggcgccagatacaaggtgcgtgcaggctttacatgtgaccctacgttagagcacgctgatgattagttctctgatttgtcctccaaactgccgtttattagaacacattggcacaaagactgctgtccagattcggagccatgctcagaagtttttctccaaggtgcttaaccctcatgtggctgtgctcaatttagctgctgtcactgcattcacagtattttaccatcacatgtgcttgcacagtgagattatctagaagctaactctgagctaactacgcaggtcgtgcgtgaacctggggccagtaattcaattgagatcccaccccctaggccaaagagaaaaccactgcacccataccctcgcaagtgtgccgactccaccgtgacaaatgctccaatgggcgaaccgaagaatgctcctgtttcatcaccatctggttctgaccaagagaatggttcgcctgtctcggtgttatctgcaatgcagtcggatgcttttggttcatcaatatcaaacccatcaactgggggcacgtctcctgcgtcatcagatgatgggaataatgtccctgagatagtgaatggggaggaaaatttgctcactcagcaaa

SEQ ID NO: 3270 - DNA, 273 bp, Zea mays
acacgcttgccaaataaatccaggggaacaataccagtccacatggactagcggcaacacaaagcaatggggtactaattcgaccaataccagcctactaacaaggaaaaagaagtgaatggagacgaaatcagctacaataatggcacagcacaacttcgacagcatagagcatctaaaacattggggctcgaacaactttgcaccccctccgaagattactgtccctcgcctgcatcacctttcggggcatctttgccctcatcagcacca

SEQ ID NO: 3271 - DNA, 511 bp, Zea mays
  misc_feature (490)..(494): n is a, c, g, or t
  misc_feature (499)..(506): n is a, c, g, or t
cgactctccggctgctccgtctgcctccaggtaactaccgagcgatcgatctttggcgtccatcgatctacagtctacgatccgatcccatctcagacgacgggagtcgctgttctcgttcgtgaatgtgcgcaggatttccaggtcggggagaaggtgcggagcctgccggactgctggcacgtgttccacgtgccgtgcatcgacggctggctcatcaagcacggctcctgcccgctctgcaggaggaagctgtaggcggatcgaccggacgacgccatggacgatgttcttctctgcgatcgagccgatgatgtgtgtgtgtgtgtgcccccgccgccgccaccaccgatagctgctgctaggatcggaggagggaggagggagaagagactgacatctatagaacccttaatttatagagagggcttttgctttgctgctacttgtacgtgctctactacgtacctattgcatctttttttttgannnnncatgnnnnnnnnccttc

SEQ ID NO: 3272 - DNA, 511 bp, Zea mays
  misc_feature (56)..(56): n is a, c, g, or t
  misc_feature (59)..(59): n is a, c, g, or t
  misc_feature (65)..(65): n is a, c, g, or t
  misc_feature (73)..(73): n is a, c, g, or t
  misc_feature (78)..(78): n is a, c, g, or t
  misc_feature (106)..(106): n is a, c, g, or t
  misc_feature (283)..(283): n is a, c, g, or t
  misc_feature (329)..(330): n is a, c, g, or t
  misc_feature (342)..(344): n is a, c, g, or t
  misc_feature (367)..(367): n is a, c, g, or t
  misc_feature (375)..(378): n is a, c, g, or t
  misc_feature (385)..(385): n is a, c, g, or t
  misc_feature (477)..(477): n is a, c, g, or t
  misc_feature (482)..(494): n is a, c, g, or t
  misc_feature (499)..(506): n is a, c, g, or t
cgactctccggctgctccgtctgcctccaggtaactaccgagcgatcgatctttgncgnccatcnatctacantctangatccgatcccatctcagacgacgggantcgctgttctcgttcgtgaatgtgcgcaggatttccaggtcggggagaaggtgcggagcctgccggactgctggcacgtgttccacgtgccgtgcatcgacggctggctcatcaagcacggctcctgcccgctctgcaggaggaagctgtaggcggatcgaccggacgacgccatgnacgatgttcttctctgcgatcgagccgatgatgtgtgtgtgtgtgnncccccgccgccnnnaccaccgatagctgctgctaggntcggaggnnnnaggaggnagaagagactgacatctatagaacccttaatttatagagagggcttttgctttgctgctacttgtacgtgctctactacgtacctattgcanctttnnnnnnnnnnnnncatgnnnnnnnnccttc

SEQ ID NO: 3273 - DNA, 418 bp, Zea mays
tcggtggacccaatggtcctggctttccccttggttttggtcaatctagggccaagtttcagatggaacccaacactggtgttacatttgatgatgttgctggtgtcgatgaagcgaagcaagacttcatggaagtggttgagttcttgaagaaacccgaaaggttcactgctgttggtgctcgcattcctaagggtgtactgcttgtcggtcctcctgggacgggtaaaactttgcttgccaaggcaattgcaggagaggctggcgtgccatttttctcaatttcaggttctgagtttgtggagatgtttgttggtgttggtgcttccagagttcgtgaccttttcaagaaggccaaggagaatgctccttgcatagtgtttgttgatgaaattgatgctgttggaaggcaaagagg

SEQ ID NO: 3274 - DNA, 361 bp, Zea mays
tggagggtaaaccagcatcgcgtaatggaccaatgccagctcggagtagaagaatgccatgttctcaagctgcgccaaaagcaccgaagaaaatttcaatatctaaatgtgtggtgtggtgctaaaacaacattacttggacaactatacctctgtgtcacacattgcggctttcaggtacctaacaatgaacatgtacattgttggaaccgtcaggttccaatggagcctgtccaggatggccttttccttggtcagaacctggtctctggtaaatgcgttgtcacagaggcacatcaagtccttaacctgtaaaatatcgctgcttgttgtgtaagctaatcgaagaatggactatagc

SEQ ID NO: 3275 - DNA, 745 bp, Zea mays
acagctcagcttttgctgaggctcataatgattcaacagaggaagcaaataaccgtcattcagcaacagatggttacgatagttcaaggaaagaagaattcgtcaatgagaatttatgcaagcaggaggtgtacttgagatcatggaaggcaattgagcagggacttcttgtgaaaggattagagatttttggaaggaacaggttgggtctttctcctaatatccaactctagatagctcatagtgatcagattggtgttccttgcacaaggaacttaggaaatttgtttcccttgatctccaaatttcttgaaattcatctttgtactgtaaatttgtttcccttgatctctttaccttgtgacaccacataaacgtatccgagatctttgtactgtaattgtaaaaaaacaatttaatcttggtttacctaatcttaatagttacaatgaacccatggtttgtctttcacacagttgtttaattgctcggaaccttcttggtggaatgaagacgtgcaaagatgtttttcaatatatgaattatattgaaaacaacagtgcctctggagctcttagtggtgttgattctcttgttaaaggatatattaaggttggatgcactgtgacccttatttgttgatacttacattcaagccggtaacttaatttggtgttgtccgtgttgatgtcccagggtactgagttgcgcacaagatcaagatattttagaaggcgaggtaaag

SEQ ID NO: 3276 - DNA, 251 bp, Zea mays
accgccgctacccaagatccagtctccgttctccctctcctctcgcttcatacacaccagggcggcagcggcagcggcagcggcaggggcccgccatcaccaacccacctcccttcaattataaacctataaaatatcatcattgacccaagctgaggcgactagtgggtattgatttttggtggggcagatcaaggagggggggagggggttaacttccaaggaaccagttcattgctggtttctgctag

SEQ ID NO: 3277 - DNA, 386 bp, Zea mays
cttctggtacagaggatacaaacaaggaactgctttgctagcttcttccaaacaattctgcatgctatgccaatcgttctgtctctgtctctctctctaataacaatgacaagaatctcaagtagcagttcaatcaatctgtgcatgctatggagtatgaacaagaatcaattttgatggaaagttagtcggcggtgagagtgagacattcgagcaccctggcccctgtcaggctggcaatttgcccaggtcagctacgttgttagattatagtatacgtgtgcatgcatggccaggtcaggtgccgaggtgttgctgcagcttgctcagatcagacgccgttggatctcgggctggcgccgccgtgttgtgtgtcgacgttgacg

SEQ ID NO: 3278 - DNA, 386 bp, Zea mays; identical to SEQ ID NO: 3277

SEQ ID NO: 3279 - DNA, 430 bp, Zea mays
tgctgtatctgcgccatcaagaactcatgtggatcatgccgctcttaccggtgcctctcatccagcttctacggtcaagacacgcatgtgcaccaagtacaacactacagaaggctgcaagttcggtgataagtgccatttcgctcatagcgaaagagagcttgcgaagccagcctacatgtctcaagaaggacctcctatgggtggtcgatatggacgagctgaacctatgcaaccagctgccatgggccctccagcaggaaactttggtgcctcggcgactgccaagatcagtgtggacgcctctctggccggtggcataatcggcaagggtggggtcaacactaagcagataagtagaattacaggcgtcaagctctccatccgcgaccatgagtctaaccccaacctaaagaacatcgagctggaa

SEQ ID NO: 3280 - DNA, 708 bp, Zea mays
catggatgatacatgctctactgctaacttgaaagtgacaaggaaaagatctagcaatgatagtgcgttcaatgttccctcatgttcatcctcattagtcatggaatcacggattcatcataatgaacctagttctgttctgtattcaggctacttccagaagacagcagacagagatggcactagtaaggtactccctccattccaaaatagtattcgttttagctcttaattttttatatctatattcaacagatgatgataaatgaagacacatatatagaactacattaagtattgtataaatcacataaaaagacaaaacgaatttagagacctagataacacaaccaaaaaatataaaagtatatggactagaaatgtgtatgttgagagtttaaagactgggatgatacaacataacaagtttaaagatcttagatgtgtactttgggagtttaggtactgagatgatacaacactataagtttaagtaccgccagtgtatatttattctattcttattatagacatctgaataactccttacaggttgaagataatgacagtgaagatagtggtacgagcatctctaggccatccaagaaagctgcttagcattagcgcattgaagatgttgcaaatcttcaatgagaaatatttaccgtcacatgtaatttagttggtgcgtttgtagtgatcatgcaa

SEQ ID NO: 3281 - DNA, 619 bp, Zea mays
  misc_feature (557)..(558): n is a, c, g, or t
  misc_feature (569)..(576): n is a, c, g, or t
  misc_feature (590)..(600): n is a, c, g, or t
  misc_feature (602)..(614): n is a, c, g, or t
gggagcaccttccagggtagtactgcccgtagtctgaggggcaccatatgaagatagggaggacagagccccctttcgccgccgctgccaaggccgggttgtcctcgatcctgaggtctctcctgaaccaaacaacagtcttctccggtccagccatgctcagcaaccaatcctactgttcccaatcgaccatgacaagcccaaggacggggattaccatgtaacagaacttctcaaacccacctcgtcgaacatggcccgtgcacatgcaccaccggaggaaccagcacgcaaattgcaacagaagtatgagtcaaggacaaatgatggattcgatggttgcgccagagatctgctgcaagaagataggaaggaaagccgtcacgacgctcggtccataagcgacaatattcgaggatcagggaggaggcgaagcggaagatccaagattgaggggcaccaaccgaatcgcaacttgtgggtaggagaacaggatcacgagctaggcggccacagcagcatgggcgcggggcaatctggtgagtagcgacaagtanngattcggttgnnnnnnnncaatcttggatctnnnnnnnnnnntnnnnnnnnnnnnncgaat

SEQ ID NO: 3282 - DNA, 1108 bp, Zea mays
  misc_feature (1073)..(1073): n is a, c, g, or t
cattccttccgacattgtatgcatcatttcaggtttgttgcatgataaaattgtgtaatattattaatacggtgctgggattgttaatgtttgttctacttgattttattatacttagattatattatggtttccatcatctcaatattgtcatatatatgttgcagacaaagacacatatatgtcttattgttgactattgtgctggtggggaactctttatgctccttgataggcaacctatgaaggttctgaaggaggatgcggtcaggtaggcattggcatttaacttgattcttgtgcttagatttagtgaaaactctttatgcttcttgattgtcatggatatgctactctgtcccttatttggttgttgctacataacataattggtggtcgatacaagaagacaagaagtattgtttgatataattatccatggttgttgcaggttctatgctgcagaagtggtcacagcacttgaatacctacattgccaaggtagtcatatatgtcatatactacctccggtctcgaatatttgtcgcttgctagttcatgtttgaactataacgtaacaaataaaaaaacggacgaagtactaattacattctctttggtggtggtggatagtatgcatgtcatgggtagtgaaacacaaccccatattcaataaccatattgtttcccttgaccaataataattgttttccaacatctcgaatgattgttttaggtaagaatttaaccattcatgatagtggtagacttccttattagacaaaaggggggaaagggtcccttgcacttattcatcgcattttaccagtgaaatttgagatgttcactatttcttagtatttgatcccttttttttctcaggtataatctacagagacttaaagccagagaacattttacttcatagagatgggcacatttcattgacagactttgatttgtcttgcttgacatcctgccgaccacaagtaatgtcacttcattaatataccttaatggacaattcatggctattagtttaactccttggtctatttttcttagttgcactnaagtcactattattgttgtttgataggtgtttctt

SEQ ID NO: 3283 - DNA, 505 bp, Zea mays
aaccttatggaactccctcaccatcatcgggtacgggtgcggaccggcaacagagcccaagatatagtgtgtggtctccacatttgtgacccagtcacggatagcctctgaagttgcatccttcagggttgctgtcccagaatgtaccgccctgacctgttccagcaaaaaggaaacaatataccataagaaaaacattaagggaagtataacaaattattttttttcttcttccctgaagaacaagtgcagatacagactcaatctaacaaacagatgcctccgctgtacctctgcaccaagaagcctcatccggaaaacattgagcgcctgcctctccatatcctgtgcgcccatgtagatgatgcactgcagcccgaaacgggcgcacacggtggcggtggcgacgccgtgctgaccagcccctgtctcggcaatgatgcgctgcttcccaagtcgcttggcaagcaaggcctgcgccacggcattgttgatcttgtgggca

SEQ ID NO: 3284 - DNA, 420 bp, Zea mays
atgagtacaacaacttgattacaactaaaccattaatgcatctgtggtaccgaagttctactcaaatggctctatatgagtaagagatctttgtacaaaatgatcttttttaagtaaaaggaaaatgctttgagcacagctggagaatagcatataaataattcagtgtagttttcatcaagtggtcttcaacattgaatcttaagtcaagtcggcctcatataaataattctgttatacatgtagcagttctctcattgcattgttaaaacataaatgtgcagtctagttctttcctgattaggttagtttctactttggagtttgcaaagacagtttaaatagtggaaaagtttggttgtttattaccttagcttgataataatgaatatttatttatatgtgttttaatgggagaac

SEQ ID NO: 3285 - DNA, 418 bp, Zea mays
aaacagaagcatttatgtttgcttaatttttgcctgccgtacaggcttttgcgaaagtctccactagtgttttcaaattaatttgagggctcttttggcaagttttctgaagtgtatttgctggcgcagaattctggaagcaaattcctccaaacgagccctaccgggtgatactaggccatgtaagggacaagctgtacaacacacgcgagcgtgctcgccatctgctggcatctggagtttctgaaatttcagcggaatcgtcatttaccagtatcgaagaggtaaatatcgtcatgtatatatattatatatattcatagtatgacatcagcactgcaactaacaaaaaaaatcactatactgtcgtgcatgcatgcagttccttgagccacttgagctgtgctacaaatcactg

SEQ ID NO: 3286 - DNA, 379 bp, Zea mays
ccgcacaccggggtcgcgctcgccgccctgttcaagctcagggaccagcgcgtcatcgggacgaacgaccgcaccgtggtcgtcagcacggctcacggcctcaagttctcgcagtcgaagatcgactaccatgacagcaagatcgaggacatggcttgcaagtactccaacccgcctgtgagcgtgaaggctgactttggcgccgtcatggatgtgctgaagaagaggctcaagggcaagctctgagcgcctgtgcctggctaatgcaatcaactgattggaatgcagtggtttcgtcggtatcggggggtcttttaggcttcagaaattctgtctgggttagactatctgtttgtggagttagcaggagaatggatgt

SEQ ID NO: 3287 - DNA, 841 bp, Zea mays
  misc_feature (772)..(772): n is a, c, g, or t
  misc_feature (774)..(774): n is a, c, g, or t
  misc_feature (827)..(827): n is a, c, g, or t
  misc_feature (833)..(835): n is a, c, g, or t
  misc_feature (838)..(838): n is a, c, g, or t
gctggccgacttcgccgccgccgtcaaggaagccggcgtgcacggcctcatagttcccgacctcccgtatgggaactcgtgcgctctcactctcaggaccgaagccatcaagaacaacctcgagctggtatgtgacatcaattatcaaggagaagcacgtggcgtcgtctcctactagttcttctgcgcaatataaaattgagaaagcagcgtctgtctcacgacatgaacaatggctgaacgcatgcaggtgctgctcacaacaccatctacgccagcggacaggatggaggagataacacgagcttcacgaggattcgtctatctcgtaagtgacacaaaactttccgtccaggagtttttgctagcgactgaacttgccggccgatgacatgcatgcatgctcatgtatcctacttgaccatcacaggcgagcgtcaatggagttacaggtccacgcgcaaacgtgaacacacgtgtccagtctctcattcaggaggttaaacaggtaataatacgtcatgtcaatggaaaaggagaagagagagagagagagaagatgccatttttattcgtttttgttgttaccaatcacaatcactgagctggctggcttgtgttttttttgtttgctgcaggtcactgacatacccgtggctgtcgggtttggcatatcgaaacctgagcatgtaaagcaggtaggcaaaacttttttaaaaaaaatgcctcaaaaacttattcacatatttttttatagtaacaaattctaacngnatatatattgcgacatatttttttatagtaacaaattctaacagtatatatantgcacnnnacnaga

SEQ ID NO: 3288 - DNA, 855 bp, Zea mays
cgctcaatacagatacaagactgagcagtcatcgacgatgaacaagcaagcgaaccttgagctcgcatccagagtttaggcgtgagcgaacaccaacaatagagtgctcgatggcacactcacgcaagaagcagccgtgtgaaatgatcgcgtctttaatctgcacacgttgaatccaaaggtcaaataggcacaagctcatactacagtttacaggtcacaggcaccattcattccatgcataggaagcgcgtaccctgcacttatccgacttcgttggtggcaagtaccgaggggaagtgaagaatggtgttttcggatcgtaaaactcgaactttggaggctgcgacggggcatacgagatgaaaactgtattagtctggatggaaatctatcatttcaagatattttcagtctaaatgcactggacagttaagagcacattagaccttggaaagagaaaacagaatatacctgctcgcagagggccatgtttgcatcaaagaaagatctgattgttccaatgtcctcccagtagtcagtgaaaacatatgcctgacaaacgaagtcacatgaactgcctgtgcatttggtgcgatactgctctaccctaatagagattggactcgtgcaaagctgactgggcccgtgatttaccgaataatggaagtgaatcacaaaggaaactgttttacctgtacattgtgctcatgcaaagccttgggcagaatttcagaaccaaagtcatgcagttcagcataccgtgacctataagaatgctccagttagaatgcagactatggggaactgtatggaccacaaagaaaaaaaaactcttactttagaaggtctaac

SEQ ID NO: 3289 - DNA, 867 bp, Zea mays
  misc_feature (505)..(505): n is a, c, g, or t
ttatgccactgttgaaacagttgctcatggggatatcaataagcctgtaacatcctccaataggaacctaagtaatgcaacaaaaggaaagaaacaagattcagaccactgattcaatgcaacaaaaggatggagatggacaaagtagtggaaggaatcatgtgcggtggggccctgctaataattaataattaataatttaaacatacggaaacctcgctactgcaggaattatggtttaactacctttatacaaatcaattaccatgtgaatatttctagcaaagccacatacttttggtgccttctgcagtagaggtgtatctacttgaaataaaataaagctggagattgctagagatctctagatcctgtctacttaataagaccgaagatgattattaaatcggtacttcttgcaacatgaagccaataaagtcaaagtgtgccatcttacagcaggggtggcccttgtgcttgtgagagggaaaagctgagtcccggnaccaccacccaaaatgacggcagcgacttcgttaggatcagcataattcctccgaaaggatgttcggacgacctgtaagtttttgcatccagaaattgataattatagcagctaacatcaagtcaaataaaaaaatacaaagggctgtgatgaaacaccaatactattatcgacaggatgagacttacaagagtgtctgggccagcatctgatgtgagcacacactgggtgctgctcacagcaccccttgcactgaaacacatcctcctcagtgccttgttgcgtctgatgctgcagcagttgatcctcatcctctcactcccataacctccactgcctctcctcactgggctcatacacgc

SEQ ID NO: 3290 - DNA, 809 bp, Zea mays
tgcaagtatggtttaattccttttgctctgctttcaagaaagcaaatattcagtatggtttaatttctcaaccgttgaatcatctgaatgttatttggtttggtaacctcttatttcttctttttttagtatgagaagttcctaacctcttagtatttctttaagcaaatgtttccttacatgagttattgaaggagatggtaacatataccatttcacttataagacctctgtcagaatttaatgccagttacataattcagtttatggtactctcaagtaaaaccttccgagttgacgccgccttggcaccctttgcttccatggacagcccttttactgccgcgaggtaccacagcttggtcattgagcaagaaaccttcccacatgatgctttggaggctactgcatggactgaagatggacttatcatggctgctcgccacaagaagtacaaacacatccaggtacctctgtttccaaatgttttgtaccaccccccgttcccattggatgttctccttggagttctggacctgtattatagtggctgctaactgtagctgttttcagggtgtccaattccacccggagagcatcatcacccctgaaggcaagaaaatcatcctcaactttgtcagattcattgaggaactggagaagcagcgttcgtaggggaggtagacgcgacaggtggtttcatttcatagatcagacggaagcagagacaaggcgcttaaagctgcgccaggttccggggctggcagttgaagcatagctaggaaacagctttccctctcttaattctg

SEQ ID NO: 3291 - DNA, 425 bp, Zea mays
taagccgatcctaagggacgggggaaacccggcagatagcgcgatcacgcgcgtcacccgaaagggaatcgggttaagatttcccgagccgggacgtggcggcagacggcgacgttaggaagtccggagacgccggcgggggcctcgggaagagttatcttttctgcttaacggcccgccaaccctggaatcggttcagccggaggtagggtccagcggccggaagagcaccgcacatcgcgcggtgtccggtgcgcccccggcggcccttgaaaatccggaggaccgaattccgtccacgcccggtcgtactcataaccgcatcaggtctccaaggtgaacagcctctggccaatggaacaatgtaggcaagggaagtcggcaaaacggatccgtaacttcgggaaaaggattggctctgaggg

SEQ ID NO: 3292 - DNA, 422 bp, Zea mays
ctcttggtggagtggtacctcagcagctccgcaatcttgttcctgttcgtggagtcctcatggatgccaagcttcaggttcttcgagaaggactcatagaacttgttgtagtcctccttgttctcagcaatctcaaagaacagctcaatgcacttcttcaccaggttcttccggatgaccttgaggatcttgttctgctggagggtctcacgggagatgttgaggggaaggtcctcagagtcaacaatgcccttgacaaagctcagccactctgggatcagctcctcacagttgtccatgatgaagacacggcgcacatagagcttgatgttgttcagtttcttcctggtgtcgaagaggtcaaagggggccctcttcggcacaaacaggacagccttgaactcaagctgaccctcaacaga

SEQ ID NO: 3293 - DNA, 367 bp, Zea mays
agcggcgcaggtgagtggcgatcttcataaagctcagagatttcgcatcaatatgctgctgctgctgcttctcagccaaaccatggccggcgagaacgaaacctccctccagcgcaaggaaccccggagaaccccaacgcagaggtttgtttggatctctggccccgggagagcagcagttcctggactggcgaaccgggcagagcttcggtcctgggaagctggcctgctcgatctctggcggagaaacgagctgaaatctcgacaagctcgtgctggctgcggggaagaaggcgagccactccaattggaggcggagaggagggaagggggaggggatcaggccgagcggggaggtgtatttaat

SEQ ID NO: 3294 - DNA, 367 bp, Zea mays
  misc_feature (14)..(14): n is a, c, g, or t
  misc_feature (64)..(67): n is a, c, g, or t
  misc_feature (145)..(145): n is a, c, g, or t
  misc_feature (164)..(164): n is a, c, g, or t
  misc_feature (197)..(197): n is a, c, g, or t
  misc_feature (220)..(220): n is a, c, g, or t
  misc_feature (235)..(235): n is a, c, g, or t
  misc_feature (286)..(286): n is a, c, g, or t
  misc_feature (309)..(309): n is a, c, g, or t
agcggcgcaggtgngtggcgatcttcataaagctcagagatttcgcatcaatatgctgctgctnnnncttctcagccaaaccatggccggcgagaacgaaacctccctccagcgcaaggaaccccggagaaccccaacgcagagntttgtttggatctctggcnccgggagagcagcagttcctggactggcgaacngggcagagcttcggtcctgggangctggcctgctcganctctggcggagaaacgagctgaaatctcgacaagctcgtgctggctgcggngaagaaggcgagccactccaatnggaggcggagaggagggaagggggaggggatcaggccgagcggggaggtgtatttaat

SEQ ID NO: 3295 - DNA, 340 bp, Zea mays
ttctcgaagatgtcgttgatgaaggagttcatgatggacatggccttggaggagatgccgatgtccgggtgcacctgcttcagcaccttgaagatgtagatcttgtacgtctccacgctcttcttgcccttcttcttgccacgcttgccctcgccgccctccttgccggcggacttgccagcggggacccgcttctccgccttgggcttcttcccggcggtcgtcttctccgccgcgggctcctcctccgccggcttcttcgccgcgggcttcttctcggccttgggcgccatcggtctttggttgggagggggataggcaatcggttgcaaggaaatgc

SEQ ID NO: 3296 - DNA, 579 bp, Zea mays
acgcggactgcgacgagcaggacgggtatgatgaggccatctgcccggtggactcgttccagaagggccccatcctggacgacgagatcaacgagaccatcgtccggccgctggtgcccggcgccaagctccacgccgtcgtcgacgcgtgccacagcgattccgtcctcgacctccccttcctctgcaacatgtccaggtaattatatttggaagctcgtcgtccggtgctggaaatccccgtgcccggccgtacatctaaaacatatctccattcctctctctgtctgtctaggaccgggaactggcagtgggaggatcaccgtccaccgtcgggcgtctgcaagggcacgagcggcggccaggcggtgcttatcagcggctacagcgacggcaaaagcaagttcagcatggtcagtgcactgcactgcacacccatcctatactcctactatatatggtcgccatgaacgtaacgctcgctcgatctaatctctttgcgattggttcgacacgcgacgcgcgccatgttctgttgcagacgccggaggcctgcgcgacggtgggggccatgaccca

SEQ ID NO: 3297 - DNA, 410 bp, Zea mays
actcttacagacttgctcggcgaagaggcctcttcctccgtggttgccaagctggccaacgatggctctggcattggagctgctctccttgcagcctcacactcccagtatggcgagagtgactagtcttgaaaacgggtgtggatcgaacttcgagtgtagctctcatttttatctttttttcccttcaaaacatccctaatattccggctctcctcggggaatttttcggcttcctttcttggctattctgtggatgcacttaaggctctgcagcgggatatagctagtatagagccaatcagtttggaggttatctaatggcataaggtttggacggcaggaacatagaaatggaagctgaacaatgccattcatgttctgcccagtttttcttctccttgtatggt

SEQ ID NO: 3298 - DNA, 1326 bp, Zea mays
  misc_feature (708)..(708): n is a, c, g, or t
  misc_feature (742)..(742): n is a, c, g, or t
actttgtcccggcctatcttcttcaggatgctatatatacctgcggcagccaagcgtgctccacgctctgcgacaaggtcacagatgtgacgggtaatgtatcttacttccagggaagtatctgcgacctgaacatgatatcaaatatttcataagtgatcaagacaatttatggtaaccaatttggcacaaacaagtcataccccaactatatccttcagtttagatccaagagttttgaggtcatgcgaagagtcatgatgcatggctgacatatctggcgtcctgttataccacaatgattgtattcagaaaacatatcctattagatacataagaagtttcaacttactaagcataaaagagcacaaaagagctggtgtgaaagaatgttaagcgtcacaaaaagatgacgttactaatggcatggggggttcaacatgcctcaaatatgctatactccctccagccctttttaactgtcgttctcatatttcgagaaatcaaatatactcaactttgaccaaatataagaaaatattaatgtttattgtacataattggtaccattagatatatagttgatttttttataataaacaaaattagagatacaaatgttgctagtattttctacaatcctagtcaaacttaagaaagtttgaccagcacgtattccacagcgacaattaaaaatgagggagtacnactcaatacatgtatggaatacatgttaatatanttaggagagataaagggtgattgtttattttggctccaggtcaataccttattagccctgaaatataatataaagctccttgaagcaagctgtttctaggcatacgatttctcatgccatcaagatagttaacttgcagcatatcagagaccatgtttattgaaaccaattgaaagaaaaagagagttgaccaaaaataattttcatgtcatcttctttggattacttactgatgtgacatgtaacttataacataggcagccccctgtctgttcaagtacgactttactgccgcatactaaatatgatcaaggggaaaatccaaactctaaatgtcaaatgtcaatgcgttataattcaatgcccatgatcatgtaagctgagaaaacaggcacgaacagctcgatgtccacaggacaagaaagcatacctcaatataaatggctgctccagcttagttggaacaacatctccaaatagagaagcgtcatgtgccaacttgagtaaaattcttcgaacaatctctcccagatacatgccagaaatcattttttcgtatatctgttggaagctatacattagct

SEQ ID NO: 3299 - DNA, 148 bp, Zea mays
gtagttgacgccgcgcttgagcgtgacgcggtcgttcccggtggtgagcgccctgacgcccctcggcgcgctgcacgagctgtaacccgccgagctcacgggcaccacgttgtgtgccttggggtcgtacttgaacactaggacgtcc

SEQ ID NO: 3300 - DNA, 485 bp, Zea mays
gcgttccactccagcagcggccacgtatcccacaggtccggagtggcgcagacgaaggggtcgtgcaggccatcgtactcgtacgcgacgtggtcgtagtactcgccggtcgccgccgagtcctcggaggcgtctactgcagccggcggcggcgtggcgccgtcgtcctgcacgagggagctggtgctattgttcctcttgtcgtccgccgccgcctccgcgtcgttgacctcgcagctgccgctctggtcttgccgctcgttcagcctcccccgcagctcgtctacctggaaaccaacatcgatggatcgtcagcgatcgaacgtcggcgtatatatggagctgtgaaatcaggaatcaagcagacgactggtagtggtacctgcgcggcgagcgcgatcttctcctgcctgagcgactcgacgcgggcgtgcatcgcgtcgaactgagcccggagcgcggcgtagtcatgctccagctgcttg

SEQ ID NO: 3301 - DNA, 678 bp, Zea mays
  misc_feature (625)..(630): n is a, c, g, or t
  misc_feature (654)..(661): n is a, c, g, or t
ttttgggatgtagcttgtggcatctaattcagtagttcatcaaggtcagtatttgctatggaacatctcagggtcaatcaccatgggttccaatggctttcacaactgaacaaatactcgtccccttctagtcatgttacccaggtcgtgctgacagcctaaattttgctccatttaataataaaaccaaatctttgttcaccttaattcgtctaattatcctttcttgattgccttgagttatcaaaacatttcctggtcgctttccctgagctagcagaacatgtggacagtggttctaatgcatggctgttaaaaacattgcaggtaacagtcgaagagaagtcctaccataagtcatgcttcaaatgctcccacgggggctgcgcgattacaccttccaactatgcagccttggagggcatcctctactgcaaacaccatttctcccaacttttcaaggagaagggaagctacaaccacttgatcaagtgcgcgtccgtcaagcgcgctgctgaagcacagccagaacaaccggcctctgattcctcctcctgaccacgccatttaaacagtgggggtttggaggcgagagagttgggaagcctcctgtttctacttaaannnnnngtgatgtatgttattccatctatnnnnnnnngatactagactactact

SEQ ID NO: 3302 - DNA, 316 bp, Zea mays
ctgaggggagggtccatggtggtggcctactgtcacttctcggtggcagcttcagggacgccgacgtggaaaagctttgaagattttgtcagtttgtttgtacataaacaggccgcgttcccgcctatagaattgttattgtgccttttcttgtctagataaacatttcaaccttcatgtaccggttaaatcaatactggtttagtccattgtaaagtggtgactgtcaattgtcgtgaacgcttttagcttgttggttcggttcggttgtagtctgtctgtttgtgcgtattcttaagaaactcgtctggacttt

SEQ ID NO: 3303 - DNA, 110 bp, Zea mays
acgtaggtacacaaaatatgctgtagggaatgctgatgtcttaacagattacataacaaaatgggagagtaatccacaagcaggttgcaatcgccaactagtccactcgg

SEQ ID NO: 3304 - DNA, 370 bp, Zea mays
tcgatctagccacggtctctactcgctgccggggggcttgtaggcgatgaagctgacgcactgcgtctgcctgacgttgtcgaagccgatgacgcggtggaaggcgtccgggtacgcggcgatggcctcctgcagctccttgtacacctgcgtggcgtcggtgcagccgaacatgggcagcttccacatggtccagtagcggccgtcgtagtagcacggggaggtggagttctcgcggtacacgaacccgagcttgctgaactcgaggcagggtatccagccgttgcgcagcaggtagtccacctgcttcagcaggtcgtccgtcgacagcggcggcaggtacgacagcgtctcgaacttcttgttgccg

SEQ ID NO: 3305 - DNA, 247 bp, Zea mays
  misc_feature (44)..(44): n is a, c, g, or t
  misc_feature (64)..(64): n is a, c, g, or t
  misc_feature (118)..(119): n is a, c, g, or t
atgctgacattctcagttttcccctcaccgaaagtatctgatancgtggttgagccatacaatnccactctttctgtccaccagttggttgagaacgctgatgagtgcatggttctcnntaacgaagccctctatgacatctgcttcaggactcttaagctgaccacccctagctgtaagcagactctttctttctcaattttatctgctcagcatgacacatatatgcctgcttgtgctagtgtat

SEQ ID NO: 3306 - DNA, 546 bp, Zea mays
tacatttgcgagttacgggacccctacaggaggttgccagaacttctctgtagggaattgccatgcatcgactgctctagacttggtggtagaggtaagtttgacgagcaccaacatgcatcttgtagacatatatctgttctcagcaacttggcctctgttatctctgcacatgttaatcctgtatatgcgtccatgaaacacaaataaacaaaggcaataatttcatttgaaaaatccaccagacatcaaacctgtaatactcactttactgtattcccaggcctgcgaaggcaagaacagatgcgcgatcagtgttaccaacgaagtattcggagatccatgccgcaaagtcgtcaaggatttggcagttgaagccgagtgctccccgccatcggttaaccaagaacctcgatacgatatatgatcacggtactgtattgtggtgctcaggtcttggaagagctatggtggacgttgccgcagctttgcagggccgtgcacaatggtcctgcatcgttgtctcctatacctctgcacccatat

SEQ ID NO: 3307 - DNA, 405 bp, Zea mays
ctgcacccatgcatcaccatggtcatcatggcaatcatcaccatcaccacagtcatgacgacaacaggcatctagctcctgctccagctccagctccagctccagtacattttgctatgccgcaacccagatatggtgctccacctccatctgggtgtccatacagcaaaaacaagccaaataaaagagggcccgttacaattacaccagctgctgagcctgcagctaatgatcaccgatctacttccattgctttaccaccacatccatcgtcaccttcatctgctagtcgctctcgacatggtcccagtatgcagggtggagctcctgtttctcaccctcctgctctaccagagccacctttgcccaccgtttcgttcgctcatccacatcttccaagtgaac

SEQ ID NO: 3308 - DNA, 852 bp, Zea mays
  misc_feature (846)..(847): n is a, c, g, or t
gcttcgagaagctgggcctcgaccccaagcccgtaacagaatgctacaaaagcgagcatggccacaaggttcgtcctcgattcttcttcggctagctttgaagtacttcttttctttgtgctgctttagataatggaaaaaatactccctctgttttaaaataatagtcgttttagttttagatttttatgtccatgttcatatatggtaattatgaatctagacacatgatatatagaacgtatgaaaccggtaaaaagtaaaatgggaattttaatttgggacggctttagataatggggaaaaaaattctgtatccggagggtagggccaaacttctttgtgctgctagctataccaattctgttctgttcatgtctcttttctcttgtaactgtaattcaatgcatgtcctaaaactaaaagcagtatgaatttgcaacttgttcactggtttcttccagctcgagctcaagtacgcgaaccagaccgacgctctcgagccgccgcaccggtacgtgccctgggtggtcgtcgacgggcagcccctgctagaggtaagttcctttctttcccctgaacttcaacggcgccgcctttgcccaactgtctgatcaaagttcattcccccgttggtgttggtggtgatgatgaacatgttctcgtcgatccaggattacgagaatttcgaggcttacatctgcaaggcttacaagggcactccaccgaaggcctgtgagggcctggaacgtctgcagatggccctcgagacagcggcggaggcgcgcaacggcgtcagctacaactccggtgtcagcaagcttgcgactgctgaagatgagggtnngagca

SEQ ID NO: 3309 - DNA, 539 bp, Zea mays
gtgtgtgctccgttcctcgttgttttgtttcttcccagcaccctgaaataaattaaccagtggcttggctttggcccctgctggccgcctagctagcttttgacacagatcgatgatcgatcgttcccgtctctggctgactgatgaaagaggctggactggattattagacctttgcctccgcaccgtcatccggcacttgggacgacgacgccggattattgtccgccgccttgtcctgctgcccggcttttcccggcgggccgctgatcttgttcatcaggtcgtcgtcgtctcgctcctcgatgctcttgccccagaacacattgtacaggcctccaaccagcaacgccccggcaaagatgctgcatccggacgcatgcatatatatttttttttaaaaaaagagacaaatacaagtagataataacgaagtaatctgcatcacctatatatatgtacgacaacagaacagcatgtatatatgtaccgaccttcctaggctgactgcgtcccctatgacgaaggaggatatgacg

SEQ ID NO: 3310 - DNA, 510 bp, Zea mays
  misc_feature (502)..(502): n is a, c, g, or t
tgagaaaagggacctgctgcatatgctgtgagactccgattgactcccttctgtacaggtttggctcgcattgaccacattctattatttattggacgagtgttgaatcatagtctatatgttggtagtagctgtgaacctgttttttgtgtttattactgatcagatgtgggcacatgtgcacttgctcgaaatgcgcaaacgaattggttcgaggtggagggaaatgcccgttgtgccgcgcacccataatcgaggtcatccgagcatacttcatcatgtagatacaaaaggaagacagcaagaagatagaagaggcccaaattgtttttggtctgtgtggagtcgttagcgggttgtgtattcaattttgttcattctctctaatgcgtttggttaagtttttttccggcttcatttcgttttggtctgcttgccctattgtaagtaatgtacggttttgggtgtggcggcaggacgggaaggtggtcttctctcattnggacttgg

SEQ ID NO: 3311 - DNA, 424 bp, Zea mays
atgtctattcgattggctttaatacgtacttctacatttttctgtctctatagactaacagtccaaacgacaacccttaatagtagactacactgtactcatacagcaacagcactagctagctagtagcacataacaggagcatcactctcttcaaaatcagcagcacctcacaccacggagatttacaggaagatgacgtatatacatacaccgttaacgcgtagtataacagaaccgtgaccagaagctctctgttaagcaggtcgcatggccgggggggcctctctgttccgatcctccttcagtccgctagctgctgctgatggtggctgccttcctccatccttgtgctgtgtcctcctcgtcttggcccggccggctgcttcagcggtccagcgaactgatcaccacccagtcgtac

SEQ ID NO: 3312 - DNA, 307 bp, Zea mays
cgtcgtcatcctcggcgtcggcctcaacgccaagcccgacctcacgatcgagacctgggcgcacgagaaggcgctggaacgcctcaagcagcaggagctagccgccgtctccggaggcggtgacgccgatgccgacgccgagtgatccgctggtcagatcacccgcaactctagagatattgttttttcttttcttttctttctggttccctgcttgtgtcgcgcggttcaataaggctgtctgtcagtctgtactgagatgcatgtcatgagattgagagattccagaaatggatggacatcagac

SEQ ID NO: 3313 - DNA, 503 bp, Zea mays
gcgcgaagctccgccgcgtccacctccttggcgccacccgccgggcggtagtagccagtgactgggtccggcacccacggcgtcttctccccggaggcagccgcggtgttcacctccttgcccatgatgcgcttggccaccttctccacggccttccgcccgcatcccttcaccacgaccgcggccacggagtagcacctcctgcgccatgtcgcaggcatcatcaagacatacagttcgctcagaagacatgcatgcatcgtacgtattcgtatataacatgcatgcatgctagcatggctcagtacagctggctgacctttgtgctaggaggctagcgcagcttgacgcagctctctccatatggaagcgaccagagaagctagttgatcgaggacgaagaagcgcagctcgttatctcttcagagtctcttctgagcgagatctcgctgctgtgcaaatacaattgcaataatgtctgatgtcctcgcttctgagcgaga

SEQ ID NO: 3314 - DNA, 448 bp, Zea mays
  misc_feature (414)..(443): n is a, c, g, or t
gtggacgttatgatgggcgtccatggagctgggctcacaaactgcgtgttcttgccgcagaacgccacgctgatccagattgtgccgtggggagggttggaatgggtgtcccgcaccgacttcggcaaccccgcggagctgatggggctgcactacaagcagtacagcatcggcgtgcacgagagcagcctcacggagcagtacccgagcgaccatgagatcttcaagaaccccatttctttccacaagaaagggtttgacttcatcaggcagaccttcatggacaagcagaacgtgaagctggactgcaagaggttcaggcctattctgttggaggcactggacaacctcaacgcgtaagaccgtaaaagcttgtgcttgtgctcaattggtactgggcatggcaatagagannnnnnnnnnnnnnnnnnnnnnnnnnnnnnccccc

SEQ ID NO: 3315 - DNA, 597 bp, Zea mays
cacatgtggtgttgagttgttatgagctgtgtactgctgtcggcatatggataggcggtgccagtatggtagagaacagaacgcgccaaagttctctttatggtggtgatgatatggatgcatgcaggcacgccgagggcgggttcgaggcggccgccggagctgagaacggcgggtgcaagtgcggcgccaactgcacctgcgacccctgcacctgcaagtgagactacgacggtggcggcgatgacgctgcagggtctgcagcctgcagggcgtgatggggtcctcggaaggactctttatctctctagctaattaataagctgatctagtatataatattctagcagtgtcgtttgttgtgttttgttcgagtcagtcagacagtcagccgcgtgccatgggccatgcccatggcatagcatgccttgctctatctgctccatcttcttctacgcatgccttgttctagtggtggtactggtgggggaacgaataattgtaccgagatgttggcgccgtgtcgtgtcgtgtcgtgtcctgtcctgtcctgtccttcctggggctcatctagcagtcagactgtgttgtgttgtg

SEQ ID NO: 3316 - DNA, 597 bp, Zea mays
  misc_feature (67)..(67): n is a, c, g, or t
  misc_feature (69)..(72): n is a, c, g, or t
  misc_feature (74)..(80): n is a, c, g, or t
  misc_feature (82)..(82): n is a, c, g, or t
  misc_feature (84)..(87): n is a, c, g, or t
  misc_feature (89)..(113): n is a, c, g, or t
  misc_feature (116)..(132): n is a, c, g, or t
  misc_feature (135)..(135): n is a, c, g, or t
  misc_feature (144)..(144): n is a, c, g, or t
  misc_feature (190)..(190): n is a, c, g, or t
  misc_feature (199)..(199): n is a, c, g, or t
  misc_feature (214)..(215): n is a, c, g, or t
  misc_feature (219)..(238): n is a, c, g, or t
  misc_feature (240)..(248): n is a, c, g, or t
  misc_feature (251)..(251): n is a, c, g, or t
  misc_feature (253)..(255): n is a, c, g, or t
  misc_feature (258)..(277): n is a, c, g, or t
  misc_feature (279)..(290): n is a, c, g, or t
  misc_feature (292)..(297): n is a, c, g, or t
  misc_feature (299)..(310): n is a, c, g, or t
  misc_feature (312)..(334): n is a, c, g, or t
  misc_feature (336)..(339): n is a, c, g, or t
  misc_feature (341)..(346): n is a, c, g, or t
  misc_feature (350)..(352): n is a, c, g, or t
  misc_feature (355)..(363): n is a, c, g, or t
  misc_feature (365)..(365): n is a, c, g, or t
  misc_feature (381)..(381): n is a, c, g, or t
  misc_feature (430)..(430): n is a, c, g, or t
  misc_feature (448)..(460): n is a, c, g, or t
  misc_feature (467)..(467): n is a, c, g, or t
  misc_feature (484)..(484): n is a, c, g, or t
  misc_feature (534)..(540): n is a, c, g, or t
  misc_feature (551)..(557): n is a, c, g, or t
cacatgtggtgttgagttgttatgagctgtgtactgctgtcggcatatggataggcggtgccagtangnnnnannnnnnnangnnnnannnnnnnnnnnnnnnnnnnnnnnnnatnnnnnnnnnnnnnnnnnccnagggcgggntcgaggcggccgccggagctgagaacggcgggtgcaagtgcggcgncaactgcanctgcgacccctgcanntgcnnnnnnnnnnnnnnnnnnnncnnnnnnnnngcngnnnggnnnnnnnnnnnnnnnnnnnnannnnnnnnnnnnannnnnncnnnnnnnnnnnngnnnnnnnnnnnnnnnnnnnnnnntnnnntnnnnnngcannntcnnnnnnnnngntttgttcgagtcagtnagacagtcagccgcgtgccatgggccatgcccatggcatagcatgcctngctctatctgctccatcnnnnnnnnnnnnngccttgntctagtggtggtactgntgggggaacgaataattgtaccgagatgttggcgccgtgtcgtgtcgtgnnnnnnnctgtcctgtcnnnnnnntcctggggctcatctagcagtcagactgtgttgtgttgtg

SEQ ID NO: 3317 - DNA, 415 bp, Zea mays
ggcgagtggacgcactggctcaaggtggccggcggcgtcttcttcaacttctgggtgctcttccacctctaccctttcgccaagggcatcctggggaggcacggcaagacccccgtggtggtgctcgtctggtgggccttcaccttcgtcatcaccgccgtgctgtacatcaacatcccacacatccacgggcccggcggcaagcacggcggcgcgatcggaaggcacggcggcgacgcacaccaccatggcaagaagttcgacggctactacctctggccgtgaagcgccgagcagccagcatcgtcatgcatgcacatataccgcctgccctgatggtgacgatggtgagccgccaaggtgaagagtgtacacgttcccgttcatccatccatcgtctccttagtactgctgc

SEQ ID NO: 3318 - DNA, 349 bp, Zea mays
accccgccgtgtccttcggccccgccctcgtcagctgggagtggggctaccagtgggtgtactgggtcggccccctcatcggcggcggcctcgccggcgtcatctacgagctgctcttcatctcccacacccacgagcagctcccctccaccgactactaaaagccgaagccgaccgacccaggggtgcgcagcgcagcgcagctagcatccagctctctctccccggcccgctcgccgccgtttagtttctctcgtgcacgtgcatgcatcgtagactgtctcaggccgccgctgcgccggcgccgctcgcatcgtttgcttttccttggaccagcagtcgtcgccgt

SEQ ID NO: 3319 - DNA, 420 bp, Zea mays
atcctttgtcctggagcaccttcatcacgtaatgccggggcatcagccggcgttccagactgtacatcaggattgtgggcttgtccagaatgaagttggtaccgacaccgaccacattgatcaggaactcacaggcgcgctgaatcgtctccatggagcgcctcagcaccaacgggttcttttgcaccattctggcaacctcagcctctgagcacccgagaatattggccatcatcttgagcttagatgcaaaggtctccggacagaggcccgccaccgcggtcacagcgtgcctgaacaaaagcgtcttgcggggcacgcccatctcaccggcacgcacgaggacggccctgattctgtccggcttgctggtgagcagcctcgggttagccacgcacaggctcccaatctcctggatag

SEQ ID NO: 3320 - DNA, 407 bp, Zea mays
cctactgcgacgcctacagcaacccgcaggcgcaggagatcctgcagctgctgccgcaccccgtgtggggcgagttcggctacccgacggccaggggacaggggtgggtcggcgaccccagggcgtgggacctcgacgtcggcgccatgtcccaggcgctctacttctaccaggaccccggcacgccgccggccaggaggcggtggacgtcgctcgacgtcggcacggagatatacgtcagcgacagggccgaggaggcggagtggacgctcagtggcttcgacatccttgtgccggacaagtgtatcaagtcacagcaacgggccagcaacagctgctggtagacagacactttaatgtcactgtacgttacgctgagtagcatagcaggccaaagtgttcttcgt

SEQ ID NO: 3321 - DNA, 409 bp, Zea mays
  misc_feature (269)..(269): n is a, c, g, or t
  misc_feature (277)..(279): n is a, c, g, or t
  misc_feature (342)..(342): n is a, c, g, or t
  misc_feature (374)..(390): n is a, c, g, or t
  misc_feature (396)..(400): n is a, c, g, or t
gctgtacggaggctctctgctggcctcggaaccggcggagcagtccccaaggcagtcgcctctcatctctctggcacacgcgtccccgtccgcaaggcagatgcagaaccgaccagagacaacacccaggtcccacaccttcgacccaggctactacagctcgtcggggtcccagcacgacgatggctacgacgcggataggagggccggacggctgctgcggagcttgaggcgctctggaccgctcgacttcggtgcgagcagaaagncgaagaannncgtcgagggctccagctccgggagcagccatggagctggctcgctgcagaggttcgcagtgtncagatctggccctctatcgtacagataggggnnnnnnnnnnnnnnnnnctctannnnngtagatctt

SEQ ID NO: 3322 - DNA, 637 bp, Zea mays
gcgtcgggcgcctggaagggcaccagcggaggccacgccgtgctcatcagcggatacagcgagggcaaaggcaacttcgccatggtcagggacatgatacatacatacatactgctgatcgagctctgctgccttgcatctatctatataactaacatgcatatgctgctgcttggacgacgcgcggcgtgcagatgcccgacgcccacgcgtcggtcgtcggggccatgacgcacagcttcgtccggacgctggagtgccagccgcgcggggtcacctacggccacctgctcagctccatgagggccatcatgaagaaccgcggcgggggctgcgatctgcagggggccatcggcgcacccatccgcaccgtcgccaacttcagcggcgtgcaggtaatccatgtcgagtctctgtctgtctgtcaacaacaacatcctcggctagctagctgctgtgcccctccgatcccctctcacttgtttgctgcactgcatggttggtttcatctttttgcaggagcctaacctgtcctcttcggagacgtttgacatttaccgcaagcagttcgtcctgtagacaccacgccacaccagtgtttgccccgccggccgcttgtaatgaattgccgtcgtag

SEQ ID NO: 3323 - DNA, 346 bp, Zea mays
gatgtaacaggagtctcaaggagtaacatagttgagtcgtttacatacagccagccaggcccaggtggccaggcaggaactcaactattatgtagccagggccaaggacctgtctggtcagcggccagcagccaccacactccatccaggtgctgctgttcctcctcaatcctggccagatgccaccgctacagctactactgctacacgtccaattctcgtaacaggtctgtctctgaaggtttccatctggacatctttagatccacgccttaaaaaccttgcagaccaaattgtacccaccagaaaaatatattccgtttcgcttcgctccacatgctacgta

SEQ ID NO: 3324 - DNA, 346 bp, Zea mays
  misc_feature (63)..(66): n is a, c, g, or t
  misc_feature (69)..(70): n is a, c, g, or t
  misc_feature (74)..(74): n is a, c, g, or t
  misc_feature (77)..(79): n is a, c, g, or t
  misc_feature (92)..(92): n is a, c, g, or t
  misc_feature (108)..(110): n is a, c, g, or t
  misc_feature (114)..(114): n is a, c, g, or t
  misc_feature (120)..(123): n is a, c, g, or t
  misc_feature (165)..(167): n is a, c, g, or t
  misc_feature (171)..(171): n is a, c, g, or t
  misc_feature (199)..(207): n is a, c, g, or t
gatgtaacaggagtctcaaggagtaacatagttgagtcgtttacatacagccagccaggcccnnnnggnnaggnagnnnctcaactattatntagccagggccaaggnnntgtntggtcnnnngccagcagccaccacactccatccaggtgctgctgttcctcnnnaatnctggccagatgccaccgctacagctacnnnnnnnnnacgtccaattctcgtaacaggtctgtctctgaaggtttccatctggacatctttagatccacgccttaaaaaccttgcagaccaaattgtacccaccagaaaaatatattccgtttcgcttcgctccacatgctacgta

SEQ ID NO: 3325 - DNA, 862 bp, Zea mays
  misc_feature (850)..(858): n is a, c, g, or t
tttctgtgcgatcagcgtcagctgtagtgttttcctggaacatttcgtctgctgacgatgtcacgtgctacaggttcatttgctcatggattcacgtactccggccatccggttgcctgtgctgtggccattgaagctctgaaactttatcggtatgtatgccgcgccgcgctttccagaacacgtattcgagtgttatttatctgtttgttcctgacgaatggtttgcaaaaataaaataaaataaataaatggtgtcagcgaaagggacattcccggccatgtcaagcaaatcgccccaaagttccaggacgggattagggcgctggcagacagtccgattatcggggaggtacgcgtctgaatctctgaatcaacccaaggggctgtttgttcgaatacataactgcaatgctcctgtactccagatacgtggcttggggatgattatggggaccgaattcacaaacaacaagtcaccgactgatctgttccctgccgaatggggtaagtcaatgtagcagctacagccagtacacaaaatggcatggccatgaggccatggcgtgttcccctgccccgccgaatggtctgtgtgtatgatgtgggatgatgcttcttgtcaggggttggtgccatcttcggcgaagagtgccagaagcgcggcatgctggtgagggtcgctggcgacgccatcatgatgtcgccgacgctgatcatgacgcccggcgaagtcgacgaggtttgccatcagcggttcacagtgcccgccaactcgccactgtcgtcaagcctcgcctcgcctcggtagcaacccggtaacaaaacatcaatggccttgtcttttttnnnnnnnnngcgc

SEQ ID NO: 3326 - DNA, 348 bp, Zea mays
gtgtgttggcgctgctgcttctccagctgatggtagctccgacgacggcgacagcccgcctcctgcaggcggatacctcccccgtgttaggcctggacatcatggcgagggagtttggccatccagatggagccatcccctgtggtgaatcctgtgtcttcataccatgcgctacgtcagtctttggttgccgatgcgaaaacaaagtctgcgtgcacgactgaagaagccttcttcagtcgggacgagacgaggccatatctctgatctctgtctcgtcatttgcgtgctaagaaccagctcacaaatttgtgttgggagaaacagaaagacggtggtgttcaactt

SEQ ID NO: 3327 - DNA, 311 bp, Zea mays
cgacggcgccaacgtctggaactggccggtgtcgtacgacaaactcgggatccggtaccggctgtggagggacgccgtcgagaggggcgccgacgaccggttgccgttcagcagcacccaagctgagagtttgtcgtagcgaccggaacgggacgggacctcttcctcgtcgcatttctccgcaagacgacggacggacagccagagttaatgtgacctaggcgtacgtgcgtctctctctctctctctgcgcggttcatcgttcacctcgggctgctgcgcactgaaggattctggaagggtgaaggttg

SEQ ID NO: 3328 - DNA, 595 bp, Zea mays
ggcgagacgtcatgctctgtgccgtcttcgaccagaaaacggtcatggggttggggcggctcacgtcaccgtagatgatcggaggcttgacgcaccttgacccataagactgcacccagccattggcagtgaacgcaaaaccggagagctgctcaccgaagtactcaaccatatcgtttctctgtagaacataggccaataaagtcaattaaatgcgactacactcatggtatgggggtttatcttcttagacatcaaaaaccagcagaatggattcaagagcactgacctcaggctcgccatgcacaagcacatcaatgtcaagctcttcttgaagcttaacgaccttgttgatttcctccttgatggcagtgacgtattcctcctcagagatcctgcgatgtgaatctccaataagaaaaccagccaaaatacagacaagtgaagctaggtattaaatgacaactcacttttttgccttgtactcacggcggaccctcctgagctcaacggtttgtgggaacgaaccgattgtagtggtgggaaggatggggaggttaagcttcttctgctgggcatccaatctagcactaac

SEQ ID NO: 3329 - DNA, 472 bp, Zea mays
tcctcgagcctcggtagtaacccagccgcatcaatggcttttgcctttttcagctggtgagcatctacggggaagccctgagggccacagaggagagggtggcagacctgaagatgaagtccaagaagaactagccaaaacggcgaggacgacgacgacgataacgataaacgccgggcggcaacggaccatatttgatgtacaggtgaataaaaggttcgtggctgcgagacggaaataatgcgcgggaatggtcgacggtcgtctcttgttcttggagtgcaaggtcaagctactcggtcgctaaagcaatggtgactgaacttttaaacggcacgcagatgatttttttctttaagggctagtttgacaatctcatttgttcaaaggggttttaagtgaaattacttaagaacactttaaaaaaagggagttgccaaactagcctaagcaatgacaatatctcaaatgt

SEQ ID NO: 3330 - DNA, 647 bp, Zea mays
  misc_feature (623)..(624): n is a, c, g, or t
gctggtgtaagcacctggaaaaacataacaagttgtttattgctaactgaactgtgctatttgcaacagtcgaacaacgcctacattttccctggatttggcctcggtcttgttatctctggagccatccgtgtccacgaggacatgcttcttgccgcctgtaagtacctcccgtccaaacggaaaccttgatgagactagggaccaaatctcatgttccgttcgttcaaacagcggaagcactagctgctcaggccacacaggagaacttcgacaagggatcaatcttcccgcccttcaccaacattagaaagatctctgcgcgcattgccgcagccgtggctgcaaaagcttatgaactcggtacgcacgtgccctctgttttgctttgcagtgcagacaccattccacaccttggcgttcaccacaccgtcacttccctctgcaggtttggcgacccgtctgcctcccccaagggacctggtgaaatatgcacagagctgcatgtacactcctgtctaccgtaactaccggtagtgctgctgggatcaattctgcagtaataaaatatgtcgacgcagatgatcctgcaatgttgtagtttattttttcatttgttggcnntgctgctgaccacctttgtggct

SEQ ID NO: 3331 - DNA, 426 bp, Zea mays
gtactacgccatttgcgccaagcggttcacgttcaagccagtgcagctcaacaagaaagaggaggaagaaggcggcaaggcacttgtggagttgcaagagaaggtttaatttgagcagcatgcactttcagctatgtgcaggtacatgtctaatagaaaggaagtactcatcagtgctaggaagatcctcagaaaaactcccaaggtattactatataaatctatgtgagcatcttcccctgtattagtcaagtagatcaagaatgcaggaaggttgttcaggcaagcaacctcagaaattgtcaaggatcacatgacagctttgtggatggcagaagctatctggtctggtcctgagacttggcacaggtgcaaaacacaactcgactatatttgtaattagaaagcaggcacgaggcacatgtc

SEQ ID NO: 3332 - DNA, 362 bp, Zea mays
ggtcgggtaaagacggcaagtacacggccctcccgccgttcgacgccatcgcccagaaccccgaggccaggttcctccacatctgctccaacgagaccatccacggcgtcgagttcaaggactacccggagccccgcaacaggtcgggcatcctcgtcgccgacatgtcctccaacttctgctccaagcccgtcgacgtctcccgcttcggcgtcatctacgccggcgcacagaagaacgtcgggccctccggcgtcaccatcgccatcgtgcgcaaggacctcatcggcgccgctcagcccatcacgcccgtcatgctcgacttcaagacgcacgccgacaacgcctccctctataacacc

SEQ ID NO: 3333 - DNA, 689 bp, Zea mays
  misc_feature (63)..(63): n is a, c, g, or t
  misc_feature (300)..(300): n is a, c, g, or t
aaatgcttaggcaagcagaataggcaacccgtttgcaattttttctccttcattaacaatcantttttccaatagttgcttcatatacagaatcggcaggcaatagtcttccttttggtgcaatagacttgtctccttacggcattccacgtcacttcctttcagggtaaagagccagctgaaacgattggcacgtcccatgtactcgaacccccctattcacggtgccaagatagttgccaacgttgttggtgatccaaccatgtttggtgaatggaaacaagagatggagctaatggntggacggatcaagaatgtaagacagaagctctacgacagtttgtctgccaaggacaagagcggcaaggactggtctttcattctgaggcagattggcatgttctcctacaccggcttgaacaaagcgcaggtaacgctgcttccgcttgtgccgttgtgcagacatcatgcgctaaatcaagttcaatcaccggtcacacactctttgttgaaacatacatatcatctacaaaaaaataacgtaaatgcataatttcgctttttcgtctgcagagtgacaacatgacggataaatggcatatttacatgaccaaggatgggcggatctcgttagctgggctgtccctggctaagtgtgattatcttgccgacgccatcatcgattcctt

SEQ ID NO: 3334 - DNA, 1175 bp, Zea mays
  misc_feature (607)..(607): n is a, c, g, or t
gagatcaaccaaaattcaaatacaatacatgccttcggaagttagctatcactttcttccacggaggcatgagtaagggtgacaatgggctctaaattttatactacaaaatgtaaggatcagatcagattaggatcgggctatatttctattcattttagaactcaaaatattttagggccctgacaaattgtgaagaaacatttggatcgcgatccattaccacccctaggcacgagagagttaatatgcttaaaagatttgtccaatgctattacactacctgaatgatttgtccaatactaccttctctaggtgaggatcaagtaattggcattaaacatgtacgatataaagctaaaaaaagcatgaaggttggatccattccaccaaaattcatgtgatgaactcatgaatcatgatggaccatctcaactaaggatgaggtgattcctcaaaccaaacagccccataattcattgataatggttctgcaagaaaatctatcttactgttccaggagaatatatgtccccagttcggaacccatggttcagtgtttcagtaactgcagcttcaattctgttcgcagcattttcttctcctnggccatatctcaatagcatcgctgcactaagaattgtagccaatggattggccttgtcctgcactcaacacataacaggagggaaagaaaatttgagacaaacataatttaaacccatctagtgtcagagtttttgaaatagatgtcatctcaacctgtccagcaatatcaggggcagagccatgaataggttcaaaaagaccaggtccctgcataggaacagaaatggcattttcagctgcccttttaaatttgcagcagaatataatggtatctataaacaattcagagaacttcaaagtactggagggattcaattaccgattcaccaacactggcagatgggagcattccaatacttcccgtaatcattgatgcttcatcagataatatgtcaccaaaaatattgtttgtgacaattgtgtcaaactgcagcaataaagaaaattaagatcaacattcaatatatcttcttgatgcttagccagggtacaatgagttacgtcaagagaaaggggggggtgaagagaagcaaacctgcttaggattcctaacaagctgcatcgca

SEQ ID NO: 3335 - DNA, 566 bp, Zea mays
  misc_feature (553)..(555): n is a, c, g, or t
cacgtcgacgatcttcttgccgtcgacggtcgactggtagagggtctcctcgaagaggatggcaccagagatgtactgtcccaggcctggagcgctgacgaggagggtcctgtaggcctggcggttggcctcggtgttctcgaggccgatggagtcgagcctcttcccgcaggtcgcgttcgactcgtccatggcgaggatgccccttcccggcgacgcgatggttttctgcagcaatataattaagagaattgcaaacttaagtgacgatattctgagccatcatatagaaaaaattgctattttagctcttctaacgtaggctctctgctattatgtgaccctggctcaaacgatcgtcgtacataactgaagcaatatatatatataccgcggtctggacaagctcgtcagcgtaggcgctagcgcgggcaaccatggagacgacgacggtcgccggcctgggatgagcggcaaccagctggggcttggatccccattcagccttcttggggaggaatgacgacttgaggagagtagcagcagatgccannnctgctccctgg

SEQ ID NO: 3336 - DNA, 696 bp, Zea mays
tatgtgcgtacgtatgcgtgtgttaattctcgtataggttcttagatctgtcggagctagttggagtctcgccctccttcaagaccaggagcagtacttagcattattcctctcatgttctgctctcaatctcagggtcttgtgccactcgctggctccaacaacgagtcatggtgccaaggtctcgatggccttgcttcacgtgaggcagcctactaccaggccggtgcccgcttcgccaaatggtgagaaacattggcggcgcagttactttgtgtacctggtgtgtggtgatccccatgatgcgtgtttgcttaatgtgacgtgaacttgtgttgtcacatcacaggcgcactgttgtcagcatccccaacggtccatctcaactagccgtgaaggaagctgcctggggcctcgcccgctacgccgccatctcacaggtacctatccttattccttcacccatgcattttcaacgccggaattctcagcgcgcggtagaaaaactcatatatctgtggaaatgaaatgaaatgctaggaaaatggtctggtgccgatcgtggagcccgagatccttctggatggcgagcacggcatcgagaggaccttcgaggtggcgcagaaggtgtgggcggagaccttcttctacatggccgagaacagcgtgatgttcgagggcatcctgctgaagccc

SEQ ID NO: 3337 - DNA, 499 bp, Zea mays
gtctacagcagcgggaacgccctggacgtgttgccacgaggtgcaggcaaggggcaggcgctggtgtacctgctcaagaaactggattccaacgggaagccgcccaagaacaccctcgtctgtggcgactccggaaacgacgccgagctattcggtgtgccgtctgtacatggagtcatggtgagctagtagctgaagttcatgttcagctctgtctgtctgatgttcaggtccatgcatgcattaatatattgtttcatcaggtctgcaacgcccaagaggagctggtccagtggtaccaagagaacgcgagggacaatcctaggatcatccaggcgaccgagagatgcgctgccgggatcatgcaggccatcgggcacttggggctagggcccaacgtctctgcgagagaccttgttgggttccctgcttattatcccaacaacaacaacaagaagggggcagctgccaccgctaagcccgcagatgtggtggtgag

SEQ ID NO: 3338 - DNA, 683 bp, Zea mays
tgtggatgatgatagtagtactatcttgacagcatctgattcatgcaacctcgatcttatccaggtatattttcccttactatattctactctctgtagcaggaggtacacaatctaattttattgacgcattgcttgtagcttcatggagatagctcccgagaactacttcctctgctttggaagaacaacaggattatatatgtgctaaatgctgatgaggatggtaaacttatcaatgctcctccaagtgaggaatatgttcttgattggtttttggtggacagtgcaaaaggtggaaggtacaaaattctgcttacatggttggtgacttggtgtgttgtctaatgtctcgatgtttgctcttggactcctaaatgattgatattcttaaaagttgttattcatcccactaaatttaacattggcagtgttttagttttgattttatctatttgtgaatatcacatgttcttatttctttataggatttggtagttaaaatttgttgattgtggagaaagctggaactgataaaatctattcggatgcatttacagtggcaaagggttcaactgggaaaaattccaaatgccaactgttaaaagcaagaacgggtggttattagcaggaggccttcatgcagataatgttcacgaagccgcttctgctctaaagccaaa

SEQ ID NO: 3339 - DNA, 726 bp, Zea mays
  misc_feature (688)..(692): n is a, c, g, or t
agacacacggcttaattccaccagtacccagggcaatcagataaagaccaagaaaaaagacagtatactgaaaagggcttgctgctgggcaaaaggatccttcacaagatggaggcatgagcataggaactgatgctgaaagagtcagcagtgtcatcccctataaattgaaaagatgatgtcaagttaaataataacaaactaacagggaaattccaggattagttgaatgtcgcactatgtgtatgggctaaacatgaattacacaaaagctcgtagtctactaagaatttgagggcctactcatcagtcaaaaaaagaaacaaattacccgcatgtccctttccaagagtgttaccatggcacttctgagcaaagatgacttacaatgaagtatactgtggaaaatgttgcaattgtccagtacctcccccagtatgcatcagccaagattgctccaataagtggagttaagtagcaagttcccgaccatgtagtcacactgctagcagcagaggcattgccagcatgcagcttttttgtcaagtaagtaacaaggtttgtggagatgccatagtaggccagtcgttcacagcattcattacctaggttaaccttaacagttaattgcaggttatggggagattaaattggaagcacacagttagtaaatttactctggacaatnnnnnatatgaatggacatgccttccatctacccgttct

SEQ ID NO: 3340 - DNA, 415 bp, Zea mays
tggcgctgaccgtcggcattccagcagcaataggggccctggtactaaacctaaccacaattatacttgcacagtagtaaggaaaaagcaaagcaaagtcggggaggaatgatgtgtgctcatttgctctcgaaccatgttatactgcagctattgctaaagaataaggtccagacgaaaggagtgatcaggcctctgcaaccggaaatctacgttccaggtgtgctacgtagtttttcatgcttgtccttgtggaattaccatgacgtgtaacggtgctgacccgtgtgtttgcgtgtctgaagcattggagatcttggagtcgtcgggcatcaagctggttgagaaagtggagacttgaaagttccctgatacacagataaagatagtatgatatagcagggcacatgtatca

SEQ ID NO: 3341 - DNA, 614 bp, Zea mays
ctgctgccaagttctctcctccagaggctggcaagttggtgtccgtggttgctgagagatgagccgaagcagcctgttaaggttctcgtcaccggcgctgcgggtacgttgtaattattcagagcaacacgcaccaaactacaaagaaacacaaacacacatgcggaccaaggctctgagctctggagaacaacatagcttccctgaaacgcacttgcgtggtggattgtgcttgcagggcagattgggtacgccatagtcgccatgatcgcgaggggtctgatgcttgggccagaccagccggtggttctccacatgctggacctccctaagtcggcggacgccctgagcggcgtcaggatggagctgatcgatgccgcgttgcctcttctcagaggtgtgctcgtcgtttgttgtgttcggcgttcatctgctgcctgtgtgtgctcggtgttcatcgtttgctgttgtgcgttgttgcaggtgtcgtggcaacgagcgacgaggccgaagcgttccgaggcgtcagcttcgccgtcctgatcggcggatggccgaggaaagaggggatgcacaggaaagacctcatcgccaagaacgtttccatataccag

SEQ ID NO: 3342 - DNA, 577 bp, Zea mays
tgctaagatttgacattagcttattttagtacctgctatctttcagttattccaagtgctaatatgtgtgcataaataggtcgtgatggccaatgattgcattggtgaagaagttgagaagttggctgccgctttgccagaaggtggagttctgctcctagagaatgttagattctacaaggaggaagagaagaacgaacctgagtttgctaagaagctagcatctgttgctgacctttatgtcaatgatgcttttggcacggcacacagagctcatgcttcaaccgaaggagttaccaagtatttgaagcctgctgttgccggcttcctcatgcagaaggtaataaaatgtcacccatgctcatgatcttttaagtgtatttaggtactgttaagtaggatggggtaaatatttttgtacctttcaaaagagaccaataaatctttttaacatttcagttttttcataaataaaaaaaggaaaggtttgacaaatgactttattatctcaggaacttgactaccttgttggagctgttgccaacccaaagaagccatttgccgctattgttggtgg

SEQ ID NO: 3343 - DNA, 557 bp, Zea mays
tctgttggtgggcagccagtagttttcgactctgtaaagggttctcgtatgtgggatgttgatgggaatgagtacattgattacgttggttcctggggtcctgcaatcatcggccatgcagatgataaggtacataattgattatgttggttctggccaatatgttttatgtgaatatgaagtatttcatcataattattttgttagttaatctctgggtctgcttctgtttcctatctcattgttctttcatgatagttgatagagtagcatacttgtatttcctataatagttgattaattagactaatctccatcccatttgtgattgttctaaaatttctgaacctctatatgtatcataaaattttcttggtctgattttgtaaatcaaattggtgaaatccatgagggtttatagctttacttcaccttcaaatatttgtcaacttatagtgtgatttttgaaccactgtggaatattggaaaaatactatatttgattcggcaacatttggcttaagctggcttgagaattgacaaagctaaatttaaat

SEQ ID NO: 3344 - DNA, 517 bp, Zea mays
cctctagctgcttcttcttccaggatcggggatcggagcttgggctgctactgctactataccagcgctagctagcagcagccgccggccggccggctcgcgcaagctaaggaaggatcgacatgacgatggggctccgcgtccgcgactcctccgcgctgctggctctggccgtcgcgctcgcctgctgctccgttgcaggttcggttcgtcgtcgcttcgttgccatatttcattcatctgaaaatgtaaacagtgtcgatcggtcgatgggcgacgctcaccttctctcctctcctgtcgccatggctggcggctgctgcacacactggcacttgcgcagtggtggcctacgaccccctggacccgaacggcaacatcaccatcaagtgggacgtgatctcgtggacgcccgacgggtacgtggcgatggtgacgatgagcaactaccagatgtaccggcacatcatggcgcccgggtggacgttggggtggtcgtgggccaagaaggaggtga

SEQ ID NO: 3345 - DNA, 517 bp, Zea mays
  misc_feature (43)..(43): n is a, c, g, or t
  misc_feature (117)..(117): n is a, c, g, or t
  misc_feature (134)..(134): n is a, c, g, or t
  misc_feature (210)..(225): n is a, c, g, or t
  misc_feature (285)..(285): n is a, c, g, or t
  misc_feature (329)..(329): n is a, c, g, or t
cctctagctgcttcttcttccaggatcggggatcggagcttgngctgctactgctactataccagcgctagctagcagcagccgccggccggccggctcgcgcaagctaaggaaggntcgacatgacgatgggnctccgcgtccgcgactcctccgcgctgctggctctggccgtcgcgctcgcctgctgctccgttgcaggttcggttnnnnnnnnnnnnnnnnccatatttcattcatctgaaaatgtaaacagtgtcgatcggtcgatgggcgacgctcacnttctctcctctcctgtcgccatggctggcggctgctgcacacantggcacttgcgcagtggtggcctacgaccccctggacccgaacggcaacatcaccatcaagtgggacgtgatctcgtggacgcccgacgggtacgtggcgatggtgacgatgagcaactaccagatgtaccggcacatcatggcgcccgggtggacgttggggtggtcgtgggccaagaaggaggtga

SEQ ID NO: 3346 - DNA, 653 bp, Zea mays
tatctgtgttatcaaacatgcgtcagtttgtcaagtacagccgtttcaagcaattcgcgcttcgggtaattacagtgattacaaaaaacaacactgcatcgtttattttttcctcacaatatttcctcgtggcatggtcaggctctggcgagcacccttaacgaggaagagctatcagatctgaaggatcagtttgatgcaattgatatcgataaaagtggatcgattagtatcgaggaaatgcgtcatgtaggttctgttagtgtttgctgatgaaaatgccttagatcctgaactactctgcggtgctgattaatctgtgcatgtttcggtaggcccttgcaaaggatcttccctggagattgaagggtccccgtgtgctggagattattcaagcagtaagtttgagccttcttctggatccagccctttctttgttaccccccttgtttccaagaaaatagctggccttgttctgagggtataaccaaaactgcatcttattttgtggtagattgacagcaacactgatgggctcgtggacttcaaggagtttgttgcggcaactctccatatccaccagatggcggagctcgactcagaaaggtggggcatacgctgccaagctgctttcagtaagtttgatcttgacg

SEQ ID NO: 3347 - DNA, 830 bp, Zea mays
cagcacaaaagactttcagtgattttgaagaagctgttgaaaaggatgcaacaaagaatattcatactgatggaacagttcatcctttaacaagctatgtgatcaactatgttaagtttttgtttgagtaagtatctaatcaaatccgcatgcaatttatgtgttgttataaatgaataggtgtacaagatttgtccttatccatgtgcctttccttttctaattatggactgttctttctagttatgcatcttatgcaattatttccaccatgtgtcatttcttatgtgtagcctcctgattcgccaagagccacattttttccccatgttgcactgtttttgatgaccagaacaacactcatttgtagcatggtagttgtaggtgaacttcttatgcaccattcttgttaagacccttttggcataaatcacaaatgattttcatgttagcctctttcaacaccccaggcacatatgcaagcataaaagtcgaaaaaactgacaggcactgttgatgtctgtgcagctaccagtcaactctaaagcagcttttccaggagttcaaggaagatgggacaggttctgagctggcagctgtaacaatgaaaatcatgcaagccttacaaaataatttagaagcaaaagcaaaacaatacaaggatcctgcattgatgcacatatttttgatgaataacattcactatattgtcaaatctgtccgcaggtatgttcttataccaagtaatgctaggaagaaagtaacaatagtgtgtgtactaccttatactctcttttctgtcactcagatcagaagccaaagatttgttg

SEQ ID NO: 3348 - DNA, 864 bp, Zea mays
tcggtgaaaatgatgtcagaaccaggagcaacatcatgagctgagttatatgtggccgatggattcagcttagccaacaaaaaccttgcctgcaaagatttgtatgatatgcgacgttaataggttgaaggcacttgcttcaccaatgtaaggaattttgcacaaaataataatatcacgtggggagaatccaggtaatttacaagatgaaaaaggtactaattttcgaagcatttgttgaatgtttgcaacatgaaggtggcagaaagcaaatgcaacataaagcgtgtaaaattcacaaacctgcgagccatgttggtcgcagaccactagtcttggaactggaaatcgaccctttattatcatctgtgcctcctcatgtggtgcttgtaatagttgtgcaaattgctaaaaaagtgaacagaaagcatcagaatgtgagaacacttaaattgtgtgcacatcagccctgaaaaagaatgaaaaacaatacatgcaaccacaatgtgttctcataaatgacagcacgtaaggccattagtgtgaaaccagcacgacagtggcttccaacttctagcaaaaatgcactccataaaaaagaacatagctctcagcatcaaaacatgggctcaggctagtaataaaggaacatgggctcaggccagtaataaagagaaggaattgttgtggattattctagttacctcatgctcaggttggttctgataacccatgtttctccactgagcaattgtcattccatgaaaaatgacaacactaaagtacgcatcaagtagcagtatacgatctgctgctattgatgccacatctagaaataccggagatggaggtgaatcaaaagaa

SEQ ID NO: 3349 - DNA, 388 bp, Zea mays
tttcgactggaacctgaagcaggagatcagcgcgctgtctgcggtgaggtcaagaaacgggatccacccggggagcgagctgaacatcctcgccgccgacggggatctctacgtcgccaagattgacgacaaggtcatcgtgaagatcgggtcacggtacgacgtcgggaacctgatcccctcagacttccacgccgttgcccatggcaacaactactgcgtttgggagaagcacggtctgagagttccagcggggcggcaccactagactagactagacccatattccgcccaactcctacagataattctcttttcaggtccattttgaacctggaaaagaaatttaagagaggctaaataaccggaatacgattgtgtactgagc

SEQ ID NO: 3350 - DNA, 481 bp, Zea mays
aagccaagcccacattgtttccgcagctaggtagaggggaggggcaaaggaggagtatagcggagaggttgatgcgtgacggaggaggcgccatggacgtcgacatgcaagcccgcggtggcggtggtagccatggcggcgaacttgacgacgacggcaaggagaagaggacaggtaatttaaaattaactgatgccgaatccatctggaggccgggggtttcgtcttcctcctcattgcatgttcttgtatgtatgcatggggcgcagggacggtgtggacggcgtcggcgcacatcatcacggcggtgatcgggtccggcgtgctgtcgctggcgtgggcgatggcccagctgggctgggtggccgggcctgtgatcctgctgctcttcgcggccatcacctactacacctcctgcctcctcaccgactgctaccgcttcggcgaccctgtcaccgggaagcgcaactacacctacact

SEQ ID NO: 3351 - DNA, 749 bp, Zea mays
caaacaagctaaaagggtttccatcggcaatgactaaataattatttgtgcatatgttcttctaggtcctggctaacgccgatacccctgatgatgcattgactgcgcgaaacaatggggcacaaggaattggattatgccggacagagcacatggtacgtccgatccgacatagtttagcaggctagggatacttggacattttactcttcctttagtttctttgtcctagacaagaaaaacagtttcatgtttttttctcccccctgtacttggggcagttctttgcttcagacgagaggattaaggctgtcaggcagatgattatggctcccacgcttgagctgaggcagcaggcgctcgaccgtctcttgccgtatcagaggtctgacttcgaaggcattttccgtgctatggatggtaagtgaaaaaccacaatgcatacatgttacatgcaggactgcatggcctgaacattctcttggtatcttgcgtttcaggactcccggtgaccatccgactcctggaccctcccctccacgagttccttccagaagggaacatcgaggacattgtaagtgaattatgtgctgagacgggagccaaccaggaggatgccctcgcgcgaattgaaaagctttcagaagtaaacccgatgcttggcttccgtgggtgcaggttggaattctgctactatattcacagcaaaaaaaagaaaaaaaatcactggtgatgcctgattgactaat

SEQ ID NO: 3352 - DNA, 749 bp, Zea mays
  misc_feature (9)..(10): n is a, c, g, or t
  misc_feature (14)..(16): n is a, c, g, or t
  misc_feature (40)..(42): n is a, c, g, or t
  misc_feature (49)..(50): n is a, c, g, or t
  misc_feature (169)..(169): n is a, c, g, or t
  misc_feature (179)..(182): n is a, c, g, or t
  misc_feature (433)..(433): n is a, c, g, or t
  misc_feature (438)..(438): n is a, c, g, or t
  misc_feature (444)..(448): n is a, c, g, or t
  misc_feature (469)..(469): n is a, c, g, or t
caaacaagnnaaannngtttccatcggcaatgactaaatnnntatttgnncatatgttcttctaggtcctggctaacgccgatacccctgatgatgcattgactgcgcgaaacaatggggcacaaggaattggattatgccggacagagcacatggtacgtccgatccnacatagtttnnnnggctagggatacttggacattttactcttcctttagtttctttgtcctagacaagaaaaacagtttcatgtttttttctcccacctgtacttggggcagttctttgcttcagacgagaggattaaggctgtcaggcagatgattatggctcccacgcttgagctgaggcagcaggcgctcgaccgtctcttgccgtatcagaggtctgacttcgaaggcattttccgtgctatggatggtaagtgaaaaancacantgcatnnnnnttacatgcaggactgcatggnctgaacattctcttggtatcttgcgtttcaggactcccggtgaccatccgactcctggaccctcccctccacgagttccttccagaagggaacatcgaggacattgtaagtgaattatgtgctgagacgggagccaaccaggaggatgccctcgcgcgaattgaaaagctttcagaagtaaacccgatgcttggcttccgtgggtgcaggttggaattctgctactatattcacagcaaaaaaaagaaaaaaaatcactggtgatgcctgattgactaat

SEQ ID NO: 3353 - DNA, 400 bp, Zea mays
agacatgccggtggaggagggcgggccgggcgaggagatggagaagttcctcaagcagccggagacgacgctgctggacatgctgcccacgcagatgcaggccatcaaggtcatgacgacgctggacatcctctcgtcgcactcgcccgacgaggagtacatgggggagttcgcggagccgtcgtggctggcggagcccatggtgaaggcggcgttcgagaagttcggcggcaggatgaaggagatcgaggggttcatcgacgagtgcaacaacaacctggacctcaagaaccgctgcggcgccgggatcgtgccgtacgagctgctcaagcccttctccaagccgggagtcaccgggaggggcatccccagcagcatctccatctgatccatcctcaga

SEQ ID NO: 3354 - DNA, 430 bp, Zea mays
  misc_feature (251)..(253): n is a, c, g, or t
  misc_feature (275)..(285): n is a, c, g, or t
  misc_feature (308)..(310): n is a, c, g, or t
  misc_feature (337)..(339): n is a, c, g, or t
  misc_feature (346)..(347): n is a, c, g, or t
  misc_feature (361)..(365): n is a, c, g, or t
cttggggctatgggatttggtttgccggctgctgctggtgctgctgtggccaacccaggtgtcactgttgttgacatcgatggagatggtagctttctcatgaacgttcaggagctagctatgatccgaattgagaacctcccagtgaaggtctttgtgctaaacaaccagcacctggggatggtggtgcagtgggaggacaggttctataaggccaatagagcgcacacatacttgggaaacccagagannnaaagtgagatatatccagattnnnnnnnnnnngccaaagggttcaacattccagnnntccgtgtgacaaagaagaacgaagtcnnngcagcanncaagaagatgctcnnnnntccagggccgtacctcttggatataatcgtcccacaccaggagcatgtgttgcctatgatcccta

SEQ ID NO: 3355 - DNA, 194 bp, Zea mays
tcccccttcctccgtgtgagaccaagaaccatgggcttggcctgggattagcggtggctttagttaaaattatcagtgagtagtagctagcttaagcagtgctccgatccgagatcagttcttccagcagacctgtgtaaatgagagtctcgccgccccgccccgccccgccccggtgtaacgcatcgtcatgt

SEQ ID NO: 3356 - DNA, 506 bp, Zea mays
ttgtcctgtaattgtgctaatttgacgggattccctactgtaggtggtcggcaaggcactcatgctcgatgagatcataaactacgtccagtcgctgcagcagcaagttgaggtgaggcgagggagggttccacttacatttggttacataataacacagtcatagctcgagattccaatcgtttttttttcttttgctgtttattaacactacttttattcagttcctgtccatgaagcttgccactgtgaacccagagcttgatttcagcaacctgtcgacactcctgcacaaagacgtgagcttgacccacacatcaatctctgatgctctgtacctacacatcaaatccgcccttgacacacgctattttatcctggttaattcagatgtaccaacagccatgtggtggcccttcggcaagttcggtctttccactggaaagcgccggcgcagcttttccattctgcgagcaggcggatcttttccacagctttggctcggg

SEQ ID NO: 3357 - DNA, 472 bp, Zea mays
ggttgcatcaacatcggctggcgagtagtagttggtacagcttccaaaagaatgcgctgattgcctacttgttgtatacatacagcagagtgttttgaaccaacaaagagatcaaaaaatcggatttctgtatatgcagcctctggcaattgaatctctcagttccccgtatatgttcgaatcctaccaagcaaaagggaatccaggccagagctggaaacatcctatcaagcaaacactttacaagaaaccttctactatcaagattgcttggtgtatgttcatccctgcagatgcaataggctgtgcttggttacatgagttacagagagattactgcaaacactgtaagtttcgggtgtttacctatacaacaggaatcttcagaagaataagtgagcagagatacaggcacactgagatggcgatcccagcaacgaaattttggtacagacggctattatccctactg

SEQ ID NO: 3358 - DNA, 466 bp, Zea mays
  misc_feature (413)..(413): n is a, c, g, or t
  misc_feature (429)..(431): n is a, c, g, or t
aagacacaggtgaaccatatcggaagcatccggatcagaatcttcacttcctccacctgggttaccgtacataatagccatgggcgatggctgtccttcatctcttggtcctctacaacgacagcagccttatctaagcacctgaatggatgagttcagatatgtttagtttaccagaattctaaacaaagaatggattacagaaaggacatcaatttacagaaaaagagtccataacatggcgctaaacaaaatcttatattaaagaggaaaacgacttaatcaatccagaaaatgtgtagttctacgatgagaaaggaacatgccttatctaacagaagatgacaaacaaatgccatcacagttaggagagagtatctaatatgaacagaaatgtccaccacatttagganagggacattaattttnnntcccatatgcaaacagggctacactgtatctttct

SEQ ID NO: 3359 - DNA, 359 bp, Zea mays
agcgtctagtactcgtcaccctcgtcgccgtcctcaccctcgtcaaactcagcaccgacctcctcgtagtccttctcgagcgcagccagatcctcacgagcctcggagaactcgccctcctccataccctcaccgacgtaccagtgcacgaaggcgcgcttggcgtacatgaggtcgaacttgtggtcaatgcgggagaagacctccacaacactggtggagttggagatcatgcacacggcacgctgcaccttggccaggtcaccgccggggacgacgctgggaggctggtagttgattccgcacttgaagccagtcgggcaccagtccacgaactggatggtgcgcttggtcttgat

SEQ ID NO: 3360 - DNA, 703 bp, Zea mays
tatttggtgccactgagtataccacagcgattgacatttggtctgctggatgtgttcttgctgagcttatgctagggcaggtaaggtgtctcaaatttttattgccatttttaaaaaggttttcaagccaacaaggtcctttcagttcacactgtcttacaagaactatttggacagcctttgtttccgggtgaaagtggtgtggaccaacttgttgaaatcatcaaggtaattttcggttctacaagcttgtgaattgtcttctatagaagcataaattctgatcacccttaaattgattttgtatggcaggtcctcggtacgccaacaagggaagaaattaaatgcatgaacccaaattacacagagtttaagttcccacaaatcaaagcacacccatggcacaaggtgctcaaatctttctacattttgttacaatactctaaaaaaactgttactgttgtcttactaatttactttttgtacattttatctttcaggtattccacaaaaggatgccaccagaagctgttgatctggtctctcggctactccagtactctccaaatctgagatgcactgctgtaagtgcatgccattgtacattatacatgatggaaatacccctgttgactttggttttctaagatctttatgaatgttttgtccagatggaggcacttgttcacccattctttgatga

SEQ ID NO: 3361 - DNA, 392 bp, Zea mays
accatcgaatcccaccacaaaagctcctttcgtcacaccggccagcacccagcttctcctctcctcacccccacgcccccaccccaccaaacaatggcgccggcggcgacttccacagcctctgcgccctcctccttccactccaccggtaggcatagggccagggtcggggcccggccatcgctcgtctctctccgcgtcagagcagccaatcccaacgttaccgccgatcccgcaccggccttccagtccgtcacggccttcgcgccagccaccgtcgccaacctcggcccgggcttcgacttcctcggatgcgccgtcgccgacgcctccctctccctgggtgacaccgtcaccgcaaccctggacccgtcactcccgcccgccaccgt

SEQ ID NO: 3362 - DNA, 537 bp, Zea mays
atacatgattcttttgattgtttactgtttattacacttcaaataatatgacaattgttctccctgactttgcagtgaaatccgcaagtatcagaagagcactgacctgctcataaggaagcttccgttccaaaggcttgtcagggagattgcccaggatttcaaggtgagatttcattttcataccgtcatgtaatctaggaattctgaagtaaacgtagaagtgcacttctcaacccgttgtatttgtgcagactgatcttcgtttccagagccatgcggtgcttgcgctgcaggaggctgcggaggcgtacctggtgggtctattcgaggacactaatctgtgcgccatccatgccaagcgcgtgaccatcatgcccaaggacattcagctggctaggaggatccgtggtgaaagggcctagattctctgtttactgctactgggagtggctccgtagtatggtttgcatctgttcgatgcttgctttttgtggaagttacatttgtgggtgttcgaattcgtaatattcatcc

SEQ ID NO: 3363 - DNA, 509 bp, Zea mays
ggtgttccaaccaaaaaggcaactgcggcgataacaaggcatatcgaggagatgccgaatccaagagaccaagcgacattttgctgtatccagacaagaacagtgccggagatgaacactccaaggttgacagccatgaagaaccaactgaagaacagttgcttgcttttactctcttcggcgttcgcatcattgtactgatctgctcccaagggaagtaaagctgacttgacgccccccgtaccaatggagatgaggtacaatgaaccaaagagcacaaaatactgaaaccctgttgcaggtggacatgaaccgccttcacacgaggcaggccgtagggacggtatgacggcagaggtggtaattatgagcaggccctatttgcagataatggttatgaacataagaaggggctacatagtggaagaggatcagtactgtatgaagacgaagatggtgcctgcacttacaacaacgtagaatattatggagatagctgcggtcttgta

SEQ ID NO: 3364 - DNA, 290 bp, Zea mays
  misc_feature (227)..(247): n is a, c, g, or t
  misc_feature (254)..(261): n is a, c, g, or t
  misc_feature (270)..(286): n is a, c, g, or t
tggttgtgggatgtagatagtgcgctggaatatatttgtatgatttagcagtcatgcattataatcaggaagcagcaaaacagataggagcaagaaaagtttaacctcgtgatagtgccttgcaagaaattcacctccgactcttaaagaaccagtacccgataggcactgcacggtagcaaccctattctcctgaatagcagggctattcgattcaaaaaaaaaannnnnnnnnnnnnnnnnnnnnaaaaccnnnnnnnnccaaaaccnnnnnnnnnnnnnnnnntttt

SEQ ID NO: 3365 - DNA, 413 bp, Zea mays
gcttgatgacatgctccttcaggtcagcagcgatctcatcattggtcactgtctcgtcgtgctgggtggagatgaggacggtgtggacacggatggggaccatggcaccaccctcattgcggtactcgactgtcacctgggtcttcccatcaggcctgagccaggggcaggttccgttcttgcggacctcggtgagacgagcacctagcttggtggcaaggacatggctgaggggcatcaactcaggggtctcatcggtcgcatacccgaacatgtgtccctggtcaccagctccaatctcctcggggcgcttggtgaagtggccatgcacaccctgagcaatatcaggggactgctgctcaatgttcacgagcaccttgcagtggtcggcgtcaagcccgacatcgtttgac

SEQ ID NO: 3366 - DNA, 207 bp, Zea mays
aatcacagtgctcttaatgtaatatcttgaattgccgtgccatgtgtaataagtaatatcatgaataacagttgctattatgggctctaaatgtgtattaacagccatccatgggccatggcagagttctcatattactttgctgaagtctttgttggaatatacatgacagaattctcacattgctttgctgaagtctttgttgga

SEQ ID NO: 3367 - DNA, 229 bp, Zea mays
ctgtagcagcggcgtcacgagtttatttcacgcagacattgttttcgcatcggcatcccacgactgacgaaatgcatggtacgaagacacaggattcaaaacaggggacggctccatctggatggccaaactccctcgcgatgatgtccaggccaaacacgggggaggtatccgcctgctgcagcaagcgggccgtcgccgtcgtcggagctaccatcagctggagaag

SEQ ID NO: 3368 - DNA, 269 bp, Zea mays
tgaagttctttgatggtcttcctgcttagatgtttatttgtgactgctaggggcgatgttttcttggagataattgaatttttctttgtcaagctcattttgctttcttgtggttgttatggaatgttactggatactggatagttagttcggcctgtaggcgtatcctcctgaacttacctctcattgctgttagttttggcaccaagtttgttcccaattgctatttacggaagttattgcataaagggctgtttggttgtaatctt

SEQ ID NO: 3369 - DNA, 668 bp, Zea mays
  misc_feature (325)..(328): n is a, c, g, or t
agtggcgatgtggtgcgactcctatttcggtaagatttgtgttgacatgcctaatagtttaggataagtacgaatgtagcgcctaacccatgtctatccctgcagtctatgatgactgtgcagcgatggtcgcgtggcccttcagccacccaaatcggaaagcctgctgttcacatggctagcgttgacttgaaaggaaaagcatacgagtaagtttaagaatagccttttgctatattttcatcagtgggtacacgtaccatggcgtggtctttgggcacctgccttagcttcttatctgcaagtatcttgtacatatggcctnnnntctcagtaacacctgcatttttgcagtgtattgaggcagaattcttccaggtttttgttggaagatgtctacaggaacccaggtccgctccagtttgaaggaccaggtgccgattcaaagcctatttcattgtgcgtcgaggatcaagactatatgggcaggataaagaaattgcaggaatacttggagaaggtagttttgatgcccctccccctgcatattttttgcttcaaactcacacgaggccacacttgactgacgagttttgccttcgccatgcctaatctgttttgctatgtggtgcaggtgaagagcattgtgaagcctgggtgctcgcagg

SEQ ID NO: 3370 - DNA, 392 bp, Zea mays
ctcttggaaagctgaggagggaagccgagcgcgccaagagagccctcagcaaccagcaccaggtccgtgttgagatcgagtccctctttgacgggaccgatttctcggagccgctgacccgtgccaggtttgaggagctgaacaacgacctcttccgcaagaccatgggccctgtcaagaaggccatggaggatgctggccttgagaagagccagatccacgagatcgtcctggttggtggaagcaccaggattcccaaggtccagcagctcctgcgggactacttcgatggcaaggagcccaacaagggtgtcaaccctgatgaggctgttgcctttggtgccgctgtgcagggaagcatcttgagcggcgagggtggtgacgagaccaaa

SEQ ID NO: 3371 - DNA, 698 bp, Zea mays
tcagaagccatgtacatgaaactaacggtacatacatttacctctgtaaactctagcctttgaatttcccgctttgtttaaaggagagaaaaaaagatgcggcagaattgtatgtctaaagaacgaacttttgcaggtcaaaaaacccggactggaaatggcaaccgaacaaagcgaactggatctatcgtatgggatgcggtacaatggcgtcaaaatcccagaagcatacgagcgtctcatcttggatacgtgcgtgatgttccatcctatcctagtcctagcgctaaatttgtttccagcacattcagttctctgaaacttgctggatgaagcaattcttccccagtcatggtagtatatattcacacccctgactatgttttcacaggataagaggagaccagcagcacttcgttcgccgagatgagctgagggtttgtgactggccatgcatttcctttgcagtggcttccttgtgaatttgcttattctgacaatgtgtctgttggtctcaggccgcatgggaaatcttcactcctttgcttcacgacatcgatggtggcaagctcaggtccgttccgtacaagccgggaacccgaggaccgcaggaagccgacgagttgagcaggaggatggggtatgtgcagacccatgggtatgtatgggttccgccgaccctttctaaggtttagctg

SEQ ID NO: 3372 - DNA, 414 bp, Zea mays
gtacacacacatgtatatatgtatgatgtatcccttcgatcgaaggcatgccttggtataataactgagtagtcattttattacgttattttgacaagtcagtagttcatccatttgtcccattttttcagcttggaagtttggttacactggccttggtctaataactgagtagtcattttattacgttgtttcgacaagtcagtagctcatccatctgtcccatttttttcagctaggaagtttggttacactggccttggtctaataactgagtagtcattttattacgttgtttcgacaagtcagtagctcatccatctgtcccatttttcagctaggaagttcggttgcactgaatttgtgaacccaaaagaccacaacaagccggtgcaggaggtctgtttctttacc

SEQ ID NO: 3373 - DNA, 420 bp, Zea mays
gtttaccagataattcaagtagtctgatttcacggttctctagtgggtgcattgtgctgtccgttttctgaaataattgctctgcttaattgcatgtatcatgtctccttgtccaactaccaagtccgagatagctttccttagttgtacatgatgaaagcgataattgatttttctaaaattgctgttatttactgtaggtgacattcactgggaactatggcgagtattttggatttgccactgatgttgatgcagtagtttacctaatgctggtaaacgatcttattcgtgggctttatccagaagctgtatccattggcgaagatgtaagtgttcacgatatttttgtgtttttcttttgtaaatactcttctcatagcagttaatttagttggtgcatttgtccccccccccccc

SEQ ID NO: 3374 - DNA, 605 bp, Zea mays
actggctggaaggctttttgttgttataggggctggtggtgcgggaaaagcactagcatatggggcaaaagagaaaggagcaagagttgtaattgcaaaccgtacctttggtatatgattcttccggacacttctgcttcatcagttttatgataattttccacacacactgattattgtgttgtgaaaatgtgattgataaacatgtatatgctgagaaatgaatcaactcttccactttccagcacgagcacaagaacttgccaacttaattggtgggcctgcattgactcttgcggatttggaaaactaccatccagaggaagggatgattcttgcaaatacaacagccattggaatgcatccaaatgtgaatgaaactcctctatctaaggtcttaatttcgctttcctggttttctgccatttgtaatcgagatattatgtcatttctgctattttctaatggctaaatataatcttgcagcaagcactcagatcttatgctgttgtgtttgatgcggtctacacaccaaaagagaccagacttctccgagaagctgcagaatgtggagccacagttgttagtggtctggagatgtttat

SEQ ID NO: 3375 - DNA, 429 bp, Zea mays
gttagttttggtaacacttctataagtagagagcagtcttgctaggcctattttatcacctatggtagctaacctttggaaaaccaatgatcggatgtgctgttaatattgttctctggagtgtgctagtccatatctgaaatcatcgttgcacataaatttaatgatattttccccttcactgaatagagaagcaaatggcatacttacagaggcagtccgctcggatttcagtcgcttctccacaaagctcgcaagcttccttgaataaagctcaccggcctcactgcataccaattattccatcacaagaaagccaaaagcagaatgcaaaatcaacatacaccaagagtctcccaaatattgcatccatgcaaacataagcaaagattaagacctcaaagaagagtctccaccgattcttcctct

SEQ ID NO: 3376 - DNA, 720 bp, Zea mays
gatctgattatttagtggcttagttttcttttgtgcttgttggccgcagccagttaagtctatgatggcagtacttatagcctcgggggtaactgagcatatcaatatcagcatacttgcttatagcctctggggtaactgaacgttttctggggcagttgatcactgtatacaagagtgaatttgtttgctcttcactagatttcttcgtttgttcttcactagatatcggtgtttgttgttattatttctgactcttagactaagcacattgagtgtttgttcttcactagcttatactgagccttgagctccatagtcttctcatcttttcaattctccattgcagatgagagtgtggttgctcttgccaacggatgtccgcacctgcgctcgctgggcctctacttctgccagaacatcacggaccgcgccatgtactccctcgcaaacagccgcgtgaagagcaagcgtgggaggtgggatgcagtgaaagacgggctcgcgaacctcaacatcagccagtgcaccgccctgacgcccccggcggtgcaggccgtctgcgactccttcccggcgctgcacacctgccccgagaggcactccctcatcatcagtggctgcctcagcctcacgtcagtccactgcgcctgcgccctccacccacaccgtgccgggagagccctgatggccaaccatgcgtactaataaacatgttgg

SEQ ID NO: 3377 - DNA, 423 bp, Zea mays
gtacaatacacaaaccatagcacacaacaaagagcaagtactcggtatttggtacatcaccattactagtgatacaaaagaagagcaatagaccttggataaccgctctcaaatggtgtagtccgaccattgacgtatgaaggacgtgtgatccatggactcccctggcatgtcctcgtcattcgcaccctcggccttcttcccaccaatcagcctggcagggttcccaaccgccgtgctcctcgccggcacatctatcagcaccacggatccggctccaatcttagccccggcaccaattttcacgttaccaagaatggtggcccctgctccaatcagcacgccatccccaatcttggggtgccggtcacccaccgccttcccggtcccgcccaaggtgacgtggtggaggatggagacgtt

SEQ ID NO: 3378 - DNA, 508 bp, Zea mays
ttctcccacaaatacggagactggatgcttcgaacccgcgacctgatgactcagctcaccactacaccaggtacacccttctctagcagaactagtaggagaaagaataaacaaaaacaaacctctcaacactctacttgggccctctgtttctacccaaaagagtgacaattgaaattgctcatggccgctcattcttttcattgcaagctatcaaagaagccaggcccagcctttgccttcagctcatgaccagcatctttgcccatctcaaccatgtcgtcaaaagagtacggtccacttctcgttgtctcaaatactgtaagcagaaccataaaagtgacaaggtgttgccgttcaatgatggaaacaacaaaatcactgtaagctcttttcagtcgaaaatcaaggatacctttagatccatctggggaagacaatagaccgcggaatgagcaattcccatcattgtcacggtaagcataggctgcaattggagttcggcagt

SEQ ID NO: 3379 - DNA, 418 bp, Zea mays
gttccggcagcagagtaccataagatgatggaggcttttggagggaaaggctatcttgtggagacaccagacgagctcaaatctgccctttcagaatcgttccgcgccaggaaaccggcggtgattaatgttatcattgatccttacgccggcgcagagagcggtcgaatgcagcacaagaactgaaggcgcttgcttggcttttgtaccataccatagcaggatgcagatgcgacttgatacaaataagcagcaaccgtcaatcaatccttttgtttcttttttacgacctcgcttcgttgttcgtgatacagacgtggggcgcttttaattggaagtcccatttgaaggcatgtgaatgtgttatgattatctaaatgccacgatgcaaactttaaaggcgtgttgatgaggatgt

SEQ ID NO: 3380 - DNA, 861 bp, Zea mays
gacaacttccatactcttatcaactcttgactctcagggctgttctggcttggctttccatacttgcacaccggaacaaggataagaaggtcggagagagattagtgtcagttgaagatattgctatggagcactggaaaacctacggcaggaatttcttttctagatacgattatgaggtatttaatcaaatggtttcctgatattacacttaaggccatatatcttggaaccacctgatcaaatttcttgcacagtcatagtaatctgaatttgccaagaataatttgagtgcatatttcttcttaattaaaaaaccacctaattcctcctaagttggctgagtttttttttgtttaaccaatgattttgtaatagtgcaggcgtgtgaatcaaacagtgcaaaccagatgatggatcaccttagagatgttattgcaaatagcaagcctggagagaaatacggtttgtttgcatgcatcctttttatctagttgctcttgattttactttgtaaggaaacctgctgaaaaatgatgctttcgattttgtgatgcaggaaattacaccctccaatttgctgatgatttcagctatactgatcctgtatgatctgcttctctcttccgctcccctgcatgtgtgaaatgaatggcataaatcaccctttgcttccatatcacaggtagacggtagtacggtatcaaaacaaggacttcgatttgttttcactgatgggtctaggattatcttccggctttcggtacatctgttgcttcgtttcctgaaaaatatataaaaattgttgacgtttgatctaaaacaatatgattaagtatgctcctgcagggaaccggatct

SEQ ID NO: 3381 - DNA, 570 bp, Zea mays
cgtaattgctccgcaactaccccgataccattcccaaatcctccgtcgacccctctacaccggcgatcggcggcgaacgatggggtgggcgacgcggttcctggcggcggtgtgcttctttgctgcgggcgtcctcttcgtcccagaggctatcggttccccatccggcgcaggagccgtcaccgccgccaagctggcccacgtcctctcctttgccacctcctggggcgccgccctctgggccaccttcatcggcggcatcataatgttcaagtgagctcccggctctaatagccccatctttctccccccgtcatcttgccccaatctatgaaccaaaaatcgtgaggggaaaatctaatccaagaattccatggattcattgaactgaaccgctactttgttctgtggtgatgtggaatcctgttctttgaatctttgtaggaacctgccgaggcacatgttcggcaacttgcagagcaagatgttcccggcctacttcacgcttatatctgcatgcgcagccatctccgtcgccgccttcgcgtaccttcacccgtgggaagacga

SEQ ID NO: 3382 - DNA, 603 bp, Zea mays
  misc_feature (595)..(600): n is a, c, g, or t
ctgacatgaaagtcgtggaccattacacgtaaattactagccacttgcattataattggaattactttcgtgatgcacaatttgtgatgttggtaatatggtgttgctactcggtgctcttacctaggtatgttatacttggggatggttgccaaatggaaggtgtttcgaatgaagcggcctctcttgctggtcactggggccttggaaaattgatagctttttatgatgacaaccacatatcaattgatggtaatacagatattgcattcactgaagatgtgcttgcacgatatgaggcactagggtggcatacaatctgggtgaagaatggcaacactgggtatgatgacatacgtactgcaataaacgaagccaagggagttaaagacaagccaactcttatcaaggtaactggcagtctggtattaatgttgttttatttattcatttacttgtcattttggtgctacttcatgagataaatggcacattataggtgactaccactattggttttggatctccgaacaaggccaacacatatagtgttcatggtaacgctttaggttcaaaagaggtagaggcaactagnnnnnncct

SEQ ID NO: 3383 - DNA, 1123 bp, Zea mays
  misc_feature (1059)..(1066): n is a, c, g, or t
  misc_feature (1109)..(1111): n is a, c, g, or t
  misc_feature (1117)..(1119): n is a, c, g, or t
catctactagctgattgcctcaggtctacatgttctctttctcgttttagtgcgcatgttataatgtatgccaaatatgaaaatgacaaccaaatttcctggtgacctttattttaaggtcccaaaaattacaatttggtattagttagcagatgtgaattttttcttttgagattgagaactactatagttaatggtgaggccttgttcggttatttcaattccatgtggattggtgtgttgggatggattgggatggattttgacttgctatggatttaaaccgactcaataccactcaatccacatggattaacggcgaaacgaacaagccctgaagtgtattgcagtcagaacgttgctcatgcatcagcatgtacctcccagtgaaagcgtgacattcagaataaatcacaggactaaattcaagggaatgttgttattgaacaaaattaacaagtccagattgaattagttaattatcttgccgagctttttttttctaagttcgcaaaggtgtgttgcatgaactccataaaaattgcctattaacctttttcttgcaaatagcttcttagttcaattgtttggtagtatggatgcgtttactgaaactcacattatggcaggcaaatatcttgttatctgaagcatcccccctaaccattccatttttcttgttgatggcaaatttgatttaacttagttttgttatgtgctatatacttgttctatttacatttatctgctcgccttttttgccaatttgcagctgggaagaagattatttacccacctcaaggtatacaaagggacagaacatccgcacgaggctcaaaaacctgtcccactcccgatcagggataaaagaatacaaaaaacaggatagagaattcatcgactgaaaaggatgcagtggcgaattcctccccagaaggttttgccctttgtttggaatgctatcctcataaccatgcttctgatcgggggaggggggagtataaatcctctttgtaatttagatgtttaccaatgcatgaaattcagtcaaatttctgnnnnnnnntagtcatgtaatatggtacggtttaaatcaacctaaaatcttnnntccagnnnaagt

SEQ ID NO: 3384 - DNA, 520 bp, Zea mays
agcaaaagcccaaaagatcagcgatgacagagagacgcactgcaccgcggctaacgatgctaaggtaaacactgtcacccatcccaaaagaacaaatcaacaggctgagtctagagctagaggtagacgtacgacgacgtcccgttcttgttggttaattagattagtatatatatatcagaatagatgcctactactttgagatccggccgctgtcggtcagcaactggtcagagaagggcagccgacgtccagagacgaggaggaggcgatcccgggctctccagctccgccgccggcatctgatcctcccacaccaaaccgacctcgtattccggaacatactcctgcgagaatcgcacgtgagaaacccgtccgctctacttggagagggaggggggctcgctttagggaatcggccgggtttaagttcccacctcaagcttgagaacaagctccttcgccgtgggagctgagacgacgatgcgccgagcgtcctccttgatgaacccttccttca

SEQ ID NO: 3385 - DNA, 735 bp, Zea mays
attgttggcgataatcccagcaggctttggctacagctgctttatgtaatacttggatccacgggacaagttgatacgttttctcctctgctcagggatagatccaattgagcactctgaaaagccacgtcgcacaaacctgcgacatctcaaaattaagcaaagtagaagcaagcatatggaaaactgaaaaaatgggagcattgctactatttgcacataatgatgagtcaagagaagaacagaggtaaataccaatctgcagttcgtgtagtaagcaagaataatttcttgagacccagggataatgccatcttttccacgtaatctgaagaatggcaaccaccatgagtaacaaaaaaaggacttcttagcttgttctagtacaaatgccacaagactgaaacccctttaaaatgggtgagaagatacgcttactgaaaaaacagagaacccccactttaacaccacattactggtaggcggtctgttatcttgttataatatttagggattgtatgtgcatgtgagaaagtgcacacaggaacatgtgggcatgtgttggagaaatggttgtggcaacctggtagaggggttgcaacaaccaatcaagagaatggattctgattatccatgtaagcaaagaacataccaagtaacttgtccccctgacctcttcctcggcattcttcagatacagcaattgcagcaacttcaccagattgttcctcaggg

SEQ ID NO: 3386 - DNA, 474 bp, Zea mays
gaagtttaaggtatcttcaacacagctcctgtactagtcatgcccataccgggcattgacgttgttccttgtcggtccattcctcgatggatttttgactaaccaaaatgtctttgctttcgactacacaactcaagttctggtaagcattaaaccaggctttggggattttgtgttaactgtcgatatcgctccatctgatcatgggtctgcatttgttgcatctgcagtttttcatcgtgctgtcgtgcctgattttagtctcggtgaacttcagcacttttctcgtgatcgggaagacgtctcctgtaacctaccaagtacttggccatctgaaaacatgcttggtcctcacctttggctatgtcctgcttcacgacctatttagctggagaaacatacttgggatcctaatcgtggtaattgggatggttctgtacttgtacttctgcactagagagactcagcaaatac

SEQ ID NO: 3387 - DNA, 1238 bp, Zea mays
  misc_feature (52)..(54): n is a, c, g, or t
  misc_feature (1230)..(1231): n is a, c, g, or t
atgagtgcagtatgtagaactcacttcagactttgtgtatccctacagaaannncgtacagcaacatatactttgttaattatatgtgttaatgtttttgcgaaattattactaacaaagcgtgattagttcagcgatttaacctttgtagtaatgaactatcagaatttagtttcctagccttacatgcatgacagacaataatgcgttgattagtaaaaaacctctttaacacacacgcgcacacgtgcatgcgtgcgtggacacacacacacacacacacacacacacgagtgttatgtttttgcaaaattattactagcgtgattagttcagcgaattaacccttgtagtaatgaactatcagaattgagtttcctagccttacatgcatgacagacaataatgtgttgattagtaaaaaacttctttaacacacacacacatatgacatatgtatgtatgtatgtgtacacacacattatttccttttgatgatgcattaaaattttggctcttgatagggtggatttgatatgatctgcagtggaagggacaagattgaaacaccggagcaggtatgtctctgggctctggccatgtttatgttcaaatgcttatgaaaaaactttgttactggatttcctaatctcgatcattttttctcaactacctaatacctgtgttggttgtgcagtttaagcaagctgaagacacggccaacaagcttgatttggatggacttgttgtcattggtggtgatgattcaaacaccaatgcctgcctccttggtgaatactttaggttggctgctaacgctgtgttttgacctttcaatataaggctgattgtgaatataacattgcgttggttgtttcttttttctgcttattcacaagcaaatcaaaattatgatttcaaattatgaacttgctccataggtcaaggaacatgaaaacccgtgttattggttgcccaaagactatcgatggggatctgaaatgtaaggaggttccgacaagctttggatttgatacagcttgcaaggtatctaattcttgattgttgactatgtatgaagtctcagtctaggtttttaattagctacaatggtgatgggctaattgctcaccgcacacctgctcaagcattctttcaatttgaaattaaggcattctacacagatgcatttgaaaacccatcatgaatatatcatgacaaggaatcatnnttcagat

SEQ ID NO: 3388 - DNA, 647 bp, Zea mays
  misc_feature (394)..(396): n is a, c, g, or t
  misc_feature (515)..(519): n is a, c, g, or t
  misc_feature (545)..(553): n is a, c, g, or t
  misc_feature (560)..(560): n is a, c, g, or t
  misc_feature (568)..(587): n is a, c, g, or t
  misc_feature (589)..(608): n is a, c, g, or t
  misc_feature (610)..(617): n is a, c, g, or t
  misc_feature (620)..(643): n is a, c, g, or t
cgacagtgtctgaaaaaaagaacaggccatcaaggttaagttcagcattcttgtttttaaccactgaatcggggagctgggagggacatctgcagaccattatggtgcctgccgcagccgccgcgcgcgcagtggcgtactcccctgaaggcagggtaaccatgcatggtttcagctccaaaaaaaaagaaggtgcagacaagaattcacaaagatcgttggaaggtgaagcttctcagttactactaaacatgttttgtttttttctagagaacatgttatgctgttgtgtggagcatacagccgtcaatgaaaccaaaccagagaccgaaacaaaaaccaaaatccttgcagcggcgtaccatctgggtgagccatcttctgcatagcagtnnnggcgaccatgatgggcatggagatcttgaaccccagcacggtggtggtcatgtcgatcttggacacgtcgatcagtatgcgcggacggaaccttagcaaaggagggaaaaaaagatgannnnncaggtgagcagctgcgcggctctgannnnnnnnncattcgnacgaaggnnnnnnnnnnnnnnnnnnnntnnnnnnnnnnnnnnnnnnnntnnnnnnnnccnnnnnnnnnnnnnnnnnnnnnnnnaccg

SEQ ID NO: 3389 - DNA, 959 bp, Zea mays
  misc_feature (65)..(66): n is a, c, g, or t
tcgatcttgctgtgaccccaaatttcattcaggcactgcaccgcccggcccccaccctcaacttnntttgggggagagggacggttaatctcaacttatgtaacattgacctttcttgtcagtgttatttacttacacccttatattggtttataatgtggggacttctccagccatcacaatatttggagggatgctcaagtgccacagaagacattcacatactaccatccagagtcaagagggcttgatttctcaggattgatgaatgaaatcaaggtggttcatttctttaacatatttacacgttcagtcttgtttcttttgacttcttccattcctgctgcttcctgtatgtattaaacttttgatggatttgttactaaatctcatggtcatggcctaccacctacaaatttagcttcacttgttaatttggtaacaattcagcctttctaatttagagttattgtgggcatttatagttctcttgatacccagccaccagccagataaaatttggaaatggaaccatgagagattattttgtgctcagtgaatctggtctgctgagtgctgacaatttgtctgaaattccttttgtttatgcttttctgtcatctgcagaatgctccagatggttcattctttttgcttcatgcatgtgctcataatcccaccggtgtagatcctacggaggaacaatggagagaaatatcccatcagttcaaggtaatgggaactgaactggggaacaaaaaagttgtatttcctgtgatcctacaagccacacctaccagatttcactcttgttcctctataggtgaaaaaacattttccattctttgacatggcataccaagggtttgccagtggtgatccagagagagatgccaaggcaatccgaattttccttgaagatggacaccaaattggatgtgctcagtcatacgcaaaga

SEQ ID NO: 3390 - DNA, 358 bp, Zea mays
ccgctggtcacctcgccgatcctctcccccgagccgctcaccagctcgctgtggctccgcgcgggcggcccctgcgtgaccatgcccacgcgcctgatctttgggccttcctggagctgcttcaggatcacgtctgcgcccaggaaaccgccctctgccctcctcctcttgccgatcgcccatgagaggccggcttccaccggcgtgatgtgctgctccatgtcgttgccgtacaggcacaggcctgcctccagtcggagactgtcacgggcgcccaagccggtcagccgcaccttgccttcggatttctctaggatggcctctgcaagatccactgcattctctgacggaacagaga

SEQ ID NO: 3391 - DNA, 596 bp, Zea mays
  misc_feature (549)..(551): n is a, c, g, or t
  misc_feature (565)..(568): n is a, c, g, or t
  misc_feature (586)..(586): n is a, c, g, or t
tacccaggcactgagccggatttgaaccattgggccatcccaaacactaggcgaagctgaacaaaatggtaccttccgtgctcaggctcggctctggagatctcaatgcttctctgaaacttgacccgagaccagtacctgcgcgacgccacgagggtgcggttctacaggagctacatcggccagctgaagaaggccatagaccagggagcgaacgtggctggctacttcgcctggtctctcctcgacaacttcgagtggctggcagggtactcgtccaagttcggcatcgtctacgtggacttcaacacgctcgaacgccacccgaaggcgtcggcctactggttcagggacatgcttcagaagcattgagatctccagagccgagcctgagcacggaaggtaccattttgttcagcttcgcctagtgtttgggatggcccaatggttcaaatccggctcagtgcctggctaccaaaatgggaacaaaggacagctaccccgatcaattgtgatgttgtgtgtttgtgggtatgttctctctggaannnattgagatctccannnncgagcctgagcacggaangtaccatttt

SEQ ID NO: 3392 - DNA, 845 bp, Zea mays
gcagtgagtttagcctttctcaatacttcactaataacaagaaatgatgtttttctgtgagtagaataatactagcaggaaatgaaagccaacctgcagccacggaagccaagcatcgggtttacttccgaaagcttttcgatccgtgcgagggcatcctcctggttggctcccgtctcagaacacagttcacgcacgatttcctcgacgttcccttctggaaggaactcgtggaggggagggtccagaagtcgaatagtcactgaaagtcctgaaacgcaacgcaaataccaaagctcaaacccagccctgcgcttcaaaaaatacgaaggcattgtgattttttttttcacgtaccatccatagcacggaagatgccttcgaagtcagacctctggtaaggcagaaggcgatccagcgcctgctgcctcagctcaactgtgggagccataatcatctgcctcacagccttaatcctctcatccgaagcgaagaactgccccaagtacaggttaggaaaagaaaagaaacttgaaactattttcctcgcccagaacaaataaatcaaaaggaaaataaaacatgtcggatgtagtaactgtaaccaagagtactaataataaaaacaaatacagataccatgtgctctgtccggcataacccgattccttctgccccgttgttccgcgcagccaatgcatcctcaggggtatccgcgtttgccaggacctagtagaacatacatatgcacaaaaataatcgtttctgatgaaaattgtgaaatgtggtttgagcttcaaaaagaaaaaggaaaaaacattatgttttttttgagtaatactagt

SEQ ID NO: 3393 - DNA, 406 bp, Zea mays
tatatattatacaattcgaggctactgcacactctctaccgctcgtctcgtcggaattctcctcctcaccctcagcccggcgttggcggccccggcgtgcggaacgacgctgctagtgctagcatacgagggaggcccgaagtgagggcgccgtggagaagttggtgcacgacgcccagcggatgacagactccaccgccacgtccaggtgctcccgcccgccgccgccgatcgtgtggttccgcctgccgttgacgccccgtggcgtggatcccctcgccgtcctcggagtcgaggaggcagcgaccggctgtggctcagctggctcgctgctgtcccgcgcgcagaagaacgagaagctcggcatggaagccatgggcatcgggaaccctcctcctcctcctcc

SEQ ID NO: 3394 - DNA, 365 bp, Zea mays
ttgctccttcttcctcctcctcgatcgacctctctccttggtgccgctgccgccatatatgaactgctagcgcgcgcagcagccagcagctgccgaccggcctacaatcagaaggccagaaaggatcgatggagaccatcaagtgctgcatcgcgtgcatcctgccgtgcggggcgctggacgtggtgcggatcgtgcactccaacggacgcgtggaggagatcagcgggggccccgtgctggccggggagatcatgaaggcgtaccccaagcacgtcctccggaagccgccgtccacgtgcccggccgacggcggcatcgtcgtgcagaagcccgtcatcctgccgcacaatgccgagctgcag

SEQ ID NO: 3395 - DNA, 189 bp, Zea mays
aggatgaccgtgtctaattacgcctgagtttagatgtacttggcgagttacaatatatttatgtggtgtctgaaatgttctagaacctctaaatctattactaagagcaacgatattgtcgcttcttaaaccttagtactacggatgttatgagctaataaatatatttcgctaatgtgatgcagttaa

SEQ ID NO: 3396 - DNA, 248 bp, Zea mays
gctgatgcacaagccacaatagcaatagcaaagctgaaacttaaccttcacatcacttattcacatctccgaacgcgacggagcggcgatgaacagataccggtacacagccgaccccaggccccagcctagggcagcaccacacacgacgaacaccaggatatttatcacgcactcggggaagacgaccaaaagacggttacccacgtacagagaagagcattccacgacgaccctgctgacattga

SEQ ID NO: 3397 - DNA, 851 bp, Zea mays
tgatctccttgtcttctggggagtacttcttcgctttgaggaaatcttccctcgctgattctgtctggccaagttcagatttagcttttcctcgcctgaacagcgctttgacattactttcatcttctgtcaaaacctgaataatatgtttacaaaaaggataatccatcaaatggtaattttttcgtttgattttgtatcaggaccatgggattgttcacttcatgaaacatcatgagaccaacacctttttgcaatagaaaggctggaaatgtgcaaatcagctgttcgatacctgtaatgttgaatctttcatgttgatatgagcttagttgctacagttttttaacaccatttaaaaaattatcatgctgttactgtcggaacatacaatcctgtatatttttttgctaaggtctatgcaaagccgtaaactgtaaaaatgttactgttggaacatacaatcctgtatagttttttgctaaggtctatgcaaagccgtaaactgtaaaaatgtacccatgaatgtaaatcgtgggttcaagactgaatgtacttatgggcatggtcgagtaacatacaatgctacactgcgcaatagcttcatcgaatctctttagtttgatcaggcatgcagccatattgagatggcatggatttttcacagccaaggccatgtctctgtactttccaaataattgaaacatgaaatcatctcccatgtatgcaatcgcctgtagaagagaacaggtcgactgaaatcagaatatgctgataactacaataatgtccaaagtatagcatgctactaaccatttcatattgctgcatggcctcctcaagcttctttt

SEQ ID NO: 3398 - DNA, 633 bp, Zea mays
gaggcgtgaccgatgtgttggtggttacctcctccgtggggatgctccacagggttcatggccacaccacgcaccttgggccagctgttcctcttcacacggtacttgtggtacgcgttaccagccttgagcatcggcttctcagtcctgcctccaccagcaacctgcccaatcatggcacggcagctgctggggacaatcttcttggcgccagagggcagcttaatcctgaaagaaatgaacagaattaagaatgcagacaaataacaaaaggtcacttggatacactgataaatgaaagacatccaagtaggcaactacattaggacatcaagaaggcattaagagtaggcagacagattaggatacatacaaggtattcaatcagaaaaacactccaactgaaattatattcagctgtaaaatgtaataatccgactgacatcacaatatgagaaacaggttacaatgtcatcaggatatatgatggagatgtgtaaagtagcacaataataatcacgtcatatacaatgtagtcattgcagaacatgcaaacataaggtgtttatttgataatctgcagcaccttgcaaaaaatcagctataaatatctacataaagactaaattttac

SEQ ID NO: 3399 - DNA, 1086 bp, Zea mays
ggcttcatttcaagaaaaggatgggatttagtattcacaatgcttgcactctgtgcactggttgctgctgtgctgttgtcaagtcatgtgaaaacagaaattcctcagatcatccagaagtggagagatcgctcgactaacgcgcagaatggaaatgcaggtaatgactataggcagaagtgttggatatgtcccattctaaatactatcatagttagggttgaaaacggacgggtaaaatcccgtcccgacgcgtaccgttttctacatttgacccaaccgtttcggtatttacggaaaagagagagtttatttcgtccgttttcgtgggaccccgtttttatccggattgaactcgtatttattccatatttgataaatatgggacgatcctaatatgcattatatacattagtatataaactaaagcctcatgtctttaggtgacaaattatagcacaattgaccattgtagtcatcgactcttttcaatgacaagtgatttaaagtcttaaacaacatcaaatatagttaaatgtacactattagcaaccaaacaacaatagaatgttgcctctatatatctatttgttttattctaatgtcatgtcaatcaatcactagtcaaacatcaataccatttctatttatattaaattatgagtttatgttagtatttctgtttccattcgttttcgcaattccgtttatctcgctcccgttttcattcccgactattctggacccgatcctgtttccgacgataaaatgcggatacggaaacgggagggtgatttttccgtccgttttcatccttaatcatagtatcataaaagtttagtgagttggtataattgcgctgatttttctccttgctccatgtctgatagatcctggtgttcagccacttcttgtggacgaaagttgacggggagatctttcggtgcggctcctagcgcgagacagttttgtagtgttgttgtgaggcagtgtgatggttctggagaaaagacaaatcagacgatgacgaggaaacggtttctgtccctaatgcttattgatctgagcaaacaaacatgagcggga

SEQ ID NO: 3400 - DNA, 367 bp, Zea mays
gccttcatcgatcgaccctatgtcatgtaaaaaaaaaggaccaaagtggtggttccttgaagatcatcagttcatcatcctatagtaagctgaatgatgaaagaaaacccctgtacattacatggaaggcagaccggctattggctccattgctccaacgtctgctttggctggcttgcctcgatggaccggatgcagtgaggaatccagccgaacgacagttttgaaggataggaaggggagctggaagcagtcacgcaggcagcctcgccgtgattcatatggaacaagctggagtcagtttctgctgtgccactcactgtttaccttaagattattacctgtgttgttgtcctttgctcgttag

SEQ ID NO: 3401 - DNA, 960 bp, Zea mays
  misc_feature (40)..(41): n is a, c, g, or t
cataccatgagatactcatgaactaataactgaagattannagaacccaatgcattcacgtagaaaatacaaaagaacccaatgcattgactatagaatcaactaaaattcaagctcactatttctaatgttcaagattgtacagtatctcatcatccggatgcaagtagagtacatagcaacatcaccaaacagatgacagcacagaaaaaatgaggcataaataatatggataggggcctaaaagtgaaaatactatgtgaaatacttccagtaagcagacaccaccagagcagcagaatgattacatcctatcaccaaatttcatagtttgtttaatatttttatttacagagttaaattttgaacatttacatagtccatgcataggcaatgcactgcttttctacttacctacacaaaaatcagtagcagcaacatcaattgtcaattttattcttccattatacccagccctctctattgccgcaataacaagatccaggccttcagatatgctaaacattaataaagcaacataaatatggcatattgaaatccatatgttggtcctcaattgtgaaaaaaagaaatgtatgatgtaaaaaaatagtaaattgtttctcacttgcctggaaatatttggagcaaacccaccatgatctccaatgttgcagctgtctgagccacatttctccaagataatatcctgtaaaagtaactagtaagtaaattctacaaaagtgagcaaacctttctggcagtctgaaggcaaagattgtaagggctaagagggcccttaatgtcagtactttgcctcaatgacaaccgacccaaatgaataaatatattatctaaattcagacgggaaaaagagagaaggaatcaggaaggctgagtgcaatattagtttttcattgagcacaatcttattatgtttgatgaacatcttgaacaaag

SEQ ID NO: 3402 - DNA, 418 bp, Zea mays
ttaaattgtaaaactcaacacaaacaacaaagcaactcaaaaactcacttcgttttgacactgacaccgtccgttccagcaatgatcactgaactcgccatgttcaagaacaacccatggtcaacaactccttccagagctgcaatttcctgtcctgctgccaacgcatccttgattggcgtcttgaagtataaatcgacgatgtagtttgagttgtcagtaacatagggcttgtcgccttcaaaccttagctttgcctcgactccttcctccttaaacagttcctgcaatcttacaaggttgtacttccagcagaactgcacaacttccactggcatggctagaccactacctcctaacccatcaactagttttgtctcgtcaacaataacaataaacttgtcagatgctgcctcaa

SEQ ID NO: 3403 - DNA, 287 bp, Zea mays
agcttcgctatcaccggatcccccctctgctccctccgcacctccaatctgcgctctctgttttcttccgcgcaccccggctgttggtgtcccgtccggcagcgttgctggtggctgaatccgagcctttgaggggtctgctgccgccgccgccgccgctgtcaccgctcttgagatctctttcttgatctggagggattaaagagggattcttgccttcctactggagcaagagaaaggggagaacgtgtttcttcaggcgtggttgaacagtgaggaccggtgaa

SEQ ID NO: 3404 - DNA, 603 bp, Zea mays
gctctctgttttcttccgcgcaccccggctgttggtgtcccgtccggcagcgttgctggtggctgaatccgagcctttgaggggtctgctgccgccgccgccgccgctgtcaccgctcttgagatctctttattgatctggagagattaaagagggattcttgccttcctactggagcaagagaaaggggagaacgtgtttcttcaggcgtggttgaacagtgaggaccggagaacaatgcgaggttcgggatttaaggtaactttttcctgttgtgcgatttcaatatgttttaggcgattcttcatctttcttttgattgagttcttcggattcttcaaagttggtgttgtccacactagctttttttgctgaaaatctctgggggaaaggttcgataatcttgccactgtgatctactcatcatcatctaacactttggttctatctccttacagatgttctggctttaggggcagttcttctgaagcaggggacgggcgattcgaccaccggagctcagatctgattacaaaacgttcagaaaacacaaggcgttctcacaccgcctttcacttcttgcttactttggcaaccactcac

SEQ ID NO: 3405 - DNA, 583 bp, Zea mays
caagaagtgaaaggcggtgtgagaacgccttgtgttttctgaacgttttgtaatcagatctgagctccggtggtcgaatcgcccgtcccctgcttcagaagaactgcccctaaagccagaacatctgtaaggagatagaaccaaagtgttagatgatgatgggtagatcacagtggcaagattatcgaacctttcccccagagattttcagcaaagaagctagtgtggacaacaccaactttgaagaatccgaagaactcaatcaaaagaaagatgaagaatcgcctaaaacatatcgaaatcgcgcagcaggaaaaagttaccttaaatcccgaacctcgcattgttctccggtcctcactgttcaaccacgcctgaagaaacacgttctcccctttctcttgctccagtaggaaggcaagaatccctctttaatctctccagatcaataaagagatctcaagagcggtgacagcggcggcggcggcggcagcagacccctcaaaggctcggattcagccaccagcaacgctgccggacgggacaccaacagccggggtgcgcggaagaaaacagagagcgc

SEQ ID NO: 3406 - DNA, 807 bp, Zea mays
ggcaacagcctggtaacctgcaacaaataagatcatgtaggcacatttactgagtaaatcaaggcacagtgaaaaaaaggattcagaaggtgaaacgtgggctcaaacatacaatgaggatcttcggagtgatatcaaggccttgctgcttaatcctcagaagcatctcattctccaaagcacggacctgatccagaatgtacacaacctgcaaagcgatcgcaaatgagaaacctggaaggtgaagtagctaagggcttgtttgggtaatctcaaattggagtggattgaggtggtatgtggtgtattgaagtgtaatataaactaatttttctttcaatcctctttaatacacctcaattcacttcaatccctctatacccaaacaaagcctaaaggaaatagtaatcactaagcttctgtacctgaccgccagtgtcagggtatccaagcacattggactgggcgaagtagccatgaggagacaggataacaacgttgaacatcattggtatagttccaaggaacttctccaagttggcaggatcaggggcctcaagaaggtcaagaagcaagtggagtgtgtcgagtacacgcttcgcagtgtcaccccaacccttctccaaaccaagctcttggaacctaacacagatcatagtggcattataggcagttaatccatttgtcatatttcaaccaaagttccatagcaagtacagaacgttttattgagcattcacctatggttgaactccgagtagggagtgtcttgaggaacactcagtagatactcctctgcctttctca

SEQ ID NO: 3407 - DNA, 400 bp, Zea mays
gtgatatgatataggactgttacaatgaaatatatcgatatacaaattctactttgcatgtgtctaaacgaccccttagtgttcttctacccgtgtctttactacctctgtgctgttcttagctttgtggtttctttgttgagtacaaaatcaaatggtgcatgaacaatcgattagtacttcacattagaaaattaactacatttcccaaaaatgtcttcaaataatatactgtatgcattgctggattttctgttggataaggttctacaaacttggcaagttggcattagggtactcatgcatggtggatactatttatttctttaatctgaagaattttacatttttaaactaatgggccagttatatctagtttgtggcagagggagttgatcca

SEQ ID NO: 3408 - DNA, 475 bp, Zea mays
cgcacccgtggctcaacatgttcgtgccgcgctcgcgcatcgccgacttcgaccgcggcgtgttcaagggcatcctgcagggcaccgacatcgtcggcccgctcatcgtctaccccctcaacaaatccatgtacgtgttgaatcgatcggctagctagctagctaggcacgccccggccggcctctgacgactcgaccggtctttctggggtttggtttttcaggtgggacgacggcatgtcggcggcgacgccgtctgaggacgtgttctacgcggtgtcgctgctcttctcgtcggtggcgcccaacgacctggcgaggctgcaggagcagaacaggaggatcctgcgcttctgcgacctcgccgggatccagtacaagacctacctggcgcggcacacggaccgcagtgactgggtccgccacttcggcgccgccaagtggaatcgcttcgtggagatgaagaacaagtacg

SEQ ID NO: 3409 - DNA, 624 bp, Zea mays
  misc_feature (553)..(557): n is a, c, g, or t
  misc_feature (564)..(570): n is a, c, g, or t
  misc_feature (575)..(580): n is a, c, g, or t
  misc_feature (591)..(595): n is a, c, g, or t
  misc_feature (608)..(611): n is a, c, g, or t
  misc_feature (613)..(621): n is a, c, g, or t
ttcctctccaaaacaattgatacttgttaatgttgaatggattggctggttgctggtggtgttgtgttgtgtgtttctcgttttgtttttctcctttgttaatacaaagaccggcagttatcctgccagattctcttcaaaattaatgtgggatggattctgcagaaggaggcggagtcttacctccctattctgatggcaaaggatggaaagagtttatgcatgcatgacttgctaaattcacaactgtggaccttcaagtataggtgtgagcttgtgaattatttggctttaatgcttgttacattgagcacactgaatccttatatttgatgaacttacttaggaagaatacaatgttatgatgccaagcagcttaaagaacaacctgtggatattagattaattagaaaatcaacacacattagtccttttcatgctttattcttaatgttatcttagcttgaattaaatgctatcaaaattgagtaagatatccagcagatgcagactgcagataagactgtggctttctctgatattgtgccctgannnnnaagtaannnnnnnctagnnnnnnggagaaatcannnnnactacatccaatnnnnannnnnnnnnttg

SEQ ID NO: 3410 - DNA, 454 bp, Zea mays
  misc_feature (13)..(13): n is a, c, g, or t
cgggtgcgagggnaagaacttctacacccggagcgcgttcctgagcgccgtcaaggcgtacccaggcttcgcccatggcgggtcgcaggtgcagggcaagcgcgagatcgccgccttcttcgcgcacgccacgcacgagaccgggcgtaagctggctctatctattaacctcgctcttcagcgcggcgcaggttctttgatttttgacccatcatgctgatcaattttttttttggaaaattttccgctgctgtgtctgtgtccacgggcagatttctgctacatcagcgagatcaacaagagcaacgcctactgcgacccgaccaagaggcagtggccgtgcgccgcggggcagaagtactacgggcgcggcccgctgcagatctcgtggaactacaactacgggcccgcggggagggccatcggcttcgacgggctcggggaccccggcagg

SEQ ID NO: 3411 - DNA, 744 bp, Zea mays
tactcgaagcctcgtagctgatttgtggcatgcacaataagggttaccatatataaaactatagatctgaaatacagtgaaagtttgaaacacaaggagtctacacagaactaagacattttctctttctgtttctgatacaaaacagaaaaaacccctacattctgtactacattatgacactttaaggtgaagaggtttttttttgtctgtcaaaataaatagatgaccgtaccttgttcttctgcgcaacggctgccagctctttcaggatgtactctttgagtccttcaagtttgcagatttcatcaaaagaacccttgtagccattggactctgcccacttcattgtgttttcttggtgtggattgactactgcaactaaacttgatctgaaactgtccccgtatacccagatctagaaaaaaaaatgacaatgttaaatgctggccaatattccctcttaattcagccatatatactatagccgctgaattagtttacttacatcttcaacgagtggagggaagccataaactttctccaggtactcaaccgcaacatactccccttgcgacagcttaaatatgttcttttttctgtcaatcaccttcaagatcccgtctggggtcatctctccaatgtcacctgaaaataagtgtgtttgagcattgtattgtggaaccttgcctacttttttttaaaaaaaacaaaccctcattaaatcgagtattcacctgtatg

SEQ ID NO: 3412 - DNA, 405 bp, Zea mays
acacccgttttttattcgtttttgcaaaattctgaaaaaactagaaaactgttgatagtaatttttgccagtttctcataatccaaaaagaaataaataaaatcatttactgacacccgaatactgtatcaattttggctcggaatctactagattttatagaaattacagacaaaaactcctttttttttaattccgaaactgatctaaagctgctcgctgtactgcactatgcactctctcacctccctttatatttgaccaccgcccctctccaccaagcgcatccacctcgacctccatccctagcgctctcgccccaaagcacgccgcaggcgcagagccatcaccaccatccttccccccctctatctctctctaccccatccctcctctctctcctca

SEQ ID NO: 3413 - DNA, 405 bp, Zea mays
  misc_feature (23)..(23): n is a, c, g, or t
  misc_feature (26)..(28): n is a, c, g, or t
  misc_feature (77)..(77): n is a, c, g, or t
  misc_feature (82)..(83): n is a, c, g, or t
  misc_feature (94)..(94): n is a, c, g, or t
  misc_feature (103)..(103): n is a, c, g, or t
  misc_feature (107)..(107): n is a, c, g, or t
  misc_feature (111)..(111): n is a, c, g, or t
  misc_feature (135)..(135): n is a, c, g, or t
  misc_feature (181)..(182): n is a, c, g, or t
  misc_feature (184)..(191): n is a, c, g, or t
  misc_feature (193)..(193): n is a, c, g, or t
  misc_feature (336)..(343): n is a, c, g, or t
  misc_feature (347)..(347): n is a, c, g, or t
  misc_feature (367)..(367): n is a, c, g, or t
acacccgttttttattcgttttngcnnnattctgaaaaaactagaaaactgttgatagtaatttttgccagtttctnataanncaaaaagaaanaaataaaancatntacngacacccgaatactgtatcaattntggctcggaatctactagattttatagaaattacagacaaaaactnntnnnnnnnnanttccgaaactgatctaaagctgctcgctgtactgcactatgcactctctcacctccctttatatttgaccaccgcccctctccaccaagcgcatccacctcgacctccatccctagcgctctcgccccaaagcacgccgcagnnnnnnnnccancaccaccatccttccccccntctatctctctctaccccatccctcctctctctcctca

SEQ ID NO: 3414 - DNA, 896 bp, Zea mays
atttctcgccacggtctctcatgtttgagattgcgcctgtgtgatgtgaagatctaaatgattgtttcttgctccttgccagcaaatccgtcaagggagttctctggtagcattgggaatgttgcctggaaagagagggttgatggctggaaaatgaagcaggacaaggggacgattcccatgacgaatggcacaagcattgctccctctgagggtcggggtgttggtgatattgatgcatcaactgattacaacatggaagatgccttattgtgagtttcaacaccctccttcagctcactcatgttttacaggatggtatgttgtttagttctaatgttttatttaattagcatggttacattcacaaaaaaggaaaacaaaaacttgagttatttcttctgtgcagatgaagttaagaattggaagtttgcctttatgttcccaaattaatgacttgtttacacttttatggaaggtcacacattgtattctgttattaagacgactacaaaatcaaactgaagggtgtactttagtctagaaagcggaatattatatttatatcctagaattgttaaatgtgcataacttcaactaatgcacaaacctgtcatgctcaaatcactgtaacggtgggcaattgtgtcaatccaaccctttattgctatgttttcttcagcacatatttgaacattaattttgtgccatctgaatttcaggaacgacgaaactcgacagcctctatctaggaaagttccacttccttcctccaggataaatccatacaggatggtcattgtgctgcgattgattgttctaagcatcttcttgcactaccgtatcacaaatcctgtgcgcaatgcatacccattatggcttctatctgttatatg

SEQ ID NO: 3415 - DNA, 675 bp, Zea mays
actgatgctgtataccatgaacatgaccaacaaataaaaaatttcctcattgttcaatgctgtaggtgtatcttttacaaaatgggcgattgaatacgaagagcctgctggtgaagcatttaataaaaatcatccagaggctgtggtctttgtagataactgcaatgtgattctaaagtaagtgcaaattgtttgatgccattattatattttttgttgttgaacagaaccaatatttttggtaatgcagggcgattatggataaatgtggggatactgatgattgtgtttcaacttctgaagctgctgaacaagcagcaaaacttccagaagtgaacattaataatcttccagtccctggcgaagttgaattcataaatggtggtcctccgtgtcaggtttgttattatctacagttctatgtataggccagaaaatcatcagtcacctgttcagttttgtcattcaaatgcttgaattgtttattcttttgttgtcagggattctctgggatgaatagattcaaccaaagcccatggagtaaagttcagtgtgagatgattctagcattcctctcattcgctgagtatttccgtcccagattctttctgttagaaaatgttcggaactttgtttccttcaacaaagggcagaccttccgtttggcagttgcat

SEQ ID NO: 3416 - DNA, 441 bp, Zea mays
cgacgattgcctactactactataaccaaagtctctgttctcatcctctctgagcatcgactaagctacgatctaagagatcccctaacgcgcttccaacgatagatttcgggagatgttctcggccggccggccggccatcgcggcctcactgctgctgcgcgacggcctgccgcatctgcatgaccttcttgtgggagttggagtgcaagcagctcacgaaggtggggctgttggcgggccggtactcgggcagcagcctgccggacttgaacctgacgccgcaggcgttgcacagggtcttgggccccagaggccccgccctccactgcggggtcttggaggacaggcagtgggcgcaccgcttctcttgctggtccgacgacggcggggcgtcgctgctctcgtagcacgtcttcttggccgccttcttcctcttcc

SEQ ID NO: 3417 - DNA, 308 bp, Zea mays
  misc_feature (296)..(303): n is a, c, g, or t
gcaggcgtgctacctgccgtgcaccgccgacgggctgccggtcatcggggagataccaggcgtgaaggggtgctatgtggccacgggccacagctgctggggtatcctcaatggtccggccaccggcgcagccctcgccgagctcatcctcgacggcaagtccaagatcgttgatctggagcctttcagcccggcaaggtttctcaagagaaggagcaggcgtggagtctgaccgtgtgaatgttcagattcaagctcgctaccgaataaaacactcttggttctcccgtttgcannnnnnnntgagt

SEQ ID NO: 3418 - DNA, 469 bp, Zea mays
acatacgcatgcaagacagccccagctggcagctggctccccggagggagcgaaggaatgaatatcatcaggggcacttgggcctggtgcggttgccgtgtccggtggtcatgtcgcggtagcatgggcactcgtccttgttgcccgcggtcccggacggcacgcagttgcaggtggcgcagcagatcccgcagtacttgaggcagtcgtcgtgccggctcgccttggagcacctcaccgcgcacttgccgtcgcagaaccctggtatggtaccccaaaatccaaaggaggaggaagaagtgtgaatagcgccgcccgcccgccctaccgcaccagaaccagaaaacggcgctggcagttacctgatccagccatggagacgcggagggaaggcagcgccaggaggaggacgaggaagaagaggaggccagcaactctggcggtggccgcaggcttcatgttgcccacc

SEQ ID NO: 3419 - DNA, 391 bp, Zea mays
ggacgtccacatgaagggcaaggacctcaggttcatcccgttcggctccggccggaggatctgccccgggatgaacttcggcttcgcgaccatggaggtcatgctggccaatctcatgtaccattttgattgggaggttccgggctctggagcaggggtgtccatggaggagtcctttgggctgactcttcgccggaaggagaagcttctccttgttccaaggattgcttcctgatcatcctccatatctgtaaaacttgtgtcttgctagctgtaccgggaacaagattaaataatgcaaggaataaagtgactctgttcttcgtcagtaactattaaattgtaggagtcctgatgatgaataatgggatgtcgtgatttgttgcaacta

SEQ ID NO: 3420 - DNA, 475 bp, Zea mays
cgagaagttctcgtcgcagacattgtcaggggcagccggcggtgttggcggggttggagacggcctgggagggttcgcgcccttcttcgtcgggtaggacgccatcatcgcgatcccgcacttcccagtgctggcgttgacgttcctctccatacggatgtaaccagcctcgccccacttcgggccccacgagttgcggacgatccagtagtccttcccgttctcggcgccgtagccgaccgcgacgacaccatggtcaaggttcgtggtgcagcttccgctgaagacaccctgacgaaaaaaaaaccaaagacacgttgttaagaacagtacagctgggccacagacacagggctgctagctacggcgaagttcgtttaccgatttgtagagctggaactcccggccaccggcctcaatggcaacgctaactggctggtgagcaaccgccttctgcagcgacttctcgtcgttc

SEQ ID NO: 3421 - DNA, 1009 bp, Zea mays
gtgcgttgtaggtgtgagaacactgcaatgcttggtgagagaaagaactgcaatttgccaggaattgttgtggatcttcctacattgactgagaaagataaagaagatattttgggctggggtgttccaaatgacattgacatgattgctctatcctttgtccgtaaaggatcagatttggtgactgtcagacaggttcttgggcagcatgccaagcgcattaagttgatgtcaaaggttcgtatatactatcactgtcgacctttaaagggttatatcagctatatttctgtccataatttggcacgactccattttttgtttgcatctctcgaatgaaaccttcccatcttaatttttgctgtgaacacatgataaccacatgctatgttatttatcatgtaacatatgaaagtagtatgttgagtacccttttaccaactaggatatactgcttgcccaggctgcaacttcacaagaattttttactttacagttggttagcgaaatgcaattctgttaacttgactctacatttccacctggtaggctgttttactcctaaccgaattctctggaatactggataattcctttattgtaaaaagtgggttctgcctatctgtcaaagctagagaggtcattttccctgattacgaagcacaagaattttttgaattctcaaattgttgagaatagttcatgtcatgcattgcttatttactgcaatgtctgaaatctagatggtttcctgctatactgttgttcgttatttttttggaggtaatccctgcctttatagaacatatgatcgtgtcagttatgctgtcatggatctgatttatttccttaatgatatggttctgctatgcaggttgaaaaccaagagggtgttgtaaactttgatgagatcttgagggagactgatgcttttatggttgctagaggtgatctgggaatggagattccagtcgagaagattttccttgcgcagaagatgatgatctac

SEQ ID NO: 3422 - DNA, 360 bp, Zea mays
ccttgacaaggtgattgggtacatcaagacggagtacaacatcagccatgtgaccattcaggtcgagcgtgaatagagggggagctgtcttttgggctgtcagggcataaatggcgtcacgccttcactggttatcttactctgtcggttaaaacttttttttggcacctgggaaggcatcaggcagccatcggagtcttgatgtgcttgcaagttcatctgtggttcaagctttgatggtcagtagtgttatctgttactactagtctattaggcgggggtaggcgtcaaccagtgtgtacgggtttgattttcggtcatgctgttaacagcattgcggttcgtcgaactggatatgta

SEQ ID NO: 3423 - DNA, 766 bp, Zea mays
tactggtatatgcatatcatacagctgtcgttttcttcgcttgctaccagaaattcgcaagaatcttttgacaaaaccttgtcatcagggggtcaaagcagtaattgccaagagtttcgagaggatccaccgcagcaaccttgtaggaatgggagtgttaccgctgtgtttcaaacctggtgaggatgctgattctctggggctcaccggtcatgagcgctacacgataaggctccctaccaatgtgagcgagatacaaccgggccaagatgtccaggtgctcagtgacactgggaagtcattcacctgcaagctccggattgatacaatggtgagttcttcggtaaaaggatgtggaactggtagtttcagtaaaatgacatattggttggctgaaatgttcacagcgtagtggtcactactactgaatactgcaataaagtttctgggcattacatttcatgattgcaagcacatacaccaattggattttgttcatcttgtgagatgaattaatgcctttccaaataccaaccttcaagcctagcaccaatcaaatttattgattttaaagtgggttgtgtaacgaatttattcacatgaattgtgtaacgaataacaaaagattgggttttgtaggtggagctggcttacttcgatcatggcgggatccttcactacgttttgaggaacctggtgaggcagcaacagcagtaaaacgctaaaaccgcatgcaaacatgtgaatatcttgtctgtttcgaaaa

SEQ ID NO: 3424 - DNA, 195 bp, Zea mays
aacctcaagcaaagtaaataataatacataaatacacattgacatttttgaaatgaaacatatcgtttttttgggggtgggggcaaacaaacaaaaatcagctggttggaccaattcgcactacgcgacagtggtatggatgcacaaggatgcagaagaaacgattaaaagtggaacactgaggaaaaaaaaaaa

SEQ ID NO: 3425 - DNA, 194 bp, Zea mays
tctcgtcctctttctagcaatggagtatgctgtgcacacttcactcagttccatcgatcgcgaacggtaattaacgtagacaaaaccacaagtgcaaaatatgaaacgctagtaatagtagtataataatatagttttgcatggaactcggtcgcgcgccatgcgtagcgtagttgcgctttcgctctagcaat

SEQ ID NO: 3426 - DNA, 196 bp, Zea mays
cgatcgagttccatgcaaaactatattattatactactattactagcgtttcatattttgcacttgtggttttgtctacgttaattaccgttcgcgatcgatggaactgagtgaagtgtgcacagcatactccattggtagaaagaggacgagatatgtgaaaacgcctgatggctgatggcaaattatatggaga

SEQ ID NO: 3427 - DNA, 414 bp, Zea mays
tatattcaatttgaagtgataaataatctcacagattgacaccaatactttcaacccaacctgggttttcatttggagtcacaactcagaactccatccgtacgtagctagctagacgattcgttgattcatttatgctgattatagttcagtttagaacttggaaagcagcttccccattgctgatgaactgaacccagcttatttttttttcgaatttatttagagccttctccgaatcattcttcttcttctgagtcttcatcaaatcctggatttggccataacttgcaggccactgctcccagttgcgggccgtggatccttgaactgctcttcagtaactcctgtaaacaaaacaacatcaaaactgtgtacgaacgatgatttattttttttccaaacaaaaaaaaa

SEQ ID NO: 3428 - DNA, 485 bp, Zea mays
actcgaattctttgatttactaatcaatgtgaattcaatgaagcactcaataccttctgtatccacctttctacatgcagatcctgcaaatgctttaatcattactcagtgtggtggaatcccattggttatacaatgcttatcgagcccagtgcggaatactgtaagtatttctgaagctaatgacactataatattagtgcctctaaattccgtacatgtagtcctcatgcgaacaattccccctttgatgattgcacggcaggtgacttatgcgcttggggctttgtattacctttgtaacccttcgacaaagaaggagatcctgaaaccagatgtagttagtactataagagagtatgcttcagctggaactgtgaataacaactttagcaatctggctaatgctttcttggagaaacatgttgatccatgatatgacaattttacagggtagactaaagcttacacatttcgtgtacctg

SEQ ID NO: 3429 - DNA, 594 bp, Zea mays
agaggggccgcaaagctaggcctaacttgaaggttggtcttgggatctgtgggtatcgcttcgtttgcttagaaaccatggtttgattgtttttggtgttgtctgtcaacaggtgggcatttgtggagaacatggtggagagccttcatcggttgctttcttcgccaagactgggctggattacgtttcttgctcccctttcaggttggtaattcatgattcaatccaagattgctaggctatgttagcggtagcaaaatcttaactgttttttttaatatatatgaaatacctcctgcagggtcccgatcgctaggctagctgcagctcaggtgcttgtctgagggtgcctctgctcgttggcagccggatcgcctgctgttggtgcatctggtgattaataatactactatgacagagccatatgctctgtgaagagtattagtagcagcgctcataaaagctacagttccatctattttctcagctatgtaaaacttccaaactgttcatgcttaaaactgagggttttcgtggtgtgagatgtgcatgtcgttgttgaggccattgctgcacattccacctattgaggcc

SEQ ID NO: 3430 - DNA, 681 bp, Zea mays
gttccagcagacaccgtaatgttccataaccaatattggtgagtgtcctactttgcggtttttatctacgggcaagcattgctttcagatgtaatccgcatgccagtctgactatattactaagggtggtaatgagacctgaattttacactataaaacttaaggatcagatcgtatttagatcaggctctatttttgtttatttttgaactaaaattaattaagggctcaaacgaatcatgaagatcgtgatccattaccaccgtccactaactataacctttcacaatttgcaattgtgtgtttccttagctctcttaactgttgttgcatgccgtccattctgactgaattggcgactgtttggtgcacaggacgagcagcacgcgccgcaggaggctgaagaagaaccatctccatctcgaggaccttgaggatttgatctccctattatagaaaaccgggttcgcaggacgcatgaactgtgtgtgggggaataatcgcaggttagcactgttgctagtgtgcccgcctctcttggaatggaagcagcagagccagctatctgctatcagactggcagtgaccaccacctcctcagctacctggttgcatgccacagatctgaaattctgaaatgctgtgactgtgactgtgaggtatgaaaaaacagtgtaaata

SEQ ID NO: 3431 - DNA, 802 bp, Zea mays
atgtagacaacctgcaggtggaatacagattgatcagagcgacttcagtgtttcttttaactgtgtatccgtgcctgagtggctaaggagagtacctggcctccggtgtcagggtaacccaagacattagcttgagcgaagtaaccatgaggggagaggataacgacattgaacaccatggggatcgttccaaggaacttctccagggtggacggatctggggcctccaggaggtccaagaggaggtggatagtctcctgtgcacgcttagcgcaatcaccccaacccttctccagaccaagttcctggaacctgtttttgtccagtcaggattatgtgttaaatcgcaagagtactagtacatgcttcagttgctttagtatatgtaaacgagtcaacaaaaagtattcagtacctgtggtgaaattcagagtatggggtatcagcttgtagggtggacaggtgctcctcagccttcctcagcgcaccttgcagagcactgagactgcggattctgtcgttcaacatcatggtctgtagggaaccatagaatttcagatttttccagctagttcaaagccaatttacaactaccacagcaggaatatatggataaatagtttaaggtgtccttgtggttaaaaattttagacagctcagcaactcattatttatcgggtatgcatcacaggtcagccttaatgatacaaaatttccactttgctaacacccttttgacaacttctagacaatatcgatgacatttaagtaaagaaacagataaaacaatggctcaccatcc

SEQ ID NO: 3432 - DNA, 573 bp, Zea mays
ggacgctatcaagatgcgatgaacatactcgggcctcagggccgagaactcgacttgctgattgttatactgcctgacaataatggttctctttacggtatgttttcttccaaaaggcttgggcatttgctcaatgaataagctttgctattaatattcttctcattcttcaggggatgtcaaaaggatctgtgagactaatcttggattggtctcccaatgctgtctgactaaacatgttttcaaggtgaacaagcagcagtatcttgcaaatgttgccctgaaaataaatgtgaaggtatgtagttgcgctaactcttctaatcttgattttaacaccgattctcctcttaaagttatcatacttttaaggttgggggaaggaatactgtgcttgttgatgctttggcaaggagaatcccccttgtcagtgacatagcgactattatctttggtgctgatgtgacccatccccatcctggggaagattctagtccttccattgcagctgtaagtgaagacctatcctgacaaagaaatgctacctttcagttgaagttttaccattttttt

SEQ ID NO: 3433 - DNA, 412 bp, Zea mays
cgttagccatgcgtgcttttcccgccttcaccggaaaacttagagaaattcgatatcctagttccctgcggatatggcatagtgtcaaataggtgattatacgttagccatgcgtgctttttatttcattattatctgcggttacatttattaaagatatcacaggcggtccatcgttgcgtgtgcagcaacaaactccaaaacttacaataagatgcatgccatttgtacgacgacgacgacgacactcatttgggaattctaggaacaaggtaaagtttctgcgtccggcgaagcgtcatcccgaactggtattaagtttaggggtgaaaacctcaggtcgtcgaacattattgtgtcggctttcctcatagggatgcccaaaatgtgtgttaagcgtcatcccgaactg

SEQ ID NO: 3434 - DNA, 877 bp, Zea mays
acttgcttcagccgatcactctgttaaaaacaggcacagacaagaagatttatagacttgtatgagtattgaaggaaaataatagacattgaggagtaatattcattagacaaataaagaggatttgaacaagtgatgctgaccttctccttctgaagggattgcagctctttcgttagctcctccagctttcttaatgacagatcagactgatccacaggaattctaaagggtacaaaatctgcaggcctgatttcagatgcaaccttcttaatttgctcgatcacatcaacaaattggtcccatctttcaactttcttctttctcatctcctccaagtatgggacaatcgcattcaattcttcccttaaaccttgtaacttctgatttgactgccatttgaaagaaaacaaattattgatggagtcactactgaaacattcagtcttcataacagaatgcatgcagttcctgaccttaataccgcacaattttgttcggttactcccttaaaccattcaagttcttactctactaacatttttcactacagagggtaagaattaccagtagatcacactacagttatttttgtaagccttcaatatagcagagtacaagtaacctgcacatctagccaatagctatcacactatcacagccctaaagttgcaatgacaaaaaagatcatgagagaaaattctgtagaatatctttctgcagtacagcagtagtactcaaatgttacttgtttctttcatggtatatgatacttcaaagcacagaaactaacctgtctaacatgtatcggtggctcgcccatggccgagcatatgccagcgagctcggcctctgcctccgcaatggcctgccgcaa

SEQ ID NO: 3435 - DNA, 195 bp, Zea mays
gagccatggcgagcgagcacgcggcggggggcgaggctaagcatgaccagaagcagagcctgatggacaaggcgaaggggttcgttgtggagaagatcgcgcacatccccaagcccgaggcgacgctggacggcgtgacgttcaagggcctgagccgggagtgcatcacgctgcacagcagcgtgaacgtgtcca

SEQ ID NO: 3436 - DNA, 1052 bp, Zea mays
gcagtgttctgttccatatagatcgacgactgcatgcgagccaaatattggccacgcgacccacgacggagcaccagctcagctggcatggtccagtgtcgccacctccagcaaggcagcaagagcaggccggccggggaacgatcacttgatgaggatgcatctggtcggtgcaccctcggctccgaccagcctgagaggtagacagtgcagcatgtatatccccgcctcgatgtcgtccagattcaggctctcaacagggattatatcctggtgtaattaatagagggaaaccaatcagggtttgtacacatgagatgagttgagggggattatggtgtaaattaaactaatttacatctgaaatctcttcaatccatgtgtattgtgataaatactagagtatcaaaacatagtctcagtggtttggatcctcatgtggggaaacttttaggggtagaatatgcaacaggatgcagacaaagttatcagcgaactatgggttagtttgggagctataaaaccggaaaaaaaatatgtgtgtgtgtcttaccggggttttgaaaaagaccacgtgggcagagatcaggtgatcaaatgatgccactgacagaccgtcaactcctgcacaattgacagtaccagtattttggcgtcattacataacaaactgaaagtctgttacgcctcgtttcgatcattggaatcgaattccattctaataatagtaatttagatatatatcaattaagctaattcagttttatgcaaaatatatttgtatactattattaacaagatgtcggatatatttatgtattatatttttattataaagaagtgatatgaatagtgtcatgtaagttacagactagaaacaaattctataaatgcataaaatcatttttcatttttcactccattaatttatgaatttgagataggcttatatctgaactttggaaagtggtggaatgccaaatttcaaactaaataagttattttattgagtgaatttcaattctcaaaaaatgaagggatacaaacggacc

SEQ ID NO: 3437 - DNA, 384 bp, Zea mays
gaggcgcgcggggaggcagggtgggactacaacggcggcgaggaggaggattatgcggcggcgctgctgtgggacgagccggagcccttcttctggtttgatgtcttcctcaagtgatggccagcgcacgacgctgcatgccagcaattcgaatcctgcatggttggtttggagtttcggagtgacggcagctcatgctcctgcatctgcatgcatgtgttgggcagtaagcaagcaagaaaggtagataggcttgctagctagggtttctgactcctttgtactaaattatctttatattttttttatcttatccttcttttttccctgagggtgtgattgaggtatagtaatgtgaggtggtattactggtgggaggattta

SEQ ID NO: 3438 - DNA, 183 bp, Zea mays
cgcgcacacacttgacaatcacaagaggggggggaaaagaagctccctagctaagctagaaagacgggtatatatctggtggcaatggtcacctcacctagggctgctctgcatgctcggggtcaggatcagccacacacgtacgtacgtacacgcttctattgtctccaatcacatcaccgg

SEQ ID NO: 3439 - DNA, 608 bp, Zea mays
gtgagcgtcttgctaaaagtggctccacaggtgatcgcttgaaggaaactcaggtgggtgtttgcttaccatagatttccaatattccaagcattctataatgttatattcaaattacttttaatgctccagtcaatcaataaaagcttgtcggctttgagcgatgtaatcttcgcgatcgcaaaaggagatgaccacgttccgttcagaaattcaaaacttacatacctattgcaggttagtgatccgtgcatgtctatgcagagttgaatgttgtagtccattttagacaatctcagctatatcttcactttgcagccttgccttggaggtgactcgaaagctctcatgtttgtcaacatttcaccggaggcatcctccgttggtgagacgatatgctcgttgaggtttgcttcaagggtgaatgcttgtgagattggaataccaagacgtcacacataagcccgtcccttcgttctaggctgaattatgggtgaaggtagctgtagggatcatggtaatgtgatatataatgtgttggtttgtgccgcatttggccacaaaggtgatgcccaacagaattcttgtaacttgtacagtgtaggtga

SEQ ID NO: 3440 - DNA, 367 bp, Zea mays
  misc_feature (352)..(357): n is a, c, g, or t
gaatgcttgccattccggggctcattgcccctagcgaattgcaagacgagatggtagattcgtagtgttccttgttttgattctgctttctctaatgtagcttcctgtttgttggtccggcatcggaatacctctggagccctcgacgtccaagttttcttccagggtggtgaaagaaggtgcctgctgtaattttatttttggttacctccacatgatgctgattccaagatttgtggttgtagacagtcagttttgccgcatgactgctgctgggggtctctcagcagctgtggttgcctggatgtgttagcagcggctcttgtgctcggtgtactttgctaacattggnnnnnntactttgccc

SEQ ID NO: 3441 - DNA, 357 bp, Zea mays
tcgccttcctgcaaaacccgaatcagcactaaatcgagcgggggcggccaaccgcgcgcagcaatgaacaagtacatggggagggagggcgcctcacatgtcgagcaggacgtcctcgtcctcctcgccggtggtgacggctacctcctcaagccgcacgatgggagccacctgggcgcccgtgtcctcctcctcccccgcggcggcggcggctgaggcgtcctcctcctcctcacccgcctctggccgctccacgacaggctccttgtccgccatgaggtgggtgatcgcggcgcgattcgattcgaacttcgaagaggatgcgacggcggggcaagggaggaattctccggaagc

SEQ ID NO: 3442 - DNA, 424 bp, Zea mays
tttctttgttacagaagtgttcaaggcttttcaagttctcccctagaaaaaagggtgagcagtcatcagaacaaccatcagagaggaatatatcttttggtgcaagactcgaggaagcaacacagagcgatggagattatgtgccaactcctgtctatgagatagcccacgattctttcaatgcagaggatgagctcccttctgacggtgaaaccagggagaatgaagagtctgaaaggcatgacatagctgataatgcccagatggagtcttctgttggtgtagcagataacagtatagatattctcggtactaagtcatttgatggtgctaacgacatggcagttgaagcaactattgtctctgttgatcaaaatggcgaggactctgtagttcctgctgaagcaggtgtagagcctgaaac

SEQ ID NO: 3443 - DNA, 516 bp, Zea mays
ctgcaggcaacgacagtggctgcaaccttgccggccggcgaggcgagacgagacgactgatcgggcagcttgcatgtcgctagttgggtatctccctcccggcaagccgacggcgggcggattattgccgctgacgtctgacggtgatacatggccgatcaagaagacaagaacgaaaacaaattcaaatacagtagaatagagaatagatccacatttattcttcgctatatatatatagctggccgtcgtcgtcgatcaggcgccactaatggtccggccgccgtcgacgaagatgacctgcccggtgacgtaggacgccgccggcatgcagaggaacgacaccagggacgccacctcctccggctcgccggtccgccgcagcgggatgcgtgaccgctcctgctccaccaacgccgccggtagctctttacccatgtccgtcatgatcacgcccggcgcgacgcagttcacacggatcctatcgcaggcccactccacagctagacttctcgt

SEQ ID NO: 3444 - DNA, 361 bp, Zea mays
ggccgtatctggaaggagcagcagaatcctgactcaggagcctgcattcccaatttgttcagctgagctcagtaacaagaggatggatccaggtgtatattgatacggccgatgtgtttgtgtgagcgtgtgcctgtgctttgcgttttgtcctgccaagctgccattgcagcccgccctaaattagtcagggcgtatttactgttggcaggataatgaaaatactggcttactccttttgtgggctgtgactaagctcccatgaatctcacgataagcatttttctcgatccaatggtgtatactgtatcgttttgggctgaaggctgcagcttttttgctgttatgtttgtctcggtgt

SEQ ID NO: 3445 - DNA, 933 bp, Zea mays
gaggaccaagcaatcactggctgacgtttttcactttccgctcggtctgacttggaaggcttcttaagctccgaagcaaccgatgagcttcttaggagcgtggccggtggcccggtacttggcagccatctcctcggccttcaggacctcctcaccgcgttttgcctccaccatcgctcgcttctcttcggcttccttgtgtatcattgcaaccttgttcttcatcttctctgcatattcagccttcttcttttccagttgttcctgaacatgaataaaccatataagctgtagctaagaggatatcaccttttagggggggaggggggtggcatattagttccactggatctattcttttccaaattcctctataattgattaattgttatcggtggctcaagtctctattaaaatatgggacagacttaaactagtaagtgcacagacgataaaaaaagagtattccttcaatgacatacctcaatcttcttcagttcagcttctatgtttgctttctttgtgttttcccatgaaagaatagcggatactttcttagcagccctgtcacagttatgcccattaattcaagttaggaatttccacatctcctgcctatggtttatatcaacttctattggatattgagaatctaaatatgatatcttccaattgacatactatgttatcctgtttgcccttatggctttttctcgttttagtttgaactgagcagaattttatatccacactgccctggctgtaatgctagaaatatcatccacagaaaccagtattaaacttccaatttgctttgatgaaagaattatagatgactgaagaaagcattgcaaaaattgcatctactgcaacagacaaataatggtttcactgaagacgatttcaggggaatcggaaaaggtgagaaacata

SEQ ID NO: 3446 - DNA, 267 bp, Zea mays
ccaccgacggcggcgagagtatatatacacacacacctgacgcctctgctgctgctgggatcaacgcggcagcttagtgacgacgacgactcttctgtctctgcgttgattaatggacagtaacagatccatggcgacgagcggcgtggctccgttcgtggccaagacgtaccgcatggtggatgacccggcgaccgacggcgtggtcgcgtggggcagggacaacaacagcttcgtcgtggccgaccccttcgccttctcgcagac

SEQ ID NO: 3447 - DNA, 650 bp, Zea mays
  misc_feature (629)..(639): n is a, c, g, or t
cgcgcgggcccttcccttcggagcagtcagcgtgagagatggggaggcagccgtgctgcgacaaggttggcgtgaagaagggcccgtggacggcggaggaggaccagaagctcgtcggcttcctcctcacccacggtcactgctgctggcgcgtcgtccccaagctcgcaggtgagaatttcccgtcaccatgtatgcatgcgatgcgatgtgtgtgactgctgggcggtcgtttctgcttcgcggcgctccggttgcctgaccttgactggcatcgtgtgtgtgtgtgcatggttcgtgcgctgcagggttgctgaggtgcgggaagagctgcaggctgcggtggaccaactacctgaggccggacctcaagaggggcctgctctccgacgacgaggagaggctcgtcatcgacctgcacgcgcagctcgggaacaggtgcgtgcgtgcgtgacttgttggactgcgaaattctccatggttttcttgggctctcttctccatcaagcggcctcgggtcgggtctcatgcgacgcggacggactggtcctctgttttcacgcgcctcacaccgcacgacgcaggtggtccaagatcgcggcgcagctaccgggcaggacggacaacgnnnnnnnnnnncactggaacac

SEQ ID NO: 3448 - DNA, 650 bp, Zea mays
  misc_feature (26)..(26): n is a, c, g, or t
  misc_feature (186)..(186): n is a, c, g, or t
  misc_feature (196)..(196): n is a, c, g, or t
  misc_feature (245)..(245): n is a, c, g, or t
  misc_feature (257)..(257): n is a, c, g, or t
  misc_feature (508)..(508): n is a, c, g, or t
  misc_feature (519)..(520): n is a, c, g, or t
  misc_feature (523)..(524): n is a, c, g, or t
  misc_feature (528)..(535): n is a, c, g, or t
  misc_feature (538)..(546): n is a, c, g, or t
  misc_feature (548)..(549): n is a, c, g, or t
  misc_feature (551)..(553): n is a, c, g, or t
  misc_feature (555)..(562): n is a, c, g, or t
  misc_feature (564)..(569): n is a, c, g, or t
  misc_feature (571)..(573): n is a, c, g, or t
  misc_feature (576)..(579): n is a, c, g, or t
  misc_feature (629)..(639): n is a, c, g, or t
cgcgcgggcccttcccttcggagcantcagcgtgagagatggggaggcagccgtgctgcgacaaggttggcgtgaagaagggcccgtggacggcggaggaggaccagaagctcgtcggcttcctcctcacccacggtcactgctgctggcgcgtcgtccccaagctcgcaggtgagaatttcccgncaccatgtangcatgcgatgcgatgtgtgtgactgctgggcggtcgtttctgcttcgcngcgctccggttncctgaccttgactggcatcgtgtgtgtgtgtgcatggttcgtgcgctgcagggttgctgaggtgcgggaagagctgcaggctgcggtggaccaactacctgaggccggacctcaagaggggcctgctctccgacgacgaggagaggctcgtcatcgacctgcacgcgcagctcgggaacaggtgcgtgcgtgcgtgacttgttggactgcgaaattctccatggttttcttgggctctcttctccatcaancggcctcgggnnggnnctcnnnnnnnncgnnnnnnnnngnncnnngnnnnnnnncnnnnnncnnngcnnnncgcaggtggtccaagatcgcggcgcagctaccgggcaggacggacaacgnnnnnnnnnnncactggaacac

SEQ ID NO: 3449 - DNA, 909 bp, Zea mays
  misc_feature (898)..(902): n is a, c, g, or t
tgatttgtatgaattcaattactctgtatgcgcatcatcttcatatatctatatctgctagattattgtatgacaccccttcctgttgctcactggaacatgtttgtacctcaacttgggagatatttttgtacggctaggccttattctaagaaaacatcaatttaaatgtgggacagagagtttaaggtaaatgaaaatttgaatatcctgttgacttgacacatcattcatttgtgcctagataaaaaggaacgccttcgacttatctactactactacaaacacaaatttcttttcttgaactctacctaccgtttattgatctgatccttttacttgttctattatgaatctgaatttggaactctacctaccgtctattatgaatctaaatcgcttttcaatcattggaaaattctatatatttacgtgcgcacacgacttgcaaagatgatattggtctctgctgcaggacgagtcccaagatctctacaaaaggcagcagctcagggagctggcaatgctgaactcaaccctgagagaggacagccctcatccggggagtgtctctccattcagcaacggtggcatgaagcgtgcgaaaacaggacagtagagaaaacaactatgctcccatatctggccccgtcgtcatgggaacgccatgggcatgccgcatgcgtgaaggaaggccatgcgccttcgctggcggagtccggtatcttctgctagctttcacctccggacaggggaaagatgagatgagatgagatgagatagtcgcggacccttggttggatccggcgttggttgttgtatggtctagaacattcgttctatttgttattgacggttaaccctagtatgttggtgagctgcaacctgcaaactgcannnnnaactagc

SEQ ID NO: 3450 - DNA, 909 bp, Zea mays
  misc_feature (273)..(276): n is a, c, g, or t
  misc_feature (278)..(282): n is a, c, g, or t
  misc_feature (284)..(291): n is a, c, g, or t
  misc_feature (294)..(300): n is a, c, g, or t
  misc_feature (303)..(303): n is a, c, g, or t
  misc_feature (306)..(306): n is a, c, g, or t
  misc_feature (308)..(310): n is a, c, g, or t
  misc_feature (312)..(320): n is a, c, g, or t
  misc_feature (323)..(329): n is a, c, g, or t
  misc_feature (332)..(336): n is a, c, g, or t
  misc_feature (339)..(344): n is a, c, g, or t
  misc_feature (348)..(350): n is a, c, g, or t
  misc_feature (352)..(369): n is a, c, g, or t
  misc_feature (372)..(393): n is a, c, g, or t
  misc_feature (562)..(562): n is a, c, g, or t
  misc_feature (566)..(566): n is a, c, g, or t
  misc_feature (749)..(749): n is a, c, g, or t
  misc_feature (760)..(765): n is a, c, g, or t
  misc_feature (777)..(781): n is a, c, g, or t
  misc_feature (837)..(837): n is a, c, g, or t
  misc_feature (898)..(902): n is a, c, g, or t
tgatttgtatgaattcaattactctgtatgcgcatcatcttcatatatctatatctgctagattattgtatgacaccccttcctgttgctcactggaacatgtttgtacctcaacttgggagatatttttgtacggctaggccttattctaagaaaacatcaatttaaatgtgggacagagagtttaaggtaaatgaaaatttgaatatcctgttgacttgacacatcattcatttgtgcctagataaaaaggaacgccttcgacttatctannnntnnnnnannnnnnnnttnnnnnnnttnaantnnncnnnnnnnnnatnnnnnnnatnnnnntannnnnnctannntnnnnnnnnnnnnnnnnnnctnnnnnnnnnnnnnnnnnnnnnnaaatcgcttttcaatcattggaaaattctatatatttacgtgcgcacacgacttgcaaagatgatattggtctctgctgcaggacgagtcccaagatctctacaaaaggcagcagctcagggagctggcaatgctgaactcaaccctgagagaggacagccctcatccngggngtgtctctccattcagcaacggtggcatgaagcgtgcgaaaacaggacagtagagaaaacaactatgctcccatatctggccccgtcgtcatgggaacgccatgggcatgccgcatgcgtgaaggaaggccatgcgccttcgctggcggagtccggtatcttctgctagctttcacctccggncaggggaaagnnnnnntgagatgagatnnnnnagtcgcggacccttggttggatccggcgttggttgttgtatggtctagaacattcnttctatttgttattgacggttaaccctagtatgttggtgagctgcaacctgcaaactgcannnnnaactagc

SEQ ID NO: 3451 - DNA, 571 bp, Zea mays
ggcgctgtctcgacgcatggcggctcccgtcctcgtcctcatgctcctcctcgtcgccacaggtgcccgactcaactcctcgttgctcgtcagtgctgcttgagtgacccttcaaagtaaagttcacagtaatgcgacgcgcttggtgttgtaaacttgtgatgcttaatttgagtgtggccggccggtgcagagctggggacgaccaaggtggcggaggcgaggcactgcctgtcgcagagccaccggttcaagggcctgtgcatgagcagcaacaactgcgccaacgtgtgccagaccgagaacttccccggcggcgagtgcaaggcggagggcgccacgcgcaagtgcttctgcaagaagatatgctagtagtagcctcggctttgcttgctggcacaagcaggtcgtcggcacgcaacgcaattcaagcatcatatcggtcctcctcccgcgttgctgtctactcgaccccgttttctctttcgatcgatttcgttgtttcctgttgttttcttcttttcccgcgaataataagctccatgggatctcactgttgtactttctgcat

SEQ ID NO: 3452 - DNA, 450 bp, Zea mays
ctgcctcccattccaccaacacctccaactccaacagatcaatccgtcaactttgctggccaaccctgtacataattacacggatgataatgcccatcacatcctggatcatcatcctctgttgcacagctcaaggcagcatggatcatcttgtccggacgaacccaaccatgttaatctgatctccatgtgttcggcttcggccaccttcaaccaactcctcagattaacttgtaggatgttttttcacatgatgctgcatccagggtcctgttcttgctgcgggtacgctgcaggataggagtaggcggcggggtagggcggcatggcgttgtactgctggtaggcggcagggtacgagaccgacggcatcgcctggtaatggccgccgtagcccccaccgccgccactgctcttgccgccgctgctctctttgctctccttgccctc

SEQ ID NO: 3453 - DNA, 904 bp, Zea mays
ctggtctggatagcagattttggacaaacttgtcacttcttcatttcaaaatacaatcagacaaaaaaacgaaagcgtacatactggaactcaccagctcaggggccaacttttccggagtaatctttgcagctgaaagaagtacaccacgagcatcagatcacagaaacacaaaaagttgtatttgcatgccaatggtttcggtagtgaatgaaagcgtacgtgactgtgattggaagctcttgttgtaactcccggtctccttgaacagctgctcgaaatgggtcttgcagtacggcactccttcgaacgaggaatagttgctcagctgtcaaaggcgaaaaggatgaagacggagattgtcagacctcgcacagctgcttatctttgcctagacatcgacaggtcgtcctaagtagaagatcagataagagtgtccatttgcatggattccctgcccaatcctctttcaccaagttagcgaatgggaaacggacaaagtcatgacctctcctgggcgtagaatttttcctggtactaggaaactcgcaccagatctgttcgctgcggcaattcgcagatctactacccgatgctacattgcatcaccctacagatccatccacctacccattagaagagagaagagcatgggcaaggcaaagggaacgtactgagagggtagacttgcagtgctggcacttgaagcaggagcggtggaagacgacgccgtcggtggagagctggtccatcgggtacaccgtcttggtgcacaccttgcacttctgctgcgtcccgctaaacatcttcctcccgagcaccggtcaaccccccccttcggtctctgtctcacggcggccggcgagatctgagaggccgccgatccggccttggcctgcgcgcg

SEQ ID NO: 3454 - DNA, 929 bp, Zea mays
  misc_feature (33)..(33): n is a, c, g, or t
  misc_feature (45)..(45): n is a, c, g, or t
caaatcatgaggactcctttttctcttccgcgncctcctcaaatntctctccagggacaagctcaggaacgtcatcatcatcgtcctgaacagccccagcgctggcaccagcctctgcaccagaagcaccagaggcctgcttctggaattgctctgcgagcctccgcagattgtccaggttgtcaggacctgaaccggaggaacagtcgaaggtaaaacaaaatcatttatagtacagcatagttatggagctcacaagtcataattatatataagatttcagtgattctcaagtactgtgtagcaaaaaggatgggatcaagaacacaaaaggagatatatctaataatataggttttgaattcaataggtatacatgagtaaagagaaacataccaagctggttgataatcgacggaagcagatcttgcagctctgttcaaataagaaaaatgcttcataagaatactgttgtgctgttgtgcaaatctagctcaagagaaattttctccctgaaaattcaaattgacaaaagccatgcataaccaaagcaccagctgccagtgtgacaggattataggacatcattactacctagttaagtagaaagccagcacaacggaatgaataatattatgccatcaataatattatgccattaagagcatcttaacagaagctagttaagcagataatgcaagtcatgagaacatactctttgtctgtggagttccactgaccacccatgtattagcaccaattgacgcttgcactggaggggaacccacaaaatatttttagaaataagtgaagtactaatcttgttgagtactggagtccggagtatcatacctttaggatttacaaactgaataacaacatcatccttaaagatgttgacctcttcaataccaggaatgctgttcact

SEQ ID NO: 3455 - DNA, 400 bp, Zea mays
gtgagaagactagcccgcctccaaaatctgaaagagaaagactagagagatttggagctttgctctctagcactttgagggccgagcatccaaaaatattaaggctgttgagacgctgcagggcagaaggtatcttgaggcaaacgatcttgtcacaacatactagctctaattcctccagagcaagggagttggaaaggaggcgctttaacccattccatttaatgctcacaaaggacaaatgtaaacttgttaggcttctcatgggggcaagttcaactgtgggacggagagcacaacaacgaagtttaaggtaccgaagtgaatttcgaaccccatcagataaaagtgagcatgggaattcatatattctccttgtatggaacaaccagagggtgac

SEQ ID NO: 3456 - DNA, 816 bp, Zea mays
  misc_feature (380)..(382): n is a, c, g, or t
  misc_feature (391)..(402): n is a, c, g, or t
  misc_feature (405)..(407): n is a, c, g, or t
  misc_feature (409)..(410): n is a, c, g, or t
  misc_feature (412)..(413): n is a, c, g, or t
  misc_feature (415)..(426): n is a, c, g, or t
  misc_feature (428)..(433): n is a, c, g, or t
  misc_feature (435)..(435): n is a, c, g, or t
  misc_feature (438)..(442): n is a, c, g, or t
  misc_feature (445)..(452): n is a, c, g, or t
  misc_feature (454)..(455): n is a, c, g, or t
  misc_feature (457)..(461): n is a, c, g, or t
  misc_feature (463)..(463): n is a, c, g, or t
  misc_feature (465)..(465): n is a, c, g, or t
  misc_feature (467)..(467): n is a, c, g, or t
  misc_feature (470)..(479): n is a, c, g, or t
  misc_feature (481)..(481): n is a, c, g, or t
  misc_feature (485)..(488): n is a, c, g, or t
  misc_feature (490)..(525): n is a, c, g, or t
  misc_feature (527)..(532): n is a, c, g, or t
  misc_feature (536)..(556): n is a, c, g, or t
  misc_feature (558)..(560): n is a, c, g, or t
  misc_feature (562)..(565): n is a, c, g, or t
  misc_feature (567)..(587): n is a, c, g, or t
  misc_feature (589)..(636): n is a, c, g, or t
  misc_feature (638)..(638): n is a, c, g, or t
  misc_feature (640)..(648): n is a, c, g, or t
  misc_feature (650)..(693): n is a, c, g, or t
  misc_feature (696)..(706): n is a, c, g, or t
  misc_feature (708)..(771): n is a, c, g, or t
  misc_feature (773)..(773): n is a, c, g, or t
  misc_feature (775)..(775): n is a, c, g, or t
  misc_feature (777)..(813): n is a, c, g, or t
gcgccgcagcgcagcttccgccgctgacgacgcacactggccgcgggcgcgagacattgtccggccgtgtcacgcacgcccgcgtcctcctcctcctccgccgccgcgtaacgcacggccacgacgtgtccgtggtcgtaagtgctgtgtctgtgtgtaccaataaataagccccgttttgcttcgtccagaacggtccagtgctacgtgtagtgtatctgtgttgtgatttgcgaattggattattgtgggtcgtctcgtcgaggtctctcgggtgtcgggtgggtctgatgcgatccatcagcgtcgtgtccgaataaaagccacgccgatgcgccggctgacgggcatctggatgtgtgatttctgaacaagaaaannnatgcctcannnnnnnnnnnntcnnncnngnntnnnnnnnnnnnnannnnnngntcnnnnnttnnnnnnnntnnannnnntngntnctnnnnnnnnnntntgtnnnntnnnnnnnnnnnnnnnnnnnnnnnnnnnnnnnnnnnngnnnnnnaaannnnnnnnnnnnnnnnnnnnnannnannnntnnnnnnnnnnnnnnnnnnnnntnnnnnnnnnnnnnnnnnnnnnnnnnnnnnnnnnnnnnnnnnnnnnnnncntnnnnnnnnntnnnnnnnnnnnnnnnnnnnnnnnnnnnnnnnnnnnnnnnnnnnnttnnnnnnnnnnncnnnnnnnnnnnnnnnnnnnnnnnnnnnnnnnnnnnnnnnnnnnnnnnnnnnnnnnnnnnnnnnncnanannnnnnnnnnnnnnnnnnnnnnnnnnnnnnnnnnnnnctc

SEQ ID NO: 3457 - DNA, 695 bp, Zea mays
tacgggggcatatttttgtacccagcagaccagaagagtccaaacgggaaactacggtataacaaaggcaacaatcttttttttactaactattattactactcccggaactgtagtttagcttcctgtcctcacattggttggttctatgtggaattgcagcgttctgtatgaagtcttcccgatgtcattcctgatggaacaagctggaggccaggctttcacaggcaaacaacgggtgtgtttcagtttccctttctcagaccccaatccccaactgaaaaatcttgatgctagagctatcacatctgcctgagatatcagggggatttttcaacacttttacaggttgaaattattgagaaaagggcactattttaacatgccatgtttttttttaccagtggttggcattgcatataactgaaaatgctcctgctaaatttataatgcaggcccttgaacttgctcccgctaaacttcacgacagatccccagtgttcctcgggagctacgatgacgttgaggagatcaaagcactgtacgcttcaatgtcaaacagcggttgacctttctgcctgaggaaacgagcgagatcaaaagcaccgtacgcttcagagtcaactgcttgatctttatagattgtaataaaataataaaagagtttgtaaaaaaaacaacaacactgcttgatc

SEQ ID NO: 3458 - DNA, 405 bp, Zea mays
gctcagaaccacctgaagaaacaccctgtcgaacctcgaatcccttcgcctcaacagacgaactctccagatcagatggcagaccgttggcgactgattccaccggctcctgcggttcaaacactccctgtggcccttgctccaggctagaaccagtgcccatgctaccagcttcatgtccctggtcaatgcggcgccttctcttcttcgagatagcatcctcgagctccttcctcatctcccgctgggagatcagctgacgcatgaaatcagggttctgcatgacgcgtgccatgaatgccatcatctgctgctgcttctgctcggtatcttgtaatttctcttccatggcctgtagatctgatctagtattttggtgctcctgcctcagcttcactacctcag

SEQ ID NO: 3459 - DNA, 426 bp, Zea mays
ttgagatgatgcctggtcctgagttccccctgccagaagaaggtgatgatgggaccaccatgtacaacaacaacgacgaggaggctcagagccttccaggcatcatcaactccatctgggagcagttcctggtaggcagccctctatctaccgataatgaggaagttgattcagcaggcggactatatgcgcaggaggatggatggagcaaagtggggaacatcgctaatcttacagaacagatgggacttgtatcatcaacaaatcaccgggactcagggaatgggctgtactagtatcttaattaatacagtagactgaggattctggtaataagtgttgcatgctcttttctgatttaattattttccccccttttcgccaactcaatatgggaggtgggggtgaggagatacaaaggcatgt

SEQ ID NO: 3460 - DNA, 413 bp, Zea mays
agcagatcaccatgcctgttctcctcagcagtccatgccctcgtccaaacagcccaggcagtggggcttgcacctgtctcatctctgacaccgtcgagggtgttaagcatagtctggtatgttggtagagcttcctcggtaatcatgtctcccaccaaacaaacaaaataatcatcagggatttccttggcacgttctctgagctccttaacttcatcatgaaatccttcagatgctgggtcagggaggaaatcctgtggctgccaacacttctcgactggcttgagatgcgtcaagatattatctctagcccaatcatcaagcgacttgaaaatttcaatcttgtgaggtggcattgaatgtgtcacctggacatgtacctcccttggaggagcaaatggcttcttattctc

SEQ ID NO: 3461 - DNA, 417 bp, Zea mays
tgatgtttgacgggcaggacgacaagctgttcgagcacttctccatggtcgcgcagaggcttggcgtttacaccgccagggactacgccgacatcctcgagttcctcgtcgacaggtggaaggtggcgaacctgactggtctgtcgggtgaagggaacaaggcgcaggactacctttgcacccttgcttcaaggatcaggaggctggaggagagggcccagagcagagccaagaaagcaggcacgctgcctttcagctgggtatacggtagggacgtccaactgtgagatcggaaacctgctgcggactgcttagacaagacctgctgtgctgtgtctgcgttacatagttctccaggttttgatcagatggtcccgtgtcgtcttatagagcgataggagaacgtgttggtctgtg

SEQ ID NO: 3462 - DNA, 289 bp, Zea mays
ctgtcttctgtgacggaaacactgaacatcatgacttcatcttctaccggccagactccactgagtcattaggtaccatttcatggtatggatcataatccccacttttttcagtggtggcgattaacgagtttaggaacagcaaccctggtatcatacgggttattctttttgtagccttttggagagttctatcggttttggattcggtagtttatgaaggcttgttgatgagtttgagctcgaatagcttttgaaacagccggatgatgccatctttaataaacca

SEQ ID NO: 3463 - DNA, 719 bp, Zea mays
gctgctgctcctttaactgtaataagatgtcactgaccatgccttcaagatcagacgctgaaaggttacttatctatttatgttgacctagttgcacaatctgttgtgtctaccaggcgatgatgagtgtgaagaggcatttacgtggccctggagcaatccctatagggaggccttccattcacccttctccaattgacctgaaagggaaggcttatgagtaagtccacattgttcagggctttgatacctggtcctgcttttttttcccccgataagtagaggaaaggatgcgacctggaaggaaggtgaacgggattgactttgttcctgcatcattcaggttgctgcgagagaaggcttcaagcttcctccttgacgacttctacaggactccaggaggcattcagttcgaagggcctggttcagatgcaaagcccatcacgctgaccattgagaaccaggactacatgggtgacattgagatactgaaagagtaccttggcaaggttgtgatcgggaatcctttcatctgcttccaagtagtttcggattaaaaataaaaagcttttcatttaagaagcaggtcccttcctaacatttggcatgcccaacgatgatgtgatcccaggttaggaccatggtgaagccagggtgctcccgggagatcctgaaggcggcgatcagttccatggtgtcggtgacggatgtgctgactg

SEQ ID NO: 3464 - DNA, 646 bp, Zea mays
acgtaactgcagtagcattcttgatttcacatatggtacgggaaggacgaggtcagcgagcatgaggggatccgggtgaccgcggcaggctgtcgctggagctgcttgtggatgtccctgacgatgtggaacaccgcctcgggctgcgctagcctcagcgcgttacgcgagtatctcctgagctcatccccgtctgtgctgctgctgctgaaccagcgggcgacctgtctcgcggcctcccctgggtccttggagaacacgccggcaccgttgtccacgacataagggacgttcccgacttcctgcatttttacagtaggagcaaaaaaggttgctgatttgctatgcttatacagttatgattccagtaaccaaattagcgatcctgctacttgacctgtccagggatgaagtcgttcaggatgataggaagccctcgtatgagtgcctctgcgatggtaccaggaccagcctgcgaatgccagggggggaaaaacacgcatcgttcagtcagcgcaaaagagcaacaccgcaagcacgcaatactatactatagtgatcctacacaaggcgaagcagtcactgacacagaggagaggacatacttttgtgatgatgcagtcgcaggcggccatccacttctcca

SEQ ID NO: 3465 - DNA, 457 bp, Zea mays
tcctgcggtgctggcacgggcgcggcgacgcctcgcccctcgacgtcatcgccatcaacgacaccggaggcgtcaagcaggcgtcccacctgctcaagtacgactccacgctcggcatcttcgacgccgacgtcaagcccgtcggagacaacgccatctccgtcgacggcaaggtcatcaaggtcgtgtccgaccgcaaccccagcaacctgccgtggggcgagctcggcatcgacctcgtcatcgagggcaccggcgtcttcgtcgaccgcgagggcgcggggaagcacatccaggcgggggccaagaaggtgctcatcacggcgcccggcaagggcgacatccccacctacgtcgtcggcgtcaatgccgaccagtacaaccccgacgagcccatcatcagcaacgcctcctgcacgaccaactgccgcgtgccattcgtcaaggtgctcgacca

SEQ ID NO: 3466 - DNA, 615 bp, Zea mays
  misc_feature (567)..(594): n is a, c, g, or t
  misc_feature (599)..(607): n is a, c, g, or t
gaagtatgatccaggccgcatcttatgcaacatgtttttcgtgtcattttcattgtggttgtaatgcatgcatgtttccatttgggactatgtttcctttgtggtatgtttgattgttgacgtactgtggaggccctatcttcacactataaccattaccttccaaagaatgttcacatctaatggttttactcttctgcttggatggcagtttgttggagacaaggttgcgtatgccctgtctcagggactaaaggtcattgcatgtgttggtgagacccttgagcagagggaggctgggtctaccatggatgttgttgctgcacaaacaaaagcaattgctggtacctttcatttactctcagtccagtgattgtgtagtctttgtctatgctcttcattgttagtttttttcttatgataatgaagagttgttgattgattatattcaagtgcttctactgttagctcccattcatataatactaagattatataaatgtagctactagctagacatctttgttgaacacttctcttctggtgaattttgttttgtcctgttcnnnnnnnnnnnnnnnnnnnnnnnnnnnnttggnnnnnnnnnctacatgt

SEQ ID NO: 3467 - DNA, 409 bp, Zea mays
agagtgagtccagaattcctggatacataattgaacgaaaatgctgggccccttgaggaaaataagtccccactgccacacaaacgtgtagcaagatcactgataagtgcttctcccttaagaaacttgcgcacatccatagagaatcttgtgttcatctcagcccatcttttccaatgagggaatggaaattgcacattagatatgtcaagcggagaccaaggatctgcaatgatcttagtctttgaaagaacaggatcaaatgctatggcttccagaagtggaggccgtgagaggccctcaccacctggacctctgacgaggaaaggagcattgatgaagcagaacccatcaacatggaagtcgagcacccaatggcggaggctgtccaaaatcagcttctgagtca

SEQ ID NO: 3468 - DNA, 495 bp, Zea mays
tcttgctgtacgctcctttgctatgtcatgtccactaatggtcataataataataaaacccgtaaaattcttaaagtatcatatctaaagtaaaattggaagcacttaacttcgtctttttttttgtaggtcaagccatccaccccgtatgatactaccgtgctgccgaaggtgtaattactcagttgtttttgacatgccaattgctgagttctgacttggcaaggttgagcataagtctttcttcattttgggagttatcacagagccagtttggcagtgctgtagttttggttttacctactctttgtagaagaaaagtgaagggtggatattatggaacaaaatatatacctacggcagcacgcagcatgatgaaacatatttaaaaaatttgggtgctctaccacatgcccgtggaataaaacggatgtaaactcagtgcacttataacaccctaattgtggttttgtttgtggttcaaacttctatacc

SEQ ID NO: 3469 - DNA, 592 bp, Zea mays
ggtgcaagccccactgcttgggctgtttggacgagggcatggactgctgaggagaacaggcatggtgatcttctcaacaagtacatgtacctcactgggagggtggatatgaggcaaattgagaagacaattcagtatcttattggctctggaatggtaacatattctctctttttatccattttttcttacctatttaacatggcaagtctttcttgtacattcatgcttctgaagtgtttattttcggttgcttggagtttggttctttggtgaattttttttatattaactcactatgttgccatttttttgagcaactattgttctgaaattttgaaccgttgttctatttcagttgggtcgatgattatttctcttttgtactttgtttttttaaaatctatgctactgattataactatgtaggactaatatgtacttcctttactgagtccttttcaggatcctaggactgaaaataatccttatcttggtttcatctacacctccttccaagagcgggcgaccttcatctcgcatgggaacactgctcgtcatgccaaggactttggcgacttaaagctcgcac

SEQ ID NO: 3470 - DNA, 695 bp, Zea mays
  misc_feature (683)..(686): n is a, c, g, or t
gttaagagtccagtgaacaagtggcgatgcggtgcggctcctatttcggtaagatttgtgttgacatgcctaatagtttaggataagtacgaaagtagcgcctaacccatgtctacccatgcagtctatgatgactgtgcagcgatggtcgcgtggcccttcagccacccaaatcggaaagcctgctgttcacatggctagcgttgacttgaaaggaaaagcatacgagtaagtttaagaatagccttttgtgaattttcatcagtgggtacacgtaccatggcgtggtctttgggcacctgccttagcttcttatctgcaagtatcttgtacatatggcctctaatctcagtaacgcttacttttgcagtgtattgaggcagaattcttccaggtttttgttggaagatgtctacaggaacccaggtccgctccagtttgaaggaccaggtgccgattcaaagcctatctcactgtgcgtcgaggatcaagactacatgggcaggataaagaaattgcaggaatacctggagaaggtagttctgatgcccccgctacgcatttttgcttcaaactcacacgaggccgcaactgactgacgagttttgccttcgccatgcctaatctgttttgctctgtggtgcaggtgaagagcattgtgaagcctgggtgctctcaggatnnnnttaaggcgg

SEQ ID NO: 3471 - DNA, 729 bp, Zea mays
  misc_feature (679)..(682): n is a, c, g, or t
  misc_feature (717)..(717): n is a, c, g, or t
gccacatcagatcaacaagatgcgtctggaaataagctgcttcttgatattggtctttggctgactcacaagataaaggtacataactatataactaaaatattcttgctgctggatttgagccacttatcttatgttgtagtttggtattcactgtctcgggtattgcaaatgagctaaatggctccactatactgtatgtggttcttgaaagttttgcttaataggccttgtgctaattcctcgtaggactacttcaaaagcaaaaagatggagatgacgattaaatacataggtagccatttgtaactcttatttttgctattgatatagttgtaacacatttctagattggtctgtgacaatattccatcggaattggcagatcctacatacatggtccgtgctattccaagcaatgcatcagacaatgtctactgtacacttctagcccacagtgctatccatggtgcaatggcggggtacagcttcactgttgggatggtcaacggaagacatacctatatacctttctacgtgagtaataaccccttacagacactacggtatttttctgcttgttgactgaatgcttgtcgtgacatctgctgtatagttctgttacatctgcctaaattcagcaggcgctgtgcgtgaaccatgtcacgaaacataactnnnncaattaaattaaaaaaaagtgcattactgatctgnacactgatgatg

SEQ ID NO: 3472 - DNA, 425 bp, Zea mays
tacgctcaaaattaccgtcaattccatccatctccagtctcaaaccctccaaatatgtggtctcctcgctgaaaccactctacctagcaccgctagatggtccgcgcactgccgagcttaagtctcggagacagccacttgagttccgttgttctgcttctgctgctgatgacaaggagtcaaagactcaggtggtgccagttcagtcggaaggcgcacagaggttgaagatctccatctatttcgccacctggtgggcgcttaatgtgatatttaacatttacaacaagaaggttctcaatgcattcccttacccctggctcacctccacactctccctcgcctgtggctctgctatgatgcttttctcgtgggccacccgtcttgttgaggcccctaagaccgacctggacttctggaaagtt

SEQ ID NO: 3473 - DNA, 534 bp, Zea mays
tctgacaacgtctactgcactctgctggcccacagcgccctccatggcgccatggcggggtacaccggcttcacggtcgctccggtcaacggcaggcacgcctacatcccgttctatgtaagtcgaaggccgaatgcagttgagcacacagcttcttgaacatggcttgttctgaaaccttgatgggcaatcgatctcttgtttgcagaggatcaccgagaagcagaacaaggtggtgatcacggaccggatgtgggcgagggtgctgtgctcgacgaaccagccctgcttcctgagccacgaggacgtggagaacatgaagcacgacgacgacgagcaccaccacatgcacaacacgcagctcctggaaggcgggagctcgccggtgtccaaatgcaatggctcggcagcggcagtgtgaggggcacgagaatacgcaaggatatagatatatatagtattaagcatgtagctatggatgttttttttcctttttcttttgcttttttgggtgctggcgttgtagagagtatt

SEQ ID NO: 3474 - DNA, 430 bp, Zea mays
cgccaaagaacgccaatgtgacatcaagcccatcagggccagactccttgagcacctcatgacggtacttagcagcaaaggctgcaccagtggcaacaggaatgccctctccgatgaaggcaaagcctcccaggaggttgtggggagcagagaacatgtgcatggaaccaccctgtccacggcagcagcctgtggccttgccaaagagctcagccatgacagaacgtgccgggacacccttggacagcgcatggacatgatcacggtatgtgctaacaacacagtcagcttggttcagaagtttgatgaagccagtggagacagcctcctggccattgtaaaggtggacgaaaccaaacatcttgccacggtagtacatttgtgcacacatgtcctcgaatacacggccaagaaccatgtcctcatacag

SEQ ID NO: 3475 - DNA, 427 bp, Zea mays
gctttcttgaacaaagccgtcaagccagtgcttgtaggtgggccaaagatgagggtgtccaaagcatgcgaagccttggcagagctggcagatgcctgcggctatcccgtcgccgtgatgccttctgcgaaggggctagtgccagagcaccactctaggttcattggcacgtactggggtgcggtgagcactccattctgtgctgagatcgtcgagtctgccgatgcctacctatttgctggccccgtattcaacgactacagctcggttgggtactcgctgctcctcaagaaggagaaggccatcattgtccaaccagagcgggtggtggtcgggcacggacccgcgtttgggtgtgttctgatgaaggatttccttcatgcccttgcaacccgtctgaagaagaacactgccgcgtatgagaact

SEQ ID NO: 3476 - DNA, 525 bp, Zea mays
ctgcatctgcaatgtttgagcctgaacctgacaaggactgcctgcaccatcaactctcggttatgatcgacatttctggatgatgccatggtctagacagttagtaagttattaatactgatctggcatctgtacatcagtcacagccatctactgctccaggttgatcggagcgggcgctgaactatgaaaggtttcgccaccgtgattcggcgggcttcagattatacaggaggggtcgtcatccacgacatcggctggtttatcctgctgctggggagtgcccacttccaagaaatcctccgcgttgaatttctcaatcccatcccactcatctgctgcattgtttggttaaagggtttacaggtttcacatgtgctaaactagatcagaaacttggtgcgagtatgaaagataatagtgggtgacagactattagaaggatacgtcctgtctcccacatgttcgtcatgctaactcctgtgttgtccgataagagccagtagtctgtatcagcatcaagct

SEQ ID NO: 3477 - DNA, 961 bp, Zea mays
  misc_feature (945)..(946): n is a, c, g, or t
actgcaatgcttggtgagagaaagaactgcaatttgccaggaattgttgtggatcttcctacattgactgagaaagataaagaagatattttgggctggggtgttccaaatgacattgacatgattgctctatcctttgtccgtaaaggatcagatttggtgactgtcagacaggttcttgggcagcatgccaagcgcattaagttgatgtcaaaggttcgtatatactatcactgtcgacctttaaagggttatatcagctatatttctgtccataatttggcacgactccattttttgtttgcatctctcgaatgaaaccttcccatcttaatttttgctgtgaacacatgataaccacatgctatgttatttatcatgtaacatatgaaagtagtatgttgagtacccttttaccaactaggatatactgcttgcccaggctgcaacttcacaagaattttttactttacagttggttagcgaaatgcaattctgttaacttgacgctacatttccacctggtaggctgttttactcctaaccgaattctctggaatactggataattcctttattgtaaaaagtgggttctgcctatctgtcaaagctagagaggtcattttccctgattacgaagcacaagaattttttgaattctcaaattgttgagaatagttcatgtcatgcattgcttatttactgcaatgtctgaaatctagatggtttcctgctatactgttgttcgttatttttttggaggtaatccctgcctttatagaacatatgatcgtgtcagttatgctgtcatggatctgatttccttaatgacatggttctgctatgcaggttgaaaaccaagagggtgttgtaaactttgatgagatcttgagggagactgatgcttttatggttgctagaggtgatctgggaatggagattccnnttgagaagattttcc

SEQ ID NO: 3478 - DNA, 785 bp, Zea mays
gtgaggctttgaatattctacttactacgtccccgaaaaacaaatctacttacatatcccatctatggtttatttcttctggctctgttttgcatcagatggtgtcactattaacgttacatgcatgcctatgattcactcttatctgcaatataagctcttgtttaatcaatgatgatgtattcgtgaattcaggaacatttcaagaaaaacaagatgaccattaatctgaagtacataggtcagtggttttcttcggtgtcatatttcagggccagaactgctagttacacacatctcagatgttgttcttctactgcagatccaacgtacatgatacgtgccatcccaagcaatgcttctgataacgtctattgcacactgctggctcacagcgtggtccatggagccatggctggatatactggttttaccattggccaagtgaatggtcggcactgctacatcccattctatgtaagtcgcacccctgccggagcaggacacggaattctttttaccgcattcatcatctcagcatctgagacctacttatcctgcttgaaccaatgccctccgtactaattgttttgcattcgcgtcactcacttcagaggataacagagaagcagaacagagtttcgataaccgacaggatgtgggcaaggcttctctcgtcgacgaaccagccaagcttcctctgcaacaaagtcgtcgaggaggcaaagaaggaacatgaaagagcaacgcgacttttagatggctcgccttcccatcgaaaaggt

SEQ ID NO: 3479 - DNA, 1063 bp, Zea mays
  misc_feature (1057)..(1060): n is a, c, g, or t
gtgaagcaaaacgcaatcaatatgatcaagtaagaatttattaaagctttcaattccttgtggtattgtttgtgacaatcaagttgaaaaggcttgcgtcaatgaatctaaaactagcaccttatggatgcatataggcttttgagaaaatgatctctggtgtgtatcttggggaaattgctagattggtattccaaggaatggctcaagaatcagatttatttggtccatctgtgaattgcttatccacccctttcgtattaaggtacttgtatttttccagttaaattttggtcttacaaagttatttttattcctagagctggttgctacagaaacataaaattgatgtgatataccctaatctttttatactaaatctgatatatatagtgttctattgatatcatgatatgcttcccaatatatatgccacttcactccattgttttacttttgttctcattcttttgttgtgatatattaattaggttaattgacatctgtctattttttctgtttttatcttaggactacatatagcacaacagaattaaacatcatcaatcttaagaggaaacagacattttagctagccaatgcaagtgttagaatgaataaactggtatagctagcaacaactggaattagttaatgcatggttggaaaatgttctttgtttcttccaaactgaactgtatgattgcctaacaaacaaaacggtaaagatgaataatgttatgataattttattatttctcgtgatccagtacaccttctctcgctgctattcgtgaggatgattccccagaccttagagtagttggtagggtgctcgaagaacatctgaaggttagttgtcactgctgcttaattggctcctatatgaagacaatcagacaatgatcaacgacatcgttttgcttattacacagatgcaggatgttccaatgaagactcggagacttgttgtgagagtatgtgacattgtaacacgaagagccgcccgtctagcagctgctgggattgttgcagtgctacagaaaattgggcgtgnnnntag

SEQ ID NO: 3480 - DNA, 1048 bp, Zea mays
  misc_feature (606)..(608): n is a, c, g, or t
ttgagagatgatttttgtgaggcaaaagatttttcatgtacaggaacacgaaagatgtacctgaccaccgggtgttcagatatgaccttagcatcaaggacaacagccgtcttcctgaggaaatgtgcaaggggctgcccataggtgtgagggaacgcatggctgatcacatgagcgcctgcctggtcagctgcaattgcggcgtcaccatactccaccctgacagtagtcccctgaattacatacagtcaataaatccgttcctcaagtgtgtgaactgagctaactcaacagaaacacacaagaaatctgttctgaaaagctattgacaattcttcccgtctaggaaccagttcaaaagtgcccccaaggcccaaacaagagaaaagccgatttgatgcagaaatttattgagagtccacccatatagacgagttccaaagcgattccatacataagaaggtcaatttgatagcgacaaccgagtcctaggcctaagcccctccacaattacaattataggacccgtgagtacatgtagataggtccatcatcattgctacagaataatttcgtcagttaactctcagttgcaattgctaccannnactacaaaacagatgaatcacgacagcataaaaaacaaatcctcccacgagtcagacatgcagaccgatctaaaatacaggacagcgccacgatttacatgtgacgttcactacaactcagatccagtgtcaccagcgaaagcgacatcagtcagcgtcagctgatactgcaacacgcactgtagcctgatcccggctaaagagatcgggagtaggtgaacggtgaaccgtagatatcagcgccgacggaacaaaccgatccggccggaggacaatgcgggatctggcgccgcttgacccgagagaccgcagatctgtacgcgtaggcggggaatggcgcacgcacggaacttagcaggagtaaggggcaggtgcggcggcggtgcgtacctggaggcaggggggcacctcgggctggtagagcgcgcgcttcttctgca

SEQ ID NO: 3481 - DNA, 626 bp, Zea mays
  misc_feature (617)..(618): n is a, c, g, or t
cccccctcacgctgccgccccattgcatttggacgagttctccggcgagtccaatagcagcgtgttgtgcaggtggtgctcgtcgtcgtcgtgcttcatgttctccacgtcctcgtggctcaggaagcagggctggttcgtcgagcacagcaccctcgcccacatccggtccgtgatcaccaccttgttctgcttctcggtgatcctctgcaaaacaagagaagggtttatccaggatccaagaccggatgtccaggaagctcaactgcacaagcgccaaggccctcgacttacatagaacgggatgtaggcgtgtctgccattcaccggagcgacggtgaagccggtgtaccccgccatggcgccatggagcgcgctgtgggctagcagagtgcagtagacgttgtcggaagcgtttgaactgacagcgcggatcatgtaggtcgggtcgatgtacttgagggttattgggaaacggggcttcttcttgaaatgatcctgcatgtcaaagaaatgggataaaattcagcattggaatgccaggtaatgataaaaaaaattattaagatggctcggtttgaaactaaataattctgctagtagagctaatcgacaannaaacggag

SEQ ID NO: 3482 - DNA, 636 bp, Zea mays
atcttcgtgcattcactgaaacagtcacagatcacaaaggtcaaatgtggatttaggcagagaaaaagatggcgattggcaatggaagaatcttacatgagctctgcctctgactccctgaagcccgtgtggtgcttgagggtgtcggtccaaaggggagccctcttgagagtgagtctggctgcgtagacagcagaagcagcgaccagcgatggcaggcgcgtcaccaaatcgtattgcatcagcgccaattcagcgaagaagaacaccatattctccatctgcagcattccccaccgggcaagataaatgtaagctcttgattggtgaatctctgattggctggctagccatgccgacgaaatttgtttacctctttctcaactttgccgcccaatgttgcggccttcagaaaacggacaaggaacatatacactgtagggacagtcaggttccactccagcctattcagaattcccttctccatcgaaagaatctgttctctactgtatgcactgtctgatatgaggatgaagtcgttcacctgaaaaaacacatatgaatatgaatcttagaagagaagtagcacactgagaacatgggaacagagagagatgaaaagctttctgtgcgcac

SEQ ID NO: 3483 - DNA, 393 bp, Zea mays
gagctccttggacgcgttccagcagattcttaagaaggaagggcccaagtccctgttcaagggtgctggtgctaacattcttcgtgccattgctggtgctggtgtgctttctggctatgaccagctccagatcctcttcttcggaaagaagtacggctccggcggtgcttaaatggagaaatatgatgacgaacaagagcagtgtgtgttcccggtcctttccaatcaggatctggtgaagtttttgcctttcatatcgaagaaattaataattcatgtagagggaggattcttccaacaatttgttttggatggagacttagatctccaaacactcgtaactatcctactaggtggtgacatcggtccccaaaaacatttatggtcatagag

SEQ ID NO: 3484 - DNA, 371 bp, Zea mays
cacatcctcaaatgaggcctggccagggtatgcacaatgtgcctcctgtggcagccggcccaggccatcactatgcaaaaccccgaggaccaggaggccctaaccggtatcctcagggtgggaatcaagggggaggctacaatccgaaccgtggagggcagggtggtggctatggcagtggcccttatccccagcaagggcgagggcctccttaccctggagcagctggcccacggggcagcggtggcagtggctatggggctggagggccaaactaccaacagggtggcccatatggtacgtccggtccaggccgaggaccaaactactctcaaggtagtggttcccgcaaccaacagcagtatgggaac

SEQ ID NO: 3485 - DNA, 416 bp, Zea mays
  misc_feature (409)..(413): n is a, c, g, or t
atggtaagggatcagtccagaaatattccgcatcaagtgcatcttttgctgatatcctctgaataatttgtagaggcgtcaaaagaagacccaaatgacaggtgtggacaacacacagcagccaaagaaaagtacggaataggaactaaccatttaaatgactaaacaaattaaactttcagtaaaattcacgcaatgtagcatacctgtgatggatctaaagtcaacatcttctctaacagatccagtgcatgtcgatcaaaactacaagtatatagaataatggacaacaatcaggcgacttaaaagccatattggcacaaatatatgtaatatgtcacgtatcactcactgcttaaagaaatctttaactcgtctctttaatggccggggaggcttgaagttgttnnnnnaag

SEQ ID NO: 3486 - DNA, 488 bp, Zea mays
gacgaggagggtcctgtaggcctggcggttggcctcggtgttctcgaggccgatggagtcgagcctcttcccgcaggtcgcgttcgactcgtccatggcgaggatgccccttcccggcgacgcgatggttttctgcagaaatataattaagagaattgcaaacttaagtgacgatattctgagccatcatatagaaaaaattgctattttagctcttctaacgtaggctctctgctattatgtgaccctggctcaaacgatcgtcgtacataactgaagcaatatatatatataccgcggtctggacaagctcgtcagcgtaggcgctagcgcgggcaaccatggagacgacgacggtcgccggcctgggatgagcggcaaccagctggggcttggatccccattcagccttcttggggaggaatgacgacttgaggagagtagcagcagatgccattgctgctccctggttgtgaaagcgaacgagc

SEQ ID NO: 3487 - DNA, 567 bp, Zea mays
gatggatgctggatgtgctcatctgtggtgaagaaagctttggcactggtaatatatggcttgtggccttgtgggttgtggctatcatttctatacacacaacagtaaacatgtcagcaacctcttgtattgttatgttagatgggtaaattctgttaacatgtggtatataaatggggcaaatcacttgtgttctgactgtgagctctctcgcccttctattgagttggtggtcatgaatccaacctatagtaaagtcaaaggacttgttagtatttggtataaacattggtgggatgtttacatgtactattgtggccagggtctgaccacattcgtgagaaggatggcatctgggctgtgcttgcatggctttcaattattgctttcaagaataaggacaaccttggaggagataagcttgtcactgttgaagatattgtccgtcagcactgggccacatatggtcgccattactacacacgctatgactatgaggtacttccttttttttgacatgccccttgcatatatgtaccacctgtttaagatatcattctaaatgca

SEQ ID NO: 3488 - DNA, 803 bp, Zea mays
aactaaaactggatcacgtttgggtacatgtccgtaacatgttacatgttggatattattgctaaaatctactcagggcactccaagagtaaaatctgcaggtcgcagtaaacagtttcacaggacttgtgcagacataaaagcacttgcatcccgcccgtttagtagggctccacaggtgcacggaatttggcacctgcgtagacagcaatagcgccaagctcttcttcaatcctaagaagctgctcccatcataaaagtaacacagattagtacaaatgaccaaatattgttctcaaaccaaacccaaaacagacatgaatgacacaaaagatgggcatcaagtgtcacaagtcacaaaacaaattactatcagaaagctgagattttagtagtatagttctcgaggaatcacttgcctggttgtatttggcaagacgctctgatctgcagggtgctccagtcttaatctgaccctgttatataaaaagaaaacaaaaagacagatgatactacgccttacagtcaaataaaagtttgaatttgctaagacctttgagaaatatgaaggcactgtctcatgttttcagaacaggaatgattgaaacttctctatcctagatatgcacagaaagtaaatcataccgtggacaaaccaactgccagatcagcaatgaaagtgtcctcagtctcaccactacgaacagcagatggttaacatcaggaacggcaccagacaaaatcacaaaattagtacctaagaaacatgaagtagcaacacaaactatagttacctcctatga

SEQ ID NO: 3489 - DNA, 766 bp, Zea mays
catcttagcatagtgaacccagtcatcctggtcaaaaggatcttcaatcgaaacaatggggtattcgctcacaaaagatttgtatacattctttaagctatcgccagatatcttctgtgaaccatcattattctacaaaaaaaacagaatgtttagttagggacatgtctggcaagtttattaacttgttcacagaaagaaaacaatggtctacctcctccttaaagttgaggtcataggtttggtccttgtcactgtaaaactccgaagcagcaacatccattccgatgacaacctagcattcagatagagataagaaaaacatatgacaaacttcaagtctcaggtgaatactgaacaaaacaaatatctggtgaaccttgccagtgtatccagccttctcaattgcagttttcaagagctcaagtccttccttgttctcctagtatcaggaaattgaaacagattaactctcataacaaaacatcgttttcagttttacctacataaagaccaatgttccagtaaagtgaaacaaataaaaaaacagatgtccccaactgtgaaatcagaaactaacctggatgttcggagcaaaaccaccttcgtcaccaacattcgtggcatcttgcccatacttctttttgataacggactgtaaggaacaacaaaagatatcaaattatgatactttgacactacaaaaagaaaaggacaaacaagatatacgaggcaaatgccttcaggtggtgataaacttcaacac

SEQ ID NO: 3490 - DNA, 595 bp, Zea mays
  misc_feature (397)..(399): n is a, c, g, or t
  misc_feature (441)..(447): n is a, c, g, or t
  misc_feature (520)..(520): n is a, c, g, or t
  misc_feature (529)..(543): n is a, c, g, or t
  misc_feature (547)..(553): n is a, c, g, or t
  misc_feature (569)..(592): n is a, c, g, or t
tcctagggtccacacttaaggtacatcaatagatgcattagttgctcaccttcaggttgtggtacacctcaactcccatcttcatggcctccttgaacgaggaggcaccagttgggaggatcatgaactcctgtacaacagttaaatgatcagagagtatagtcgaagcacgtagtcaaaaattcagatttctcaaggaatgttacctgcatggcaagcttgtttccagcatgtgaccctccattaatcacattaaaggcaggtacagggagcaccagagttttgttcccagcaagatttgcgatgtgctgcaaataactaaactttcaggacaccctctaaattgtgcataccaacataataaaaaaatcatagcagtgacatttgaaagacctgnnnaagaggaatcttcttcaccatagctccagctttgcacaccgnnnnnnnaaccgcaaggatggcatttgctccaagctttatagattgaacacgacattcaaggaaatcaatacagacagtncaagataannnnnnnnnnnnnnncatnnnnnnnaacccatgataccttnnnnnnnnnnnnnnnnnnnnnnnntgg

SEQ ID NO: 3491 - DNA, 604 bp, Zea mays
cacgcgtgatggttatctattaagcctccagcgccatccgacaggactggaagtctgtaacacgcagggcgggcgggcgatcacagtggatccgcacggtcgtcttgttcaacgttgacgctggccgtcccgagctcccaggcctccatcttggacacggtcactgggtgagctccgttgttgaacaggtacaggtggctactgccgcctgccgccacgtgctcagggtacactcgcgccgtgatgcacgtccgccccccgcctccgaagctctcgacgacagagtggtcgatctgttgttgttttttgtcaacgttagcgccgttaaacgtcgtcatgcatgcttcagttcagctaagaaccaagacaagaagctctctcaccagtgttctcagcgatatgcccctgtccttctcgacgtccacgtcaacgaatcctgcgtagaatggcttgtgcaccccctctttcgtagacgacctgtacttgcacgtttgcatcgaaaatgcatgcaaaatgatagttgtcagtatgtttgtttggaggagtctactctgaaccggtagcaaaacagacgcgtccggttcagctagcagagttgctgcat

SEQ ID NO: 3492 - DNA, 395 bp, Zea mays
cttgggcgagacgttgccagcccagacaaacaaaagacggtgattgctgtggatggcggagtttacaagcattatactttcttcgcccagtgcatggagagcactcttagagacttgcttggggagggagtggcgtcctctttagtgataaaacttgccgaagatggctcaggcactggagcggcgctcttgtcagcctccctattctcaacgtctccaggccgtggatgattaatttctgcttgtagttccttcagattctgaaggtatagcaggtatacaattgctccagtggatatttgtctataacggttataaaattcaactgccacattctttttttctgtcaggcctgtgctcctgcagtgcccatttttaaggggttgtacacgtca

SEQ ID NO: 3493 - DNA, 491 bp, Zea mays
ttgaagcagaataatgtcaataatcaaggattgctgtttgatcctcatgctagaacagctttggcgtttgtgtcactccgaagtgatggtgaacgcgaatttatgttctatcgtaatccaagtgctgatatgctacttgaagaaaaagaacttgatcttgatcttataaggaaggtatatataagtatatataagtgtattctgttgccattccaatatctatgcctctcacttactattggtttcttatcatgtaatttgtgacaaaattaatgtaatctaatcatgttatttatgctaggcaaagatattccaccatggctcaataagtcttataactgagccctgtaaaactgcacatattgcagctgccagagctgctaaagatgctggagtacttgtttcatatgatccaaatttgaggctttcattgtggtcatcacctgaggatgctagagatggtatcctgagcgtatggagaactgctgata

SEQ ID NO: 3494 - DNA, 465 bp, Zea mays
tggatgaccagctctcggagttttctgaggcgaggatcggagggcgttgcgttaggtccgcggttggtgagcggcggtcggagcggtctcgcgcgcggcggggtcgttcgatgacgcaggaatcgcgctctgggagggtgggaatacctcgcgctcgcgctcaaggtgctcgattaatttactgcctgaggctgagggggggcgcgcctgtgagctgaaccgttcccgctgcactgactcctgagctcgggaaatggttgggagcgtgcacgtcaatggatcggtccacggcggcaatggcacggccacggaggagcggctggacgagctgcgccggctgctcggcaagtcggagggggaccttctcaagatcgtcagcgtcggcgccggcgcgtggggcagcgtcttcgccgcgctactacaggacgcgtacggccatttccgggacaaggtgcagataaggat

SEQ ID NO: 3495 - DNA, 426 bp, Zea mays
gccgactccaactcagcatatagaattgtttttgccgatacatagccagaattacagcatagttgatagaacaaaaaaagggggctgctcgattctccatcggcaggaccaacttacacgaaatttaacagcaaagagactaattaacatacaaatataaagataaccatcatcccacataggaagcatgttttttggatgtccgaaaataagctctaacgagcaaaccacactccgcaacctagctcgtagggcaggagttccaaaacgggcacgcaaagagaagcaactcagtacttgtagtccttgacgtggaggctctcggtgtcggcggcagcatcacccttgtaggtgccgagggtagcctcagagttggccttgcacctggcgaggaaggcagctctagccttctccaagttctccacc

SEQ ID NO: 3496 - DNA, 439 bp, Zea mays
cgatgccagcccatctcatgtacgacggtaaggacgacaacctgttcgagcacttcagcgcggtggcgcagaggctgggcgtctacaccgccaaagactacgccgacatcctcgagttcctggtccagaggtggaaagtcgcggagctcacagggctgtctggagaagggagaagggcgcaggactttgtctgtaccttggcgccgaggatcaggcggctggatgatagagctcaagcgagggcgaagcaagcaccggttattcctttcagttgggtttatgaccgcaaggtgcagctttaatcaagaacgctaggcaatgtgggcatttactacgtatatcattttcagtcctggggttctctataagaaacagtctctaggttatctagcagggtagaattcaactactcgtggatctcactcggtgcaaagtagtg

SEQ ID NO: 3497 - DNA, 420 bp, Zea mays
acgccaatgtgacatcaagcccatcagggccagactccttgagcacctcatgacggtacttagcagcaaaggctgcaccagtggcaacaggaatgccctctccgatgaaggcaaagcctcccaggaggttgtggggagcagagaacatgtgcatggaaccaccctgtccacggcagcagcctgtggccttgccaaagagctcagccatgacagaacgtgccgggacgcccttggacagcgcatggacatgatcacggtatgtgctaacaacacagtcagcttggttcagaagtttgatgaagccagtggagacagcctcctggccattgtaaaggtggacgaaaccaaacatcttgccacggtagtacatttgtgcacacatgtcctcgaatacacggccaagaaccatgtcctcataca

SEQ ID NO: 3498 - DNA, 518 bp, Zea mays
gcctgcatctgcaatgtttgagcctgaacctgacaaggactgcctgcaccatcaactctcggttacgatcggcatttctggatgatgccatggtctagacagttagtaagttattcatactgatctggcatctgtacatcagtcacagccatctactgctccaggttgatcggagcgggcgctgaactatgaaaggtttcgccaccatgattcggcgggcttcagattatacaggaggggtcgtcatccacgacatcggctggtttatcctgctgctggggagtgcccacttccaagaaatcctccgcgttgaatttctcaatcccatcccactcatctgctgcattgtttggttaaagggtttacaggtttcacatgtgctaaactagatcagaaacttggtgcgagtatgaaagataatagtgggtgacagactattagaaggatacgtcctgtctcccacatgttcgtcatgctaactcctgtgttgtccgataagagccagtagtctgtatcag

SEQ ID NO: 3499 - DNA, 515 bp, Zea mays
attcaagtatgcgtgggtgcttgacaagctcaaggctgagcgtgagagaggtattacaattgatattgccctgtggaagttcgagaccaccaagtactactgcactgttattgatgccccgggacaccgtgacttcatcaagaatatgatcactggcacttcccaagctgactgtgctgttcttatcattgactcaaccactggtggttttgaggctggtatctccaaggatggccagacccgtgagcatgctctccttgctttcacacttggtgtgaagcagatgatttgctgctgcaacaaggtatgattccaggaatttctatttattctggttcatgaactgagatgcctgtaaatgtatttcaatagtctagcaatatttatcttctctcagtattactgccttcaagttgaaaatactgcatttgtgctgtgattgaatagctaatgttagttgtatgctaattttgacaaagtgaaacactgattgcttgcattttaaaggccatctg

SEQ ID NO: 3500 - DNA, 717 bp, Zea mays
ttggatttctgctactatattcacagcaaaaaaaagaaaaaaaatcactggtgatgcctgattgactaattttggaactgccgaaatttccaggcttggtatatcgtaccctgaattgacagagatgcaagcccgggccatttttgaagctgctatagcaatgaccaaccagggtgttcaagtgttcccagagataatggttcctcttgttggaacaccacaggcatgtgtctttttactttttatatatcaatgtatgtacacatactgtctctacagttcaaaaaaagtgaccaaatccatttgatgccaaaaccgcacaaacaaacagctaattataatagctgacgtttggtatttccaggaactggggcatcaagtgactcttatccgccaagttgctgagaaagtgttcgccaatgtgggcaagactatcgggtacaaagttggaacaatgattgagatccccagggcagctctggtggctgatgaggtagggaaaaccaccaagttcagaatcgcccagaactttgcgaacaagtttgtttatctgtgcattcctacgctggtctgaaatctgtggctgttgttgttgtttttttggtttcgtcaacctggcagatagcggagcaggctgaattcttctccttcggaacgaacgacctgacgcagatgacctttgggtacagcagggatgatgtgggaaagttcattccc

SEQ ID NO: 3501 - DNA, 534 bp, Zea mays
tttttgtagttatgtcgcccattattggcactcaagttttacgagtccctctgaaaccttgaaatttcatgagtctaattgcattattatcccaatttttgccatctctcgctgcaggttgctggtcacaaggacgtccttgaaggtgatccttatctgaagcagcgtctgcggctgcgtgagtcctacatcaccactctgaacgtgtgccaggcctacaccctgaagcggatacgcgacccgagcttccaggtgagcccgcagccgcccctgtccaaggagttcaccgacgagagtcagccggcggagctggtgcagctgaaccagcagagcgagtacgctccaggcctggaggacaccctcatcctgaccatgaagggcatcgccgccggcatgcagaacaccggctaggccaagatcttcggtgtgcaaataacctgtctcccatgagacggtggacgatatgtgtaggcctgtgagcagttagtacaccggcgccagtgtgttctggaggatttttcatgtcagagcctt

SEQ ID NO: 3502 - DNA, 391 bp, Zea mays
  misc_feature (198)..(200): n is a, c, g, or t
  misc_feature (302)..(302): n is a, c, g, or t
  misc_feature (306)..(308): n is a, c, g, or t
  misc_feature (324)..(327): n is a, c, g, or t
tcttgatggaactgactgtgtcatgctcagcggcgagagtgccgctggagcctaccccgaggtggctgtgaagatcatggctcgtatctgcatcgaggcagaatcttccctggaccacgaggcagttttcaaggccatgatcaggtccgcgcctcttccaatgagccctctggagtctcttgcatcatctgctgtgannnctgccaacaaggccaaggccgcactgattgtcgtcttgactcgcggtggcaccacggccaaactggtcgccaagtaccgccccagggttcccatcctctccnttgnnntacccgtgctaacgannnnttctttcgactggaccatcagctccgagggcccagctaggcacagcctgatctacagaggcctc

SEQ ID NO: 3503 - DNA, 402 bp, Zea mays
ttctcgtccgatgtgtacgtcgggccacccaagggcaacgactggttcgagaagcagacggcaggcacgctcgacatcctgtgccctccttggatggattggttccatggcggcctgcagttccagattgagcaccatctgttcccccgcctgcctcggtgccaccttcggaaggttgcgccggccgtgcgtgacctttgcaagaagcatgggctgacctattccgcagcctccttcttggacgcaaatgtgcttacatggaagacactcagggctgccgcattgcaggccaggagcgccacaggcggcggcggcggcgctccgaagaatttggtctgggaggcattgaacacccatggatgataaacgggacgaggatatggctgaggggaaggcaacttc

SEQ ID NO: 3504 - DNA, 694 bp, Zea mays
gcaatcacgtacaaggaacgtctagtacaaaacggatgtgacttcaaatggaacaaccacatttgtgatttacgcggccatgatgcaatcaatggcttctttgcagatcccagtcatggtcgcctctggtccatagacctgcaatgcatttgttgagcataatcagggcatctcttatgggggggtatggagccggtcccaatgatccccctttcaggaaatggtatggcgtttcaggaaatgcaaggtaccatatttatatcgagaagaagcataaagagatcatacctcaattggaacgccaagttcggcgcctagggtgcgcattttggcgagtccagtttggtagttcggaccacctctccggacataaatgttcatccttgcagcctttaatttggactcctggaatcagattcagaaacaaaataacaaacaagattggtgaagatttaaatagagataggtgggagtggttggggaattgaacggctaactaacttcgtggcccaatttaccttctctcttaaagcccgaatgatgccactaaatgtagaagcaacatctgtgaagttagcgattcctcctccgattagaagggctctcttacggccatcaggatcagaggtagcgcactgcacgagttgaaaacatattcatgaaagatatatgtaacgaacagaaaagatagaca

SEQ ID NO: 3505 - DNA, 372 bp, Zea mays
tccttgacttcatccttcttcttaccatcgcctgaaagcacccctctccaacttatctgaaaccatcaagctaggattgatattgttgacatcgtgaacttggcattctccctacagtgtgggcgtgctttcggctgatccgctcacatggtagttatgggcagggtcgtttgactgacaggttctcgcgtgtgatgatgtttgccttcatgttaacttttgtaaaaaaaaaacattcattcatattatgtttctggctcccttcgtcatcaaaggggaattggtggtggtggtggcttgtaaaatacactcaaattttgtgcatggacatgtcagacccttatcatgtatactagctgatgtgatccgttc

SEQ ID NO: 3506 - DNA, 347 bp, Zea mays
  misc_feature (255)..(258): n is a, c, g, or t
  misc_feature (264)..(264): n is a, c, g, or t
  misc_feature (277)..(278): n is a, c, g, or t
  misc_feature (308)..(340): n is a, c, g, or t
tttttaaaaaaggaaagattcctcaggcgccactatatgtcatgcatgggtgatatattttttattcaagatcttcaggccccgttcatgaccggcttcttcatctcccacgcggtgagacgggacaccttgacgtgcgccctcccgttgttgaacacgtagaggcgagcgtccttgccgatggccagcgacgggtagaccctggagaggatgcaggtcttgcccccggctccgaagctctccacgaccgaccgnnnnatctgnagcaggaagaagnngtaacgagccgacacagcgctgagaatgannnnnnnnnnnnnnnnnnnnnnnnnnnnnnnnnaaaaaaa

SEQ ID NO: 3507 - DNA, 724 bp, Zea mays
tcacgtccagcaaagtaaagccctatggatcaactgccaccttattgatttgttaaaaacatttgctcttttccctcttttttcaaaattttctttagcggtttagccatttgtaatgttaatagttaaagacgctgccccaaaattcattacatgtctcttgttggcagtggtggcctggtggcttggggaaagcttccacccatgcagtggtgtacgctcggttgataactgaaggaaaggactatggcatacatggtagtgttttgcttttgggaaatgcctttcttgatgcagtactgtcttcctttgtgacttatggtattacgcatgtcggtgttccaggtttcattgtgcaactgcgaagcttagaggatcactccccacttcctggtgttaccctcggtgatattggtggaaagttcggtagtggtgcatataacagtatggataatggtgttcttcgatttgaccatgtgcgcatcccaagggatcaaatgttgatgaggtttgtccatttggatcatcatactccattctgtcactttatcccttcttttttttgtcttagccttccttaaatttgacttgatatattcttgctttctaggctttcacaagttacaagggaggggaaatatgttcactcagatgttccaaagcagctgctgtatgggacaatggtttacgttcgccagtcaattgttgcagatgcttctaaggc

SEQ ID NO: 3508 - DNA, 355 bp, Zea mays
  misc_feature (313)..(317): n is a, c, g, or t
  misc_feature (325)..(352): n is a, c, g, or t
ctgaagtccttaattaatcgtttttgtactgctcaggagtacactgattttctgcaagaatttatgagtgctgtgaaacaaaactatggggagaaagtgcttattcaggtaaggcacatactaagaagcctctatacattatcagagctaagtttgaaatagaaatttatgcaactggcaaatgagtagtgccagacttgcacttctatatctgaaaccctattacatctttacctgaatattgtttatcgtgcagtttgaggattttgccaaccataatgcttttgatcttcttgcaagatatggcaccacnnnnnttgtattnnnnnnnnnnnnnnnnnnnnnnnnnnnnaat

SEQ ID NO: 3509 - DNA, 717 bp, Zea mays
  misc_feature (707)..(713): n is a, c, g, or t
tttgagctgctatagcaatgaccaaccagggtgttcaagtgttcccagagataatggttcctcttgttggaacaccacaggcatgtgtctttttactttttatatatcaatgtatgtacacatactgtctctgcagttcaaaaaaagtgaccaaatccatttgatgccaaaaccgcacaaacaaacagctaattataatagctgacgtttggtatttccaggaactggggcatcaagtgactcttatccgccaagttgctgagaaagtgttcgccaatgtgggcaagactatcgggtacaaagttggaacaatgattgagatccccagggcagctctggtggctgatgaggtagggaaaactaccaagttcagaatcgcccagaactttgccaacaagtttgtttatctgtgcattcctacgctggtctgaaatctgtggctgttgttgttgtttttttggtttcgtcaacctggcagatagcggagcaggctgaattcttctccttcggaacgaacgacctgacgcagatgacctttgggtacagcagggatgatgtggggaagttcattcccgtctatcttgctcagggcatcctccaacatgaccccttcgaggtaactgttgcaactctgcctgccaccctcgcatgtcgcatctgatgtgtgactgagcatctcatgtcgcgatcgcctttcttttggttgnnnnnnnaacc

SEQ ID NO: 3510 - DNA, 717 bp, Zea mays
atgatccaactagcctttttgatatacagattaagcgcatacatgagtacaagagacagctcctaaacatattgggagctgtttacagatacaaaaaattaaaggtaggtttctttgagttgcctgcatcctttcttgaagtggtgcttgtaccctttttggttttaccatattgagctaaattctttagatgcagatcttttttaccctgttctagtcttgaataggcctatgaaccttgtagggaatgagtgcagaagagaagcagaaggtcacaccgcgcactgtcatgataggagggaaagcgtttgcaacatacactaatgccaaaagaatagtgaaattggtgaatgatgttggtgctgttgtgaacaatgatcccgaagttaacaaatatctgaaggtatgaatgattgaatggacgattgccctttgaacccttcagaaagattaatttgtatttgtgatccaccaaaaagagtaaccctttttctatactactacatacaggatggtccatatcatttacttaaagtgctcttttccttttcctgccaggttgtctttatcccaaattacaatgtatcagtggctgaagtgcttattcctggtagcgaattgtcacagcatattagtactgctggtatggaagcaagtggaacaagcaacatgaaattctctctgaatggttgtgttatcattggcacccttgatgga

SEQ ID NO: 3511 - DNA, 768 bp, Zea mays
  misc_feature (409)..(762): n is a, c, g, or t
gtcttcacgcgaaagcagagacaggaaagacgtctccagcagagagcatcgacgtcaaagcttccagagctagtagcaaagaagacaaggaggcaacggctggtggcaagaagggatggaagtttgcgcggcagccatccgatcaagataccaaatgaagccaggagtccttggtgaggactggactggctgccggcgccctgttagtagtcctgctctactggactagccgccgctggcgcccttggaacggtcctttcctgtagcttgcaggcgactggtgtctcatcaccgagcaggcaggcactgcttgtatagcttttctagaataataatcagggatggatggatggtgtgtattggctatctggctagacgtgcatgtgcccagtttgtatgtacaggagcnnnnnnnnnnnnnnnnnnnnnnnnnnnnnnnnnnnnnnnnnnnnnnnnnnnnnnnnnnnnnnnnnnnnnnnnnnnnnnnnnnnnnnnnnnnnnnnnnnnnnnnnnnnnnnnnnnnnnnnnnnnnnnnnnnnnnnnnnnnnnnnnnnnnnnnnnnnnnnnnnnnnnnnnnnnnnnnnnnnnnnnnnnnnnnnnnnnnnnnnnnnnnnnnnnnnnnnnnnnnnnnnnnnnnnnnnnnnnnnnnnnnnnnnnnnnnnnnnnnnnnnnnnnnnnnnnnnnnnnnnnnnnnnnnnnnnnnnnnnnnnnnnnnnnnnnnnnnnnnnnnnnnnnnnnnnnnnnnnnnnnnnnnnnnnnnnntttttt

SEQ ID NO: 3512 - DNA, 750 bp, Zea mays
  misc_feature (735)..(739): n is a, c, g, or t
actttacaatggatctaactcatcctcagaactctcttcttctgcctctacttcttcagattcaagtttttcctcctctatctctgatagaacctccgcctcctcttccaactcagttttctcctcaacatcaacaatagtctccaaagatttaacaagtaacttttgctttgatttagcaggagattcctttttgtctttgggtttaacaaatagttgggaaatggaagctggaaggtcaacattatccagaatcctcatctctttcagcttctttttcaacagttcagtatctgtggttccatactttgagactatgttgtttatcagctgtttcaatcaagtatagagaaaagtgtacgttaactcatagagcaagaagtaaatttgcataagcactttctgcacatctaatacctcttcatcaattgtttctattatctcaacatgtcgaggtaaaagtttctgcattatgtccaagctccacttctctagagcttcaggaagcactgtatggttagtgtatgccacggttctggaaatgattaggaaattagcatggattgtatgaaaatgaagaaagaaaataagttaattataacaggaacaacatcacataaacaatattataatcttaattgcacttcaatgtagatgtttcggcacaacaaatacctttctgtaatactccatgcctcactccagcttaatcccttaacatccatcagtattctnnnnnactcaggaatg

SEQ ID NO: 3513 - DNA, 423 bp, Zea mays
ttgcattcttattggaactttagatggtgcaaatgtggaaatcagagaggaggttggagaggaaaactttttcctttttggtgcagaggcacatgaaattgctggtttgcggaaagaaagagccgagggaaaggtacttcacttgtttgtatactgttgccttttgtcaagctaataaagatatctctgtctaactatgtgtgcccacataatgtgcatcaatcaaatatgtaaacgtatcactttgttttccaattgtagtttgtgcctgacccaagatttgaggaggttaaggaatttgtccgcagtggtgtctttgggacttacagctatgatgaattgatgggttctttggaaggaaatgaaggttacggacgtgcagattatttccttgttggcaaggacttccccagctatattgaa

SEQ ID NO: 3514 - DNA, 382 bp, Zea mays
cctgcattgacgtcgctggtccgttttctgatccatgaagcatcgtcgtatgtgactggcaacatcttcattgtagactcaggtgccaccatacctggtgttccgatattctcatccctgtaatcccccccccttaaggtttagttcattgtaccttagtttcatatggttgcataaagcagacagttaaagactccatggaggaagcactgctggctgtatagttcattcccgacaatattccatcatttttgctgtccactattgttttaatgtattttctccagagacgcgtagtttggtacttgtatagaatgacaatctttaagatactcctttattgtctaatctttcaaaacaccaatcaggatgaataaattgc

SEQ ID NO: 3515 - DNA, 402 bp, Zea mays
tgtcccaaagctaaggactccccaagcacaaaaccaaattatccagcacactaacaacatcaagcatacagaaactagaaacaccacaacaggaccacggctctcggcggtgctagccaaaactaaacatagcacacgcaacaccggaccggatctttatcttttaattgcattggtacagcataagcgggcagccaaatccccatagctccttccttccttcctgaagctgaagcctgaagctcatcgagttgcggagaaataacctcccgagcccaaaacgggattattcgtcgtcgtcgtcagtatttcttctttcacagcttatctatgtgtcagtggcactgcacaatttcgtgtgtgcagccacaggccctcagggagttcctgagaccacgtacg

SEQ ID NO: 3516 - DNA, 509 bp, Zea mays
gacattttgtttgttctcatagattcctactttgttctgacagctaagtcgtaaaccacttgcctgcaatgtttcttaagcaaaatactgctttctatctggatgcgcaatcaaaacttgctaacatctcttcaactgatccatgcattcagtttcctgaaagaggaggctgatagaaagcgtccgaacatgtcgaatatgggagagcttttcgaatcaataactggtggacacttgatgcctaagaagagaagggttgagataaggtctccgaacatgttaggaggctctaggcatggcgggcgtacctggcgaatacctgcttttgatatggtggacgaggactaacgagacagatcccgtggctcccaatatgtccaatatgagagatctttctaaatcaatagccggtgaagaggaagaggaagatggataggatgttgtctttagtgttagatcttgtgcttgtagttatcttaatgtatttttgtcggttgataaattcatgg

SEQ ID NO: 3517 - DNA, 540 bp, Zea mays
tttttgtagttatgtcgcccattattggcactcaagttttacgagtccctctgaaaccttgaaatttcatgagtctaattgcattattatcccaatttttgccatctctcgctgcaggttgctggtcacaaggacgtccttgaaggtgatccttatctgaagcagcgtctgcggctgcgtgagtcctacatcaccactctgaacgtgtgccaggcctacaccctgaagcggatacgcgacccgagcttccaggtgagcccgcagccgcccctgtccaaggagttcaccgacgagagtcagccggcggagctggtgcagctgaaccagcagagcgagtacgctccaggcctggaggacaccctcatcctgaccatgaagggcatcgccgccggcatgcagaacaccggctaggccaagatcttcggtgtgcaaataacctgtctcccatgagacggtggacgatatgtgtaggcctgtgagcagttagtacaccggcgccagtgtgttctggaggatttttcatgtcagagcctttctctt

SEQ ID NO: 3518 - DNA, 746 bp, Zea mays
aggtaagctattggcttggaactctttattgctgacaattctcagattcttgattaacatcagttctcagttgattctcattgatgatctgtgcttgaatttcaggtccgcacaaagataggtggtttcattagagctgtattttctgttttccaaggtacctcacccttgcttttcaaaggcagacagtttgtagttgttgcttttccagtttcaacactcaacataagatgctcattggttcttttgcagacttggatttctcatttcttgagatgaacccattcaccttggtaaatggtgaaccgtatcctctggatatgagaggagaactagatgacacagctgctttcaaaaacttcaataagtatgattcaagctttcgatgtacctcacaaatctcagttgcctccatattaattgtactagccatttttatgtgaaagggagatgtttttctactgtattgtcaatcataaaagccattgttttcatgtacaggtggggcaacattgtgtttcccctaccatttggaagagttctcagtccctccgaaagttttatccatgaactggatgagaaggtatgttgatgtaaaagtggacaacttacattctattccaacctttctccttgatgtaattatttcattttccagtgtttacatttctatttggattaacttttattgacagttctgtatgttccactagatttaagtagtgaaccacttctcttcttgcaga

SEQ ID NO: 3519 - DNA, 375 bp, Zea mays
  misc_feature (330)..(334): n is a, c, g, or t
agcatgcacacacaaagcacaacacataaacgactagctagagctatcgcggcgaccgagactctacggcagcgtacgtagcagcagccaccgcctttaagggccatatgccgccgcgccggcagtggttcaaggaggtcgcgcgcgcggtccgctcgagtgtggttcttctctcaagacccctgcgcctggtcgatgcggtgctgtgctgcatccttgatgtcgcgggccttggacgccagcctcgccttggcgtggtccagctggtcggcgcccggcgggtgcttgcccgtcaggtacttgtacatccaggagaacacggacagcgcnnnnncgccgaggccgccggaggtgacgaacccggccgccatgagc

SEQ ID NO: 3520 - DNA, 423 bp, Zea mays
ggctggtcgtcgagaagctctcggtgctgggtctggagggtaccggcaaggaccttgccatccaggtggacggcacggacgccaccgccgtcgcgacgtcgagcccttacttcgcagcaggtggcaacgcgaagctgcaggggggagaaggcgtcgaggatagtaagaacggcgtcatggtggagatcggcgggctggcattgccgctcggaaagagcttcaccatgacctggaacatgcggatcgaagcataggtcgagtgatgctgtgcttccgtctccatgaccatgaatttgcttaaagtcgtgttccgtttctgatttagatgggtagatcctgccatgctgatgtgcagtcagaatccatattctgaaaaaatctgtcatcagggggtgctctgtgcaaggagcagagtacaacatt

SEQ ID NO: 3521 - DNA, 391 bp, Zea mays
agctcccggtgcgtattgcctgttgttggacgacgtgtgcaatttgtaagatagagccaagattcgttagccgcctccttgcagaaggtttgtggaacccctaccctgatcatgtcattgaacttggaggctccccccaaataattaatcatacctaggttaaccaaaatgtaaatagacaccgcgtttcgggttgtcggtggtcagcattcctccttttgaagatgcttgtgatgatatgagaaatcaggtttggtaggggctgctgcctgggcaagtggggtttgtgcatatgggcccaggtagtatggttgcacatgtctgctcacagatgctgttgaatggaaggaatgttgtctagtcgcttgcattgtaaccattggagattgtc

SEQ ID NO: 3522 - DNA, 790 bp, Zea mays
  misc_feature (767)..(772): n is a, c, g, or t
ttgtatcaacagtgaaaacttaatattagacgactgcggtcagctgataaatcttaactaagtattgacagacatctccaggctacctggtaatttgcaaaattatgtgtgtatctcttaggccatccatgtgcttctagtttcaaatagaaagccttcacatcttccatcatcctgtcttcggatggaagattaatccgtcctgatagaactctagcaacccacttactttggagttcaaacagtgggaaggggataacctggaaagaacagaggttggaatgttcaagatctttgagcttcacagggtaggttacaggtgcatcttaactggggcatcaatttgcagcaaaactgactttccaaggcaatccgatgaaggacaaatgaggtgccacttcgggtggaaaaatatgcttgtatagtggatcgacacggttgtcatccacggtgatagtgctgtcatctccaaggaatggaaagtcatacaggtagctaggcaacatacaaatgcaagaagcacattatcagattccaaattaacgcaaaatggcatgcttttgtaggaaacgggatgcaagtgatactgcagatcactatacccagtgcagtgcatgataacatcagctttgattgagctgccatcctggaacaccacagtgccatcctcctgcgcatggtcaatctgcagcccgagcattagattcgccacaacactaactgtggcagctcctccagtagataaaagcttccatatcttgattcannnnnnataaactcataaaaggta

SEQ ID NO: 3523 - DNA, 404 bp, Zea mays
gcattgctgaaagttggtaggattgatgaagcaaagagcctgttttcagctatggtgctccgtggtccagtgcctgatgtgataacctacagcttaatgatcaaaagtcatatagaagaaggtttgttagaggagtctgatgatctttttctatctatggagaagaatggctgtgctgcccactcaggcatgctaaacgtcatagttagaagactacttgaaaaaggagatgtgagaagggctggaacctaccttaccaaaattcatgagaagaacttctccgttgaagcttccaccgctgcattgctgattcgtattatttcagagaagaagtaccagaaagaagtaaagtttcttcctgaaaaataccactctttcatggaacctagggatgattgagacct

SEQ ID NO: 3524 - DNA, 424 bp, Zea mays
cagtggtggtgctccgaagaatttggtatgggaggctgtgaacacccatggataaatgggatgaagatacgggctaatggcaacttctggtgttcagcttggtgcccatgtgattgtctggatgcctttcagttatttagagatattgatcattcaacctgtctgagtcaggttggaattttcgtgttgacaagtggctgtctatccagttggagagttcatgcttcaatagtctggttgttcacgggatgttctgttctccctatcacggtaactatatgatgatgatccttgctttaattcatgaacacttgtttcaagattatgtccattacattttgcttgcattgtcaagattgtggattcttggtgttcatgacgttgtaatgttaatgaacggctggtaacgccatgtggtactggt

SEQ ID NO: 3525 - DNA, 442 bp, Zea mays
  misc_feature (437)..(437): n is a, c, g, or t
gttttgttagcctgatattgtaataagcctggttctaagctcaattttgttgatggctcaatgctatgctcatttttgtttccagtctgatctttacaccttggttgatggctttgtcatccgcaatccatccagaacgaatccagctaacccttcgattgagcttggacctgagttcaagaaggtaaagcagtttgtttccaagataatgaagataccttccataatagagttccatcagcactgagaatgttccttcacaaaataatgtgttgatgaaaccattgatcagtaaatactgcacgtctgcactcctttcaactggtgtcaaatcacagcaagcactgatgaaatatttcccccctaatgcaggttgccaatttccttgctcggttcaagtccatccccagcatcgtcgagcttgacagcttgaaggnttctg

SEQ ID NO: 3526 - DNA, 558 bp, Zea mays
aaagagttctgctgcaatggtacagtggtccaggacccagaacttggacaggtatggtactcctgatgaactcgtgtcccctaggccatcgactttagcctttctgaattatcttgatggattcggttctgcatgctgcccgctataggtcattcagctccagggtgatcagaggaagaacgtctcgaatttcctcgtccaggtacgcaccattcggtgcaacaccttgtgcgcttagagacatgtagcaacgtatgtataaagacaacgctgattctgttcctgatgttgtcctggcaggccggcattgtgaagaaggagcacatcaagattcatggtttctgagcaaccgccgggtccatagcaaaccaaccctgcatgcagggccagcttattatatataatatctgaggtggagcatatctatctggctgtgtactacaagcaggcctagtacgccgcctgcgcgttcctcctattacacataacacatatagccccctccctgcgtgtatgcttgttgccgtcgtgtcgaatcttgtactacgaggctccatc

SEQ ID NO: 3527 - DNA, 495 bp, Zea mays
ggtgcgcgaccgtcaatacagagaccgtaaaacaagtgcaagcaactgaagtatcctccaaattggtatttttatttctgctcttcgggcaggtgtttaggttgtttgctgcacctcatactggtggcaaatcctcaacggcgtctcattagacaccggtctttcctctgaccagagctccatgttcacatcaccagttccccagtgcacaaagcatttgctaacctccctgggattaaaccggttcaccaagctcagcccgacacacttgtccactagcatccattctcctgtgaatttgccaaaagtaaattagttcacagaggtgaagggtcttcaaactgtgcagcgcaggtaactttaccgttgggtttgaggtctccctcgaatgttatttctcctgcctccggggagatctcttgctttgaaccattgatggccgtgaaagcaactactacctcagttgggtgcagcagggtgaatgtaggatgaact

SEQ ID NO: 3528 - DNA, 422 bp, Zea mays
gacatgtcatgcctagagttggcacctcaactctcaaacagcacctctccgctgctcgttctcgccatgggcaaagtggcaccgctcgccgaaagtacaagcacccttcacgaagttctcgcatagcttcgtcttgtagttgctcttgccacccagaccaccgcctcggcctccagatggagccacggcagcagatgagtttttcgccagcatgctcgtgctgatggtcgcgatgaggtccctcaccatttcgccggcttgcttgatctggtcaaaattgccttccagctcaatgttcttcaggttggggctagactcgtggtcgcggatacagagcttgacgcctgtaactctgcttatctgcttagtgttgaccccgcccttaccaattatgccaccggcaagagacgcatccacactga

SEQ ID NO: 3529 - DNA, 730 bp, Zea mays
gcagctgcaccataccaaaaactgcgcagagagaaagaacgtgacaaaacaagaaaggtttttgttgaaaagactgacatgagagccaaaagaatggctcgaaaagcaggtgctctagtatgtctcttattctatgcatgattgcttgtgtattttatggcgctctgtaatttatgttgcttgcgtgttttgtgaattgtgataaatacgatgcattttactatctgtctgcttgtgtgtgctctggttatggtacaaacacgcctgtccagtttagcctattcatgagacttaaccgctcccctggttggaattaattgacaggtcatatttgttgtggacgctagtggtagcatggctctgaatcgtatgcagaatgctaaaggtgcggcgttgaagttgcttgcagaaagctacaccagcagagatcaggtaaacctttacttcatgttgcatatcctgccatgctgaaggtcatcttggattgtgcttcccatttaggatatacatcatttgtgtgtgtggtcgtgtgaatagttcgtataccatcaatgcttattgatctgccttagctttgtgccttggcatctctctcaggtttcaattattccttttcgtggagattatgctgaggttttgcttccaccatcaagatctatagcaatggcccggaaacgtcttgagaagctaccatgtggtggtggttctcctttagctcatggcctaatac

SEQ ID NO: 3530 - DNA, 350 bp, Zea mays
  misc_feature (78)..(78): n is a, c, g, or t
  misc_feature (305)..(309): n is a, c, g, or t
  misc_feature (318)..(328): n is a, c, g, or t
  misc_feature (335)..(343): n is a, c, g, or t
cccttctggtctctacggccgtggccaaaggacctgcaggtacgtgtgcttgccgagatttcatctagctggctactngcttgattggacgaaataaagcaagtacgtacgcatgatgctgctgcgcgcagggccgaagaagcagtgctggtgcggcgagtgcaccagctggtcgggcgtgtggacctgcgacgacctcctcaccaagtgcgccgccacctgcaagaactgcgtccccgtctccacggacaagggcgccaccaagtacagatgccgcgacttcctccccgaaaactgcggctgcnnnnnccactagannnnnnnnnnncggcacnnnnnnnnnatccttc

SEQ ID NO: 3531 - DNA, 474 bp, Zea mays
agatgaataaatgcaaggcataccttgtcaccaggtgtcgaattgaagtcaccagcaatgatcactgaaggtttacaattatatttatttgagatgagttgctcaaactgagatactctcgaaagaagatattttgcctgagccaactttacatcgatccattgtgggtccctacagagttatgcatcaaccagaaatttatacatttgctggacaactgccaaacaatgtagctgagactaaaaacaacaaaaatgtgcagggaattgtgaaagcaaattccaaagagagtaaaattctgtttcacttgccaataaatatgtgtgtttgccacaatcaaaatttgatcacaaggatcactaagcttgaaagccgcgagtaaaccaacacagtcccgcttcaatctaacgcgtggatcatttggatctccacgcttgctattatctggctttgcattcttgtcttcttctgctg

SEQ ID NO: 3532 - DNA, 219 bp, Zea mays
caaatctacacattgaggaatgcaccaaagaaaaagaaaaaaaaaggcgtatgagatatctcacagaatagtacactacagacatagtaacaaggttcctaccagcctgcctggatacataaatcgctattccatctattaacttaaaccaaagaagcatacaatgatgtaccacaatataatatatgatgggcaaagtacacgcaccaatgttagcaa

SEQ ID NO: 3533 - DNA, 422 bp, Zea mays
gagcttgttgtggttgaggtccatggcgaacaagctggcaggccttctgcgggagctgttgtagtcctccaccgtgatcaccaagctatggagttgtacaaccccccaacattcttatagcctgcacgcacaacccgcacccaaaaaatcagagttggtgaaacaaagaacctcgattttggctgggtgaggcacacaaccaacctccgcaaggcacgtgaccttgccccggcaggttgaggcgtcgatgcagttcaaggtgaggcgtgatccgactcaggaggccacggtgagggtctccggtgggggctaggtcaagcgcgcgtggttgttgagcaggttccgtcaccagttcgtggtcccgctgggccacctcgagcacctcgtcttcgcagcgctgctggaggaggccgaaagcgatt

SEQ ID NO: 3534 - DNA, 248 bp, Zea mays
gtacgtacgcatcatgctgctgcgcgcagggccgaagaagcagtgctggtgcggcgagtgcaccagctggtcgggcgtgtggacctgcgacgacctcctcaccaagtgcgccgccacctgcaagaactgcgtccccgtgtccacggacaagggcgacaccaagtacaggtgccgcgacttcctccccgaaaactgcggctgcaagatccactagactcatccacagcggcacagccgatggatccttc

SEQ ID NO: 3535 - DNA, 369 bp, Zea mays
cgacgcccaaggaggatgtcatctgggagcttcgggtggcggtccacggaggacgtggtggcttgccactctgagagttcgcttgtggcagtcatggcccaggcgcttgcgcaccgtgtagggtacgtctgggtcgctaatgagaccagcggcgcgctcgtcggggtagtgagattcgccgacgtgctcgcggtactccgggagcaactccggcctcagtcggtcagtcccaggtgctagctagtgctatgcagataaaccgtgatctgcgtgtcagctcgcgcaagaatcaagatctccgacgctaaaacagttgctagtggttctcttccgtgtcaatccgtctcagtcaagttcggactgaagatg

SEQ ID NO: 3536 - DNA, 385 bp, Zea mays
cacgggtatgggtgaactctctcggggcgaaaactgtagctctgcccccagagcatggattaacaagccgcaaaactgtagctagtatctctttctctttgggatgtacaaacccgacgacgaagcaccatcagttctgatctcgagcgctcaaggcccgctctcatctcatcccatctcactgtatgtaactctgtatatatgtatgtgtacagacagctacactacactcaattcccctcccgattcctgaagctgcaactggtggcctccgccatggcccatggcgatccccaccatgccaagaaacctcccctctctgaacagtgaacacacattggtggtgcagcagcagcagcagccagacatcattgccagccatagc

SEQ ID NO: 3537 - DNA, 670 bp, Zea mays
  misc_feature (662)..(667): n is a, c, g, or t
ataaaaagagagattactgacagagagtaccatcaggtgtgtaatggaatcacttgtttttaatgatggtccattgtgtatattatattgctcaacagctaacttggtgcactaataaaagctgtaattttgttacaatcataatatattaccatgcagattcatctagtcataccatctgatcactattgaagatgcagcagaaaattacttgaaacataacagccacaatcctatcataattttgtgctctttgacaggagtgcttctttaaaaggacgagtagttgtggctttttgttagcaacatgtttcgtagtatttcaatttctaatgtttgaagttatgacatgcatgagtaacttttaagttgacatgctttggttacgtttaggttgtgacggagatctgcatttctacagaagatgggcacttgctgttgaaaaatggtgatgagccctgagttcgctatgatatgccctgtgaaggtccaccaaggtggaatcgtctctgatgcgtagaatagggtcattcggagtttgggatttggccggtgagaatgagtattgatcaggcagttcaagatagctacagcaaactgttctaggtggctttgtcagccatttttggctcagcagtttttgctgggtgctaattgagcgnnnnnntcg

SEQ ID NO: 3538 - DNA, 391 bp, Zea mays
  misc_feature (299)..(301): n is a, c, g, or t
aacgactccccggcactagtttcagctaatgtaggcctggccattggcgctggaacagatgtcgccattgaagcagccgacatcgtcctcatgaagagcaacttggaggatgtgatcactgctatcgatctctccaggaaaacgtttttccgcatacggatgaactacgtgtgggcgctcggctacaacgtcattggcataccaattgctgcaggggtgctcttcccatcgacccggtttcgcttgccaccatgggttgccggcgccgcgatggcagcttcgtccgtcagtgttgtctnnnggtccctcctcttgaggtactacaagagtccaaagaagtttgacaactgatgacaccgcccggaccggagcgaccaaagcagtgttatta

SEQ ID NO: 3539 - DNA, 373 bp, Zea mays
ctgaacatggcatgcctacaaattataacatgaagtaaaaaggcatgtgttcttaaatgttctctcccctctgccgaaaccaactaattaaacttgggtgagaaaatcgacaatttaggaagaaatactatgttaataaaaggcatgtgtttatcagctaagaacaatattatccgcacattagagatccagtagggcctgacggaggtaaattagaaccttgcagtcatcaaagcagcagactaagaacagttaaacacatggtcgtcacacaggcatcaacgaacgtagagcgtcttgatcctccaagtttcagatttgctactgcccttgaagtccgatgtaggggccactttaacatccgaatgaacct

SEQ ID NO: 3540 - DNA, 417 bp, Zea mays
tcatatcataaggttgctggaataggatcaggccattgcaggaatccagtaagacgaggcgatggatcccaggctgttccgtcaggaaggagatgaagcctgcagggtcgacaacgtcctgaggcacggatcctactgtcagtggcaggtccaggaagctgaagctgtggcggtccttctctggattcatgtagatgagtccctgcatgggttggcggagcttcttacggtggtcgggaccggcaatgaggtcgagccaggccttggacacgcacttgaaccggcagatggacttggcggggacgcgggagaggatctccacaaggaggtcgtcgtggaggtgggccaccaagcccgcgcctgcctgcttggagctgcggtcctccatggcacccatcgatgaaattaacgatcaga

SEQ ID NO: 3541 - DNA, 429 bp, Zea mays
tcttatctaaaggtgcacaaaagaaaaaatctcctatagctactgcttcaaagacacatggaggctctccaaaaggtatatatgttggttctttctgattagttttggttctttcttatgttgcttatgtgctgatttgcagggaaaacaagagcaaattggaattctatgttagagaagacccttgttgacttgttacatgaacacaatacacctgaatataagggtaacaatggttggacacccgatgcatggaacaagattgccaaggaatttcaagagagggaaagatatgcaggtttctcaaaagttcaaatccaagaaaaggaaaaggagttaaagagagattacaggatgttgaaagatgcgaggaaacaaagcggagtttcttgggatgagaaaaggtgtatgattcaagctgatcccccg

SEQ ID NO: 3542 - DNA, 397 bp, Zea mays
atgtacagcagctgactccaagaacctgctgctgctgctgccaggaagtggtcctgttctggagccacctgacaattcttcttctgctgctgctgctgaagacgccaaagtacatacgccacttgcgcctattccaccgatgcagtggctgtcagagaaagggactccacctgcatctcctaaacacagaacaccatgtttccagcaacaatttggtagcagtgggcaatctgatgagaagccaagccaagagcacgaggcttcagaccacagcagcaatctgctgcaggagagcgtgttcttctctgcggcacaagagctagcgaagatgtcccctcctcctccttgggtgccaaggcccaaatatccactgcttgatgttaaggcactacggaat

SEQ ID NO: 3543 - DNA, 305 bp, Zea mays
tatatttgacaatatgtgtttcttttcatttttctcttgcagattcactaagttatacatccataatatatgttgctatcattattacagttgtattcattattattattgtagaaattgctatcatcaagttgataggtggacaaattccaatgcccaagttatttcccaccgttaatgatgtgaatgtcataggtgtataaatgagaaaaaatgaataattggttaggaagaacgtcagggacaccactgacaacggctggtcaattccccttggaatttacgcttctctttttttattgctt

SEQ ID NO: 3544 - DNA, 374 bp, Zea mays
aaatcctactgcgagaacgccctgcgtgtctatgccaagcccgcgccgggtgctgcccctgatgagatcgctggaggcttaatggagattgctgccatctatgaggcgcttggcgatctcgatgaggccctaaagcttcttcagagggcactcaggttgcttgagggctcaccggggcagtggagtactgttgccggtattgaggcacagatgggtgttctgtactacatggttgggaggtatgcagattcgaggaactcgttcgagagtgcggttgcaaagttgagggccattggtgaaaggaagtcggcatttttcggcgttctgttgaaccagatggggctagcttgcgtgcagctgttcaagatagacga

SEQ ID NO: 3545 - DNA, 356 bp, Zea mays
ggtgagctgaatgaaattggccaggagaggaaacaatcggtctataaaaaagtttatagctaatttagatataagatcatactttcttatgattgaataattctctgtctgtgttctaactgcgtcctttctcagtgttatactgtcccaatttacagaacaacagatgaaccgtaatgagtcattccgaagatagttgaagtccagtgttattaccgcaattaatatctacctctccacattatgccccttatcttactccatcagtacgaatggctgatattaatgtgtctcatttttagttaatctagctgttgtatctaacttagatatcaggctgctgaaattgcttaaag

SEQ ID NO: 3546 - DNA, 520 bp, Zea mays
  misc_feature (478)..(480): n is a, c, g, or t
aaagccacgaaggacattgaatcacagttggaaaaggtcactattgcttgcacttttgctcatggatctggatctctctgttttgtatcgtttaaacatgttctggatgcaagtcatgagaccactgcgttttttgtttggtatgtacattccttctcgttgaaggacctaacacaaaaacacttttatgatattcctatatagatctcctctccattgctgattcttcacggagccgcagacatggtaaccgattctcaggtcagcaaattcctttacgagaaagccagcacgaaggacaagaccctcaagctctatgaaggcagctaccattcaatcttagagggagaaccagatgaccggatttcaactgccattaacgacatcatttcatggctagattcacactgttaaatacccctttgtctatagcctctcatgtcctcatccattgttttggatttatagttccttattnnngtaccatgggtctctagtgctttaaattttgccatggtgt

SEQ ID NO: 3547 - DNA, 362 bp, Zea mays
agtcttatacttatcagaagtaagtttttgatcctctattttattacagattttgtgattccagatctgttgacctcaagccagattgggtacaaccttattgttgttttgttgaccaactatagaaagaaaagctaaaactctaccctctgcgcccaccttcaaggtcgctccctatcttccttcactctccatcaaagctttgctcgcatcaaattaaatttcttttcgttacaaatttagcttcattatataatattttgctcagtgaattgatcaagtttggtgcacgagtgtcatgctcctaggttttgtactaattgaagaagtagcaaatgtagttcgtggtggtggtttaagtc

SEQ ID NO: 3548 - DNA, 380 bp, Zea mays
gatcgattcgatcgtatcttaaaccctcccccctggcccctgctacgtgccgagccgcccgcgcccctctttggcgacggccgtgcgcgcatatgcatggccctcagctcgaaaacctcgcgctcaccgtccacttccggcggcggtatccgagccaccaacaagcatgggggcgggggccactgaaatccaggctccctctttcgtcttgcttgcctgctgcgtgctgcctacgcactcactgagctactgcaggctacagctgctcgtcgttgggcttgggcgttaggtacgtgggggcagccaacaagcacacgctgccattgtactcagctccgctgaatagcgcctgattaagtggggctctagacaattatatt

SEQ ID NO: 3549 - DNA, 424 bp, Zea mays
tggaggtggtggtactggtaggcgtttctgtggtggtagtgcctatccttattcatgaaggagaacctagaagctagaagccttgaaaataaattaaaccctcgagatgactaacaaattgccatttaacggatttttttggtatagctgaacaggcggtgtttcagctggaaatggaaacagggggaatgggcagcggcctgtaacgactttctgattgagcttgcggcgctcttctttctcgacgtatagacggagttctgtgagcagtatggaacctgcttgggtcttgatttgtaaatgggacgggtagaaagcttagtcaaataactattgcttttggcacttatggctgtggttgcatttataggcaacccagttgtacagatggtagtgtacaagaattttgctgtgctcttaacat

SEQ ID NO: 3550 - DNA, 414 bp, Zea mays
cgatgtacctaagctgaagcaaatcttgttggcaatacccgagagtcgatacataacccttcaggcaaacgtgaaaagggtgcagaagcattttatgtggcatccgaatcctgtcaagtatgacattttccacatgatactacactcagtctggtttagcagggtgaaccagatccgttagagcagcacctgtggttcacatgcctgaattacatatggagggttgtttgctgacccgtttttggtgtgctcgtctgaggaagctgctcatgtggtgggatttggattgtaatcttgtcgacacagctgttccgtgctcaaggtgctgctgaatggagatgttgatctgacagtagaactggcagtctgtggataaaatacagtatatataggagcaggcttatgactgagttc

SEQ ID NO: 3551 - DNA, 790 bp, Zea mays
gatgtcagtttttatatgtaaattagattctgaatgcttcatatttatttgactttttgttggggttgtacagtactagaagtggtggagcacatggacgatatggaattggggactggacatatcttcaatgcagagagtacctgatgagtgtatgttgacgtgttgtagaggttttgtattctattttttctaatagagggatgaatgtatttccaatttgaaggaattataatttgcaggaaaaggacaaaaggagggcatttcttaaaatctgcagcaactttaggtctacttccatttgccaatgacccaacatttacatacatgcatgatgcgtccatgaaaaccatatctagtgtttctctaactattcccccccccccccccccttttttacaataaccaggcctgtgatgcaccacttctttcttgaaagattcttgctgcctgctgattggttccaaagtagacttgcttacacaaggagtgtagcagcaagctcgatggtaatttcttttagtcatgtgcaacttgaggagcttcgtggactactgagactatatgttgcctattgtttttcatggattcaggtaggatatatagtcggtcttggggatcgccattccatgaatattctcatcgaccaagacacagctgaggttgtacacattgatcttggtgttgcatttgaacagggtctcatgcttaaaacacctgaacgggtatgcgatggaacatgaccttctgtgaatatcaattgccaagtcttcctctgtagaacactttt

SEQ ID NO: 3552 - DNA, 386 bp, Zea mays
  misc_feature (72)..(75): n is a, c, g, or t
ctctcaggccaccgctcggccgtcgtccaggacccccttgtaggtagtgcctccccatccgagctcatgcgnnnnaaccattttccggatgtacagctacagggagctggccaaggcgaccgaaaagttcacgcatgagctcggatggggaggcactacctacaagggggtcctggacgacggccgagcggtggccgtcaagagactgggaaacataaggcagcacagcagagaggagttccacgacgagctgcacgtcatcgcaaggatcaaccacatgaacctggtaaggatgtacggcttctgctcggagaggtcccacaggatgctggtcctcgagtacgcggacagagggtccttggccgacgtgctgttcagaggcagag

SEQ ID NO: 3553 - DNA, 380 bp, Zea mays
cagaaatacgcacaaatcgaaccaattatgaagaatgtatccaatttccaccagatttgatgtctagtaacttaatagtttaatgttgttgagacttgtgtaactgccatgctgtttctgaaatttactctataatggtgcatcatctgccaacgtagcatacacctagactagagtagtaccaagcagcaacagttaccttccctccctggggaaaaaggcgcaaaaaggaaagcaggcaggcagcaaactctcaagtagcagcggcagctccaggctccgtctctggctgcgctgctgctccaggctccttgctctggcagcgttcaaggtagcactgcaggatggcaagcttcgcggtctcaaaggcacagtagcct

SEQ ID NO: 3554 - DNA, 376 bp, Zea mays
tagagtatagtttacgacaaaaggtgttctaggaccaaaggatcgaagagtgcggcctactgtacttgaggattaggaatatggaagatagggttctcctaagacctaagaatagtagagaagcaagggttaatagaagcaccgctgatgttggtccaatctagctgggctggataagaatcgggaagactcgggcaaactggcaaacatcggatgagattgcaccttacaacatagaaggaagaactaacataacaatcatctcaaaaatccagatgaaggagagaaggcagcatacaaataataaatagaatatctagggtggtaacacctgcaactcggcaaggagaaggaatccctgtagtagcgagcagtg

SEQ ID NO: 3555 - DNA, 391 bp, Zea mays
ctgggtctggggtatggtgaaagaagcactatttgggaagccagtgaacagtgatctgactcaatcaacttatgtctacccaaccattttgattgcacttatctgtgcattcatgtcgataacttacaatgtaaagaagacagcaagaagtagtactcctgtttctatcgctaagccactgataagttctgccaagtcaaaactgaagtagacttacaagtttaatccttgtaactcttttgagatatttatttatgtgcaaaaaaaaacaggtttgaggatgacctgatgatgcttttggtgtatatctgactctttcaatactgtaacattcagttttctttattgtattaacaattcgcaagggcacaccgtctgtaatgtttacaaa

SEQ ID NO: 3556 - DNA, 387 bp, Zea mays
tagcatgaacctgtcccacgtcaggtcactgactgtgtttgagagcctggacaaactgcattttaaatcactcaaaactagaatggttcaagtattagacctccaaggctgcagaggttttagggagagccatgtcaaggtttcagacataagtgaaatggttcttctcaagtatctgtgtctccgaagcacggacataaaatatcttccccggaatatacacaagctcaagtacttggagactatagatataagggagacagaggttcaacggttgcctgcaactgtaggaaagcttcaacgaataaagaacatactcggtggagataaaagagcaaggaaaaccctaaaacttcctagagaattcaagggaacaacgagaacctt

SEQ ID NO: 3557 - DNA, 388 bp, Zea mays
gctgcttggcagctcgtgcttcagaaagtaggtaagaaacttgaatgtccctttataaacacgccaattcggatctagtggcaaggtattgttatcagtgactatcaattgcatcaccatcatgtctatagctgcacaggatgatgcacgacagaacgagggatgaccattttatactggcagcaatactagttagtactaatcaagattctgacacgatcacactattaatttatgccagcattgcttattccgcatcgattggatttgttccggatctcgatctctttcaaggcatcagcagattcttgatgctcttctctgtcctctttgcagatgtgtgttttggaagttttttttccctttcgaaaagctctttgcagatgtg

SEQ ID NO: 3558 - DNA, 530 bp, Zea mays
ctcgatccgcaagtctgaacggacgactccgaagcttacttgccagagagcagccgtttaggtggcggcgatccttccgtggttccttctcggttctgcctgcctgctgctgctgcttcttcttcttctggcggggccgaatcgagagcgtgtccgccggaatctctcagtcatcaggtcagtggaaacgaggctccaaaaaaaatcccctctttcttcttcactctccccctattccatccttcctgaggattttcttctctgcttcattttccgcctcttcgacgagtcctgttcttgttcgttcttgctcctcagtgaatgcgctgcttcccatttcttcccgaatcgctttcccctcaatgctgatccgattactctcactcacaggcaggctgcagcctacggcggtcgattctactgggattctacactactcgctcaagagtcgagactgcatgcggctccaagggaaattaattaagatgaggtcttttccccacctgctgctgatcctggcgctcctcttg

SEQ ID NO: 3559 - DNA, 431 bp, Zea mays
gaaggagagcgaacagccctgttcacactgcctcaccatatgattccccacacctgccaatatcaaatgggaccattaacacaaacttcgtaagaaatacaggtgatgtcagtccgaggataccagggctacctggatatgatcgaatgccaaacacatggactcctcccaacggcagcataccatatagagttgttgggcatgatgttcatgctgcctccatggaaaacactagtgcctttggtcctaggtctaatccaactgctgctcagtatgttcagcatttcattgctcctgaatcaatccagcatcaacctggagctccattgagggaggttcatcctgaaagatcataccctgaacccatgccgtcgtcatatgttgatggcaaagtagctgtttctgcattgcctctcactgatcaattatcc

SEQ ID NO: 3560 - DNA, 1006 bp, Zea mays
aaataatattctgtaggaatgactgaaccaatgtaaatcattgatatttgtatgttcatcaaatcatcacaaatagctttacatgtcattaaaaaaatgcaggttcttaggtcatttccaacctcagcaagggaaacctgcactgtggaagctggactcagatcagcattacaacattgggaggcaagggactttaaaagaagagattggaaggtgcagattataagcttccaatatttcttgaaatagctatatcttatattcaccttttgtttatacactttgcattttagtgatggtttactacttaacacaagcatttttctctacttcagaaaatcgcattttttcacatgaaaaagttagctaggattttgatgtattgaccatgaatcaatagaccctatttcaaagtacaaatcgagttttttttaccctgtttcaagaaccacttgttctaagagaactgtgtcaaaatgattatgcaactgatataatgcttgggaacactggatattgtttaaaactgcaaaggcaacaagaacttaggacagcaaaaactagatacttttgcagtctggactcaatcggtagttctgccaattgtgctactgttgtgctggttctttagactcttctaatttttatcaatcctcatcttgttttaccagatcgttcataaagaggtcactatcagatggtaacatactgttggagaacaacttgcctgtaactagctgtaacaatgaaacaaacaacacagaattgcttccaatgcaacagctggatgatattagagaacctaccgactctgcgccagagatctccatatgtgaacctaacccgtgctccaggtgcgtcattacttgcatgaatgtggtgggccacttgaatttgttttttttacgtgaatgcaatacgagctaattgtgtctgtttatacatcttcagtgtgaactacggcagagtgcctggaagacactctatttcagaagagcggcagagt

SEQ ID NO: 3561 - DNA, 356 bp, Zea mays
acacgtcggagcgcacggagaagaggccctccatggcgtactcgggtgacatgtaccccagcgtgcccacgacgcggttcgtgttcacctggttctggtcgccgccgaagatgcgcgccatgccgaagtcggagatcttggggatcatgtcgtggtctagcaggatgttgctggccttgaggtcgcggtgcaccacgcggagacgcgagtccctgtggaggtacaggagccctcgggcgatgccctcgatgatgtggaacctcgtcttccagtccagcaggcctcgccgcgccggatctgcagcgcatgcagagaccatacctcacccatcagtgtgtgagtctctctctgcacag

SEQ ID NO: 3562 - DNA, 612 bp, Zea mays
  misc_feature (587)..(589): n is a, c, g, or t
  misc_feature (594)..(606): n is a, c, g, or t
gctcttcagcgacagcgaagaggtgaaacgtggagcttccaagctggggcatctcctcgctctcaccgtatgcgtcagcagcatctggcctgtgctatcaggtaggcagttttttgctctggagtctggactctggactagacacgcgcggctccctgcaagttcatgtgcgcaagattcctgtctgttttctttcaggcgtggccgtaggagctgggtggcaagtgcgtgtggcgatcataaacgtcggttgctactacctagtgggcattccgatgggtatcctgcttgggttcaagctaaaacacggcacaatggtaaactgaaatcaagttaaaaaaggacgatttcctgtttattcagtattaaccacaatatgatgtttgatcagctgaagcagtgttcatatccatttatttgtggaaatgttcaactttgcagggcatatggatgggcatgttgtcaggcacgtttctccaaatgtcaatacttctcgccactatcttcacaacaaagtgggataaacaggtatgtaccacatctacttcttcctgcaatgcgtttccgcaaatattcgtacaaagatnnntagcnnnnnnnnnnnnntgacta

SEQ ID NO: 3563 - DNA, 403 bp, Zea mays
atagcattgaaccttgttgcattcatctatcaaagatgcaccaatttccatcgttccatgctgagttaaatatctattatggtttccatgctttgtggtctacaattacaaaaggtgattttagtttcatataggactgaaggagccatgttaccgttctgtacgaaaagaaatgctactgcattaaagcattattgcacacatcaaaagcgagttgcagccgtaagctgttctgattttctgatggccatcactttgcaggtacctcgtccctgcagatcttacagttggacaattcgtgtgtgttgttaggaagataatcaagctcagtgctgagaaggctatcttcatatttgtgaaaaacacccttccaccaacaggtctggaaagtcaatgcagaaac

SEQ ID NO: 3564 - DNA, 456 bp, Zea mays
  misc_feature (285)..(287): n is a, c, g, or t
  misc_feature (303)..(307): n is a, c, g, or t
  misc_feature (319)..(319): n is a, c, g, or t
  misc_feature (327)..(328): n is a, c, g, or t
  misc_feature (342)..(344): n is a, c, g, or t
  misc_feature (358)..(361): n is a, c, g, or t
  misc_feature (382)..(382): n is a, c, g, or t
  misc_feature (402)..(404): n is a, c, g, or t
  misc_feature (421)..(430): n is a, c, g, or t
  misc_feature (447)..(448): n is a, c, g, or t
gtgtttcttaataagctatatacttgttattaagcatttaagtccttgcaggataataaggagctgcagcagaattcggctgaagcagtgaaaggcccagtaaaatttgatgaaatgacaggtcttggaggaaatgccactaacagtaacaatgaaatggttgtgattaccgatgagaggcctgcaatttctggacctaattgtcaggaaaatatcccaaacagtattgaggaggtatgttctagtcttcacttagctttatgttagaaagaaccttgcatgcannntaacatttccccattnnnnntcacgtcttatnaagtgctnngatacaaagatggnnnattattttttgatnnnnaaaatcgagtttctccagttnggctactttgatttcatttnnnagtgttatttcactttnnnnnnnnnnaaggttctaattgtganntctctgct

SEQ ID NO: 3565 - DNA, 425 bp, Zea mays
tcagcacctctttcctatggcgggaggaaggctcgtctcgggcgtcttgtacataggatcagcagacccatgaaaaccgcattgtccagaacattcagcaggagctcacaaaatccaggctgggttcaaaagtttctctcgcatcctatggctcaactgccctgggcaagggacgcaaagtccagatcagaaggctcacagaatggcttggaacccgggatacctgaacatgagtataatgtgacaaggaaccttcagtgggctcatggaaaggcaggggaagatagggtgcatgttgttctatccgaagagcaaggatggctattcattggaatttacgatggttttagtggccctgatgcacctgactttctaatgagcactctatacaaggccatcgataaagaactggaaggattgctctg

SEQ ID NO: 3566 - DNA, 374 bp, Zea mays
gtggtggtggtgaccaaccaggtggtggacgtggtggagggggacgccgggaacaccgtggcgtggtcgtcggggcgccgtctgagcccggcgctcgggatcgcctgggccaactgcgtcaacacgcgcctgttcctgacgcgggaggtggaagggaatggcaccagcgggagcgcaaggaggtggatgaaagtggcgtttgcgccgcacctgccagagcaatcgtgcgagtttgtgatacggagggacggcgtctttggcgtcgagccggagaggtaggcgctcctcttggtcttttgtcaggactttacagaggaagtgtgtgaccataacctgtttgatgaaatgtccccgttggtagttagatttcacac

SEQ ID NO: 3567 - DNA, 360 bp, Zea mays
tgcttgtgtttttgatggtgtctccccaaattcgaatgcagttctgcaacagatccaggaggatgccaggctttgggagatggcaggtgctaaggctctgagaaggctgtggccttaatttaggggcttggttcacttgtttttttgttctttctttttcttcctttttctcctttattttcttttgtatagctgttgttcttggtcttctttagaccttctctctacttaatataatgatgcgcagttctcctgcgtattcgagaaaaaaaaagtgttgttgcatgcctgaatagtatttttagcaaataatttaggtagaagggagcattaagataaatcccataactggaggtttgc

SEQ ID NO: 3568 - DNA, 360 bp, Zea mays
  misc_feature (259)..(264): n is a, c, g, or t
  misc_feature (270)..(277): n is a, c, g, or t
  misc_feature (287)..(287): n is a, c, g, or t
  misc_feature (296)..(297): n is a, c, g, or t
  misc_feature (328)..(333): n is a, c, g, or t
  misc_feature (345)..(347): n is a, c, g, or t
cgttctgttggacttgagggggcaacgtaccatccaagcatgccggggatgtctggtgaagctctcctgacaagatcagcaacttcagttagtctaggttaccatgcatcaaccttcggtgggctacagagcaatgggagtgaacctctctttgggccgaagtctgcaagaaatctactcaggagcgataccttttgaggctatatattcaagagaagttaagtacaatggcaggccgagttttcacagtaacggcacnnnnnnccttannnnnnnntggaccattnctggactcnnattctgctgtgacactcgctgtttaccttannnnnngtacctggggtnnngtcctttgctcgt

SEQ ID NO: 3569 - DNA, 400 bp, Zea mays
accaaatagcactggacgatctgagacagaattagaacaccgtcctaatatacacatggacacacactacaaaatttgttttgagccatacagctcagtccaaaacaaagatggctggcaccaggtggtgcccaaaaccagctttctctccatcactgtccatccgtgcctacagaaccggaacagcctggtccatggagacaatagcgtgtcattttcagtgcaagctgggtgcatctgatgcgcacgagtgaacttaattcacagaccccgtccacattagacacctttgtctcaaagtatcatcagtccagcaaagaccagccgtcggtctctgccaaataccaaatgaaaacggcgactcctacgcggttcatcttctctcgaccttctctgcaaa

SEQ ID NO: 3570 - DNA, 399 bp, Zea mays
tggcacaccaaggcgaccgtcgcctgcagcattgcagggtgtttgccatatctcagcatatggatggtgtcgaggtggcccgggcgcatacctagttcagacaaggcgactcggctgctcaagtttgctgcaaatgtgtgcttgactggagcttttctgatgctgtttgccttgcttgatgaaaaggcactggcctatcgtctctttggtttggataagattactgatcctagtcaactcaaatatcttccggctgttcacttcagtacagcggtagccctgtatttctttcggaagcatcgtgctcgtgcgttgccagatctaggggaggagctagggaggctccgatcctatccctccttattgctgcttctccaacagagaagcaagggagaaaga

SEQ ID NO: 3571 - DNA, 445 bp, Zea mays
gtgatccttatgttcctgctggtgctaaactcctccccagtctccagagtaatatgttccagagctatacacactgtcttccttggtctggtgaccgcacccatagattctcttacctcaccatggccaagtcatctggagcagttgtgcatctgggtaaggcttgttctatgatcaccatgtgacactgaagctcaccgagttgatgctcctaacgctatgctgaccagaacagggccatgccaccgtggtctggcgctacggacagcctccacgccggccgagcgactcacgctttctccggccgtcttcacgcgagcaccaaagtcttggtgagtccctggtgctccctgtgtctcaaatttaaactctactatatggtggccacgagttcgggctcgctagcctaaggctgtctccaatagtggagtctcaaacaggagac

SEQ ID NO: 3572 - DNA, 601 bp, Zea mays
tgcattgtactcttcagatgtgaagttggtttctcggtctgatcttttatcgtctatcttcaggtagtgtcacaaaggtaacgaccatcccaaataccagcttgttcttaaccggaagcaaagatggagatgtgaaactttgggatgctaaaaactcccagctagtctttcactggacaaagatgcatgaacggcacaccttttttcaaccaacctccaggggctttggcggtgttgttagagtatgtagtactgtaaagactataaaatgtttaatgacttcgttcataaattttgttcatgttatggtaagagaagatagttatatcacattctctttcattaattatatacctatgtatttgcattttgcaggctgctgtaacagacctccaggtgttgcctaatggtttcgtttcatgtggaggtgatggttctgtgaagcttgttcagataaaagatgatctcgctgcagcatatcagcgttaaaacaagcaaagagggaagaagacatgctagaaaatgcgatggatgcagttggtcacttgatatcattctattttgctttgctcattatacttttgagatgctttactccttt

SEQ ID NO: 3573 - DNA, 356 bp, Zea mays
ggtccccaaaggtcaagaaagggcttattatttcattattcttgtggcatggaaaatttagaaccgttgcaacaactgtgtcttcaatggggtaaatccttatatatcaaaagtgctacaaatagagttcataatccatactctggtgtgctgctcccagctggaccaaaatgactccaggagttacttgccggggcatctatattccatcctttggtgtgctgctgcttgctggagcaaaggcacccccagggcattagccattacattagactagcttttctgtcgtctggttgcttgctgcatcaagcttgctgatgttgttagttgttacccgtgagagttgtatcttgggt

SEQ ID NO: 3574 - DNA, 400 bp, Zea mays
ctctgcgccggcgtcggaggcggatcgcttctcatgtcactcagagtggggctccagttcgatgtgctcggcatagaggccgacggcgtcgtcctggatgtcgcaaggagccattttgggctggtggaggatgagtttctccgcgtccacgtcggtgatgccatacagacgatagagggtttcgctgctgggcaaggggagcctggtatgaacttcagcgcggtcatggtggacctcgactcctcggatgctatgtgcggcgtcagcgcaccgccgctggagatgtctcgtggaagtgtcctcctctccgtgcgcacaatcctaaaccatcacggagttttgattctgaatgtgattccacctcctgctgataagaccttctacaaagcggtgactgatc

SEQ ID NO: 3575 - DNA, 541 bp, Zea mays
ctgcatgtttttatttttttgtatacgcgctacatacatgcttgcatggatgtgcagcaaagagcatggggttcgcgtctagtcctccgccatacctgtcgttggcacctagcaccggccgtctggtcctcacagctcgtggcagcggtgtcagctatgcttccggaggagctgggatcctcgactccactgtaatacagtagtgttatttcattcatgcatcgtgtgttgtgtctttaatttatcagatatagcgagatcaaaaatgtaattacgacctgaaatgcagaacgcgggcaacaacatcccattgtcgaagcaggtgcagtacttcaagtccaccaaggcacagttggtcacgaagctgggctcccgtgcgacccacctcctgctctccaggtccgtcttcctcttcagcgtcggcagcaacgacctgttcgtcttcgccaccgcgcaggcgtctgcgcacaacaacaagtcagctgccgaccagcagcgtgacgtcgccacgctctacgcaagcctcatctccaactactca

SEQ ID NO: 3576 - DNA, 398 bp, Zea mays
ctcgctggggctgtccaagatgggcttcgtggtgtcgtccaaggtgagcgacgaggacgaggccaagaggtacgagcaggagatgatggagttcgggacggcgtcgccggagtacgtgatcgtcgcggccgtcgcgctgctcaacctcgtgtgcctggcgctggcagcaggcggcggcaacgggatggcggcggcactggacgtgttcttcgtccaggtcgctctctgcggggtgctggtgctcctcaacgtcccggtctatgaggccatgttcgtcaggaaggacagggggaggatgccgttcccgatcacgctagcctccgttggctttgtgacgctggccctcattgtgccattcttttgactttgaggtgctaataatacgtgtacgggcacac

SEQ ID NO: 3577 - DNA, 558 bp, Zea mays
ccgagagctaccaccaccgcagcctcttccaagccgaagccgaagccgaagcccaagcccaggtccagggccaagcctagggcgacgcctagccccgtctccctgctctccggcatctcctctccttacgcgtgccgcacgccgtcccctgctgccgccgacctcagcttcctctcgccctcgtccccgccggcggaacccggaaccaggaattcttcgcccctcgccgcccccactaccaagtccaccatcggagacctgaggagccttgccgcgtcgcacctcgactccctgaagcgccgcttggacttgctccacggcgactatgtccgcgaccttgaggcctcccactcccgcatctccaagcgcgtcaaggtggctggtccccgttccctgcctctgcgtagctcgctcactccttcggttgcttcgtcgagttcatcatgtgcgatgatgtgatgactgatgtcatcttctcccgcgtgccctgcgctcagatgcagtcccatggctgcctgcagctagcagaggaagtggacaaggagcagcagaagataa

SEQ ID NO: 3578 - DNA, 434 bp, Zea mays
tagcaatcgctcaacgagacatccccatcctggggaggaagttgattcagaagccagctccggaggcagaagaccaggccgctctgagcgctcgttcgttctcccagtcccagcagtcgagcaacagcttgccaccgtatttcctcaccaacctcctgcagccgctgccgtcgcagcactcactagctcaggctctgccgagctacaacaacttggggttcggggagcccagcttgtactggccctgcccctgcggtgacccgggggagcagaaggtgcagcttggcagcaagctggaaatcgtggacggtctcgtgcagctggccaactctgctgcgaactgacagtgctatctgaaatgcctgttgttttgcttgtgtggctcggggtcgggggttacgttcatggaactgatagcctgagccctgaagata

SEQ ID NO: 3579 - DNA, 381 bp, Zea mays
gcaccgctgcgaactcccagcgttcttgctctgctccaagaaatatcaagcgctgaacagtcatcgttttgttgcgacgtgcgtgtgcgctactcgccccacgtcgtcgtctttgtgtgtctttgtgtctggccagtcccgtcgaggcatctgcaaatcttgcctcttgtcgtcatgttttcttgatctgccaaatcatcgcgcccgtgctgagttctctggccatcacgtttttcttacagacgctcagcctcgccgcgcgtcctgttttctgctcgccagcgcgccctctcggctcgctcgactttaattcccaatcgcgtcgtcgattccgccagttagcgtcgttcgtcgtcgcgtcgcgtgtgtagctctatatac

SEQ ID NO: 3580 - DNA, 578 bp, Zea mays
  misc_feature (353)..(358): n is a, c, g, or t
  misc_feature (360)..(575): n is a, c, g, or t
tctgatgtctgagtgcgaaaactatgatttgtcaagagcaaaattggttagcagaccttttccccaacccacttttttcatacctacaattttttactttccatcatttacagttgcaatcaccaggacacatactttgcaactgtctatacttttttcttgcaacttcttttttcatatatgttttccatttttagtaattagttttctactcctttcttgcaccaggtttttgtccctatcaaagatggtgctcactattttgtatattgcttcaattttatccataagcgtattgatgtgctggactcgaacgactacttcctgaattgtactaatcaggaagaacggcnnnnnncnnnnnnnnnnnnnnnnnnnnnnnnnnnnnnnnnnnnnnnnnnnnnnnnnnnnnnnnnnnnnnnnnnnnnnnnnnnnnnnnnnnnnnnnnnnnnnnnnnnnnnnnnnnnnnnnnnnnnnnnnnnnnnnnnnnnnnnnnnnnnnnnnnnnnnnnnnnnnnnnnnnnnnnnnnnnnnnnnnnnnnnnnnnnnnnnnnnnnnnnnnnnnnnnnnnnnnnnccc

SEQ ID NO: 3581 - DNA, 514 bp, Zea mays
caacagttcttcaacattatgatcagtacttgaactctgagctatattctcatatcaaaatctgagaacaagaacaataaactgaagcagatgaggctttaaaatctgtacttgagaggtcaagcacagagaggagcatagacttaagatgatgaacgtaagtcatagttttaaaatctgtacttctgaccactcgtcattgtctccatttgagacagaaggaatttctgggatcaagtaaagagttgtgttatgaacatatagatgagatgtcatagtttttacagtagaacaagaacagtggcatccaaaataatagcaaacctgaagatgatgacttggtcaggctttctcttcccagaactggtgtagaagtcaatcagacactccctgcagcaacattaaaatccaacaagcaatgggagaaagcatgtcattagtacataacttaacaaatgtaatgcaggctaaaatatcttacctgatcagaccatcatctttaccttctcgtggc

SEQ ID NO: 3582 - DNA, 348 bp, Zea mays
gtcgatgctacctctttcgctctcactgtcactccgtggcggcgacatcggcggcgaggatgccgggaggttcgaggcagcggcaggtagcggcggcaaaaaggccgctctggggcggagcactttggatctgaccatgtcgatcaaggcattggagtgagaagatgtttcacggccgctctggggggtgagtactttggatctgaccatgtcgatcgatccatcaaaggcattggagtgagatctttcaagtactcgtcccaaggccttccaaaacttgcacactgcaccatgagattaattaagtcataagactgtttgtttaagttaaccatgcatgagcagatc

SEQ ID NO: 3583 - DNA, 444 bp, Zea mays
cacaaaaaaatcaaagaaaaatattgatcacacttcacacgcgttgcccatgcgttggtctctcgacgactcgacgcgtataagaatcctcatggcatactcatctgagagtagcctccttagacactcccagtggtggtcgcaaagcaatacatgatcgcctgcagctgggatgcataagtatacaggttgcatgcagtgatacatatatacctattgattgatgtgtgtagactgtagggtatgtggacgtgttcctcgatcgagctagcttcagttgaacttgatggggtagacgcgctgcatgttggggtagaagagcccccagttctgctccacgccgctctgcttgaggttctcgttgaacatggagaagaggatggtctcgatggcgcccgggtggcgcggcgttccccggccgacgtggttgatcaggttctggtt

SEQ ID NO: 3584 - DNA, 414 bp, Zea mays
taaggatgttgtggagaggcttagattgtttaatgacattactacactattttttggaactgattatgtcactgctaacgtctacttcactagaattgctaagattagaaatcagattaggttgtggtcatcatgtggcaatccgttggtagaagaaatgttagtgaatatggtagccaaatttgacaagtactggactgacattcaagggctcatgggcattgcaactattcttgaccctcgattcaaaactgcagtcctattgatatgttatgaggacttacttgttgtgtccggtagtgaatgtgaagatagagttgctaatgtgaagaacttgctagctgatttgatgaatgagtaccatataactgagaatattgagaacaatgagtcatcaacaccatcagttggaaa

SEQ ID NO: 3585 - DNA, 401 bp, Zea mays
acccttggatctgtgtttactcaacagaaatacaaagacaaattagagagtcagtcttgaaggctcttaactttttttagaacaaaatgagaagaaaagcaagtaccttattgcttctaacttggatgccatcatgtttaatggcgccaaatctcttgaactcttcctctagttgttgtggtgtggcatttaatggcagacttcgcacatatatggcatgtgcatcaactttgaagatgattgaaaagcatgtcaaatggtgctggtgccaactgaaatcaacgttttagctccaaatttggatatagataataccttctggatcttgaaagctgccgctctggggattaggggtgaaagctggagcatcagcgaccagagcgggggcaggagaggattgc

SEQ ID NO: 3586 - DNA, 527 bp, Zea mays
ggacgccggggcctctggtctcatctttgctcaatactacaacattcatatcatctacgccacaactgattgtagaggcattgcatgtgttcttgtggacttgaccactgcccttcagatcgaaaaatacatggtggatgcaaggtgagttgcaattgcattactctcgacctaattcccgattgagtgaaactgttactcgtacaactcttacctactctctagtttaagcagctctcctgcggccatgatcgaaccagcgcgcaccatcactggtaaggagacactggccccaaccatcgcaagcttttcctcaagaggtccatccatcgattaccctgaagtaatcaaggtacttagacaagaaagcttagccactgaaccaaaccaaaccaaaccactgtcatctcactgcagtctttgcttccttaacagcctgacatcgcggcacctggagccagcatcttagcagccgtgaaagatgcatatgcatttggctcagggacatctatggcaacaccacatgt

SEQ ID NO: 3587 - DNA, 416 bp, Zea mays
tgtgatcgagctcttcgacgataagccgtttgtggaggatgactcaatcggcgtcttggctgccgaggttgttgccaatgttgagcggtcggttgctcttgaatcaattgactcgttggtggtcaccatgggcaccgtgtcatctcaatccggtggcgaaggaaaggaagcagttgaccatggcgatgtaaggcagaacaacgtggacatggagaacacagttagtagcaatgaggagaaaattgccatgccatctgatgataaggtggatgtggttgatcggctgattgatgaacagattgttgccgtagtccttgtgccagcttgtatagaagctacacttgatggtgccataaatgcagacaaaaccgtggatgcctttgctgatcatcagtgtaagtcgttcctcctttggt

SEQ ID NO: 3588 - DNA, 356 bp, Zea mays
  misc_feature (344)..(346): n is a, c, g, or t
agcagcgcggaggcggccgtcgtcgtcggcgccgaacagatcagcagcctgttcagcgacgacaaccccaacgcctgctccgtcatgtgaatgtgacgctgacgcgtcgcccacgtgtgttttcgacacgctgagtccagctctcaggctcggtgggttttagcagacggtaacaggcggcagggagtagccgtagcgtgcgtggctgctactcgtacgtgtggttaaattagtgaagaatgcttaggtcgtcgactactcgactgcactgcgccagcagaacggagagcaaagaagcaaacctctgccactgatagattctgctgatctagtgtgtgtgcttnnntccctaaacc

SEQ ID NO: 3589 - DNA, 369 bp, Zea mays
atcgtccaccactccctccactcagaaagaagccacacgcagacggcacatcgctttccatggtcgcctcccattaaaacacctgttatgacagcttcttccggcatcgttgagatctcccaatctatgtgaaacactcgtcaccgctacattaactgtaagtgttaagttagctgatcaatggtgcatttccaacaaacgcagtatgtttttcactgtctaaatacccaacagggtcatgtcattccaaccagatgctgttttctgcaaaaaaaataaaatgagtataaaaaaaaggtgtgataaatgttgtttggggtatcatattcgttgaaataagaacagatatgaaatgtctgctgcatttgc

SEQ ID NO: 3590 - DNA, 705 bp, Zea mays
  misc_feature (579)..(579): n is a, c, g, or t
  misc_feature (581)..(581): n is a, c, g, or t
  misc_feature (591)..(612): n is a, c, g, or t
  misc_feature (616)..(618): n is a, c, g, or t
  misc_feature (620)..(635): n is a, c, g, or t
  misc_feature (643)..(687): n is a, c, g, or t
  misc_feature (690)..(690): n is a, c, g, or t
  misc_feature (692)..(701): n is a, c, g, or t
ctggtactataggatcatccgcgctttcatgtggccgatccgatggagtagtgtgtagccggacccgcccaaactgctgctatcgtgttgctatctatctccatagaaactggtaatttttatccctcctacagcttctttagcctcactctcttttacattttaccactgccaggattcggtaatactttgtgataatatgaataagtcatcatgtaatctgtggagggaacctgttcttgcaaacttcctgcttcctattgtgtatctgtaacaacaccatgtatgtgaccacgacctcttattttcctataacaacttttacaagagttggtaattgtgctttgatcaatgtaaatttcatattctattctttccaagagtgggtaattgttttctatgtgccaggctcaatattttgaaagcatccatttcatctggttcatcagatataatggttagtgtccccacagatcatgtgtagtatgctattcacaccatgctttatcaaaatgttgatgccccaacactggaacaacatagcactttcttctgttttatttatgattccattgaagncnaaacttgggnnnnnnnnnnnnnnnnnnnnnntttnnntnnnnnnnnnnnnnnnngattgctnnnnnnnnnnnnnnnnnnnnnnnnnnnnnnnnnnnnnnnnnnnnnaanannnnnnnnnntttt

SEQ ID NO: 3591 - DNA, 395 bp, Zea mays
aagcactgcattcaaccggcccggcccggcccctttcaaaacaccagagatatactagtagataggcacggcacacagcaagcggagagttaatttcactactactgctacactacacgcgacgaccattacaataatgcaaagcatgaaacatccatcattatccatgcatggttggatacatgatacatctagctactcgacacgaacgaattactgccgtacgtgaaacaaatggtcaaaattcccttatacacccaggataaattaaagagagaggaaacaagctgcggccggcaataaagaggtaaagaggaaatgcgcattggtggtgtgagccaccgccatagacgtacgtacgcgcgcgcgtcttcgtatgtgtgtggtttcctcat

SEQ ID NO: 3592 - DNA, 395 bp, Zea mays
  misc_feature (1)..(4): n is a, c, g, or t
  misc_feature (6)..(7): n is a, c, g, or t
  misc_feature (11)..(11): n is a, c, g, or t
  misc_feature (13)..(14): n is a, c, g, or t
  misc_feature (16)..(20): n is a, c, g, or t
  misc_feature (41)..(41): n is a, c, g, or t
  misc_feature (80)..(80): n is a, c, g, or t
  misc_feature (362)..(363): n is a, c, g, or t
  misc_feature (366)..(369): n is a, c, g, or t
nnnnanngcantnnannnnnccggcccggcccctttcaaancaccagagatatactagtagataggcacggcacacagcnagcggagagttaatttcactactactgctacactacacgcgacgaccattacaataatgcaaagcatgaaacatccatcattatccatgcatggttggatacatgatacatctagctactcgacacgaacgaattactgccgtacgtgaaacaaatggtcaaaattcccttatacacccaggataaattaaagagagaggaaacaagctgcggccggcaataaagaggtaaagaggaaatgcgcattggtggtgtgagccaccgccatagacgtacgtacgnncgnnnntcttcgtatgtgtgtggtttcctcat

SEQ ID NO: 3593 - DNA, 399 bp, Zea mays
tgatatttgggatgggtctctacggcctcttcatcagcaacgctcccgcgagtgttgctcctgaatccgaccgtgccctgagcggctcgtcgctgttcgggatgttcgctttgaaggtagctctcaggaatttgaaatctcaaacacttctctgcaagtaaccttttgaatcctttagcaatacgataaatcttttgttcatcatgcaggaacgcccgaagtggatgaacatcacctcgcttgacgagctcaagacaaaagtggggcacgtcatcgtgatgattctacttgtgaagatgttcgagaagagcaagatggtgacgatagccacggggctggacctcctcagctactcgatctgcatcttcttgtcgtcagcttctctctacatcctgcaca

SEQ ID NO: 3594 - DNA, 451 bp, Zea mays
acgacggggaggcgccggtgcagcggagcagccgagcaggtggtggttcgggaagttgaggaagcgagcattgaggaggaccatgtccaccgtgcctctgcttgactcggaggacaccgacgaactgacggaagcaggcgcgtcgaaggaacataacaattctcagtgctcgcctcgcctgcccgcaggccgcagtggtttgcaccgcgagagccctaaccgttggcattgcaggaaggaggcggaggttgcgttcctaccgcgccgcgttggagcggcacttcggcaactcaccggcgttcatcgcgtccgcgttcgcgagccaagagcgcggcggcgacacgtccgcggccgcagacgcttcttgtctcctcagggaggcgatccacgtcgtcagctgcgcgtacgaagcgcggacgaggtggggcaaagacgtcggctggatgtacaa

SEQ ID NO: 3595 - DNA, 920 bp, Zea mays
tggtagcttcttacatgggcttgttggttcactctgccatcaccacattatttatgtttcccagttttgcacctaccttgattggatacttgactatccattgttatcaacatcaatctctgcctggaagatgtacttcacgtcataagcattgaaatattatgagccggttatgtcttggagcttatggaaagctgaagtaaatctgaattaactagtcatttaggtttcttttcaggctttgcctttgtgttgcaactacttagttttctatatgcaccattttgttaggattgcaaagaaaaaccatttccttcatcaatctaagtatgaatttgctggttggtattcatctatggcgtaatcatgtttcacatgttatttggggcctcactttctttttattccatcatggatttggaagtatgctatgtttaccttcgtcaatgcctctgggctctggcatctggttttggcagtagtctgtgtctgtcaactcacttcagttttctgacttgcaagtgcgcactggtgtcatctacttgatatctggctttgggggcagtgtgttgtctgcacttttcttacacagtaactacatctctgttggtgcctctggggctttgtttggcctccttggatctatgctttcagagcttattatgaactggactatctattccaacaaggtcagcagaaagcgtattatgtgtgtactgttttgctctagtttttctctctgtttttttggctaagtttcagtcaattcgttcctgcaggcagcggcaatcataactctactttttataattgtaattaatctggccattgggatattacctcatgctgataattttgctcaccttggtggatttgcttctggatttcttattggatctgtgctgctggcaagacctcaa

SEQ ID NO: 3596 - DNA, 392 bp, Zea mays
tatgattgaatcaagttatttgttgcttgtttgtctttagcaaatcattattttgtatttttttgcatattgccaatattttaggataatttttcccaagtgcagattaggtctactatgtgagtgttcagttagatagtcctttgaatgtttctagaaccagttctaaagttgagataatgtgaggtagcatacaaaacaacgtattgttagagatgcatactgtcaacaaacattcattccaggggtcatcttgatggtcatataagaaacactaggagaaaatgacataaattagtattacactgtcatgtttttgtatataaagtaggccatacaacttcactagaagtctagtctagagacagcagtgggctatcagtgaatgctat

SEQ ID NO: 3597 - DNA, 379 bp, Zea mays
ctcccagaactaattggtcattgatttcattccataacaagatccagcggacgagcaagtcgacccgcccttctgataacaagatcctgcggacgagcaagtcgactcggccttctgaggccctgtttggattcggtagagctaaagtttagttggactaaactttagtctggctaatgttagcccattagctattagtcacggggcgtttagacactatggactaataggttgtttgtgtgtttagtcctgattagctcatatttgtggactaattgttagggaagctaaagtttagtcactctgcttgtttggcgacaaatgaactattggcgacaaatgaactaaactttagtggctaatccttgtaatccaaaca

SEQ ID NO: 3598 - DNA, 988 bp, Zea mays
  misc_feature (476)..(477): n is a, c, g, or t
  misc_feature (484)..(501): n is a, c, g, or t
  misc_feature (505)..(985): n is a, c, g, or t
aaactcaagaaatccctgaaaaggttatatgtaacagaagagcaacttcttaaagaaatccatggtaaattgaaactgctaaaggttaagtggtagttatatttgggttgcttttgttatagctctggtgtccattgcattttcttgaagttcaatcagttcctttttcaatttaagctttaagctactgtcgtcagatataatgtagttcaagattgatgaagttaccgatgcagttttctgatttgcgatttactgatacttcataatttagtcaacccatttcagtttttcatacgttcacctaaatagctgcaagtatatttgatcatggagcagaagtttgttgttatgtctacgaaaaagagttgaaaaaacatgaagaaagtgtgaaacctctctttcctagttgcaaactgcaagtcattttctgaaagacttctgtttcatgcataaatcatctactctcattcttnntttctcnnnnnnnnnnnnnnnnnntttnnnnnnnnnnnnnnnnnnnnnnnnnnnnnnnnnnnnnnnnnnnnnnnnnnnnnnnnnnnnnnnnnnnnnnnnnnnnnnnnnnnnnnnnnnnnnnnnnnnnnnnnnnnnnnnnnnnnnnnnnnnnnnnnnnnnnnnnnnnnnnnnnnnnnnnnnnnnnnnnnnnnnnnnnnnnnnnnnnnnnnnnnnnnnnnnnnnnnnnnnnnnnnnnnnnnnnnnnnnnnnnnnnnnnnnnnnnnnnnnnnnnnnnnnnnnnnnnnnnnnnnnnnnnnnnnnnnnnnnnnnnnnnnnnnnnnnnnnnnnnnnnnnnnnnnnnnnnnnnnnnnnnnnnnnnnnnnnnnnnnnnnnnnnnnnnnnnnnnnnnnnnnnnnnnnnnnnnnnnnnnnnnnnnnnnnnnnnnnnnnnnnnnnnnnnnnnnnnnnnnnnnnnnnnnnnnnnnnnnnnnnnnnnnnnnnnnnnnnnnnnnnnnnnnnnnnnnnnnnnncca

SEQ ID NO: 3599 - DNA, 356 bp, Zea mays
ttattgatttggatggttctgagaaagttgggacaactggggctgaaggacggggtcttgataaggcgaagacaatcaacattgtcattgactcactaagctttgtttcagtcacaatcttccagcttgaagggattgtattgggtctaatcgccagtgctgtcagattctctgatctgggtgctgtcagcagtggccaaggcaatttttctgtctttgtttgggatcctggtgatcgcgctgtcatgttgctcgcttcaggtgttgttctagtgttgcaagagctgccacatttcagatggagggctgcagaggcgtgatgcattcaacaatgacgctaatcaacaaccgaagaa

SEQ ID NO: 3600 - DNA, 375 bp, Zea mays
tgttcgacgacgtccccgccggtcactacaccgcgcaggcgctgctgtcaggaaggttcgcggcaggctctgatgttgcaccgccggtcaagtacgaggtcaccggcggctcgccgctgttcttcgggagtgctgcagcagctgcaggtggtatgcaccagcaggggatggacatggccgcgggttgcacgacgccgcggtacacctacggcgccgaccaccaccagatgaaggaaggcggtgaccagcagcagcaagagcttgcgtccccggccatggcttcctttcttcagcagctgagttcaaacgctggtggtggtggtggtgttggcatgcatgctgctagcatggactactcaggcacaggaggaggac

SEQ ID NO: 3601 - DNA, 376 bp, Zea mays
caccaggcggtggcgttccgttccggggccgacctgtcggcgtactacggctgcagcttcgaggcgtaccaggacacgctgtacacgcactccctccgccagttctaccgcggctgcgacatctacggcaccgtggactacgtgttcggcaacgccgcggtcgtgttccagggctgcaccttctactcccggttgcccatgcaggggcagtgcaacacggtcacggcgcagggccgcagcgaccccaaccagaacaccggcacctccatccagggctgctccctcgtcgcggcgccggagctcgccgccaacaccgccttcacgacgctcagctacctcggccgcccatggaagaacttctcgcggacggtggtca

SEQ ID NO: 3602 - DNA, 464 bp, Zea mays
  misc_feature (387)..(391): n is a, c, g, or t
  misc_feature (393)..(401): n is a, c, g, or t
  misc_feature (403)..(407): n is a, c, g, or t
  misc_feature (416)..(416): n is a, c, g, or t
  misc_feature (418)..(418): n is a, c, g, or t
  misc_feature (421)..(429): n is a, c, g, or t
  misc_feature (432)..(436): n is a, c, g, or t
  misc_feature (444)..(448): n is a, c, g, or t
  misc_feature (451)..(458): n is a, c, g, or t
taccgggctcctgcgcgacgcctattcgctgaaatgcctcagggagttgcacgcgcatctcgccgtcgcgggtgcgatccaggacacattcgtcgtcacaggtcttgtcgaaaggtatgtttattttgggaaggccgcgtctgcggcgttgctatttgccgaaacctaccgcagccgccccgctgtgtactcactgaatctcgcggtccggtgcttctcggaccatggcttccaccgggagcttcttcatctttaccgggagctatgttgctttggctcggacaacttcaccttccctccggtcatcagggcgtgcacagctgtctcttgccttcggctggggagggagatgcactgcagggttcttcgtacaggtcatggtatccnnnnntnnnnnnnnntnnnnntctctggtnancgnnnnnnnnnttnnnnngggggggnnnnnaannnnnnnngttttg

SEQ ID NO: 3603 - DNA, 391 bp, Zea mays
gggcgcgatcctcgccaccgtcttcttccggctggaccagtcccccaagggggcgcaggagcggctgggcttcttcgcgttcgccatgtccaccatgttctacacctgcgccgacgcgctgccggtgttcctccaggagcgctacgtcttcctgcgcgagacggcctacggcgcgtaccggcgcgcctcctacgtgctctccaacgccatcgtctccttcccgccgatcgtggtgctctccctcgccttcgccttcaccaccttcttcgccgtcggcctcgcgggcggcgtgtccgggttcgcgttctacacgctggccatcctggcgtcgttctgggccgggagcggcttcgtcacgttcctctccggagtgataccgcacgtgatgatc

SEQ ID NO: 3604 - DNA, 384 bp, Zea mays
tttccacaacttgtgttgctacagcggacaaggaatattgacaacctgactggccaatatgtcttcttcttggggtaagagatctatatatggcagtatctaaaaatgcataaaaaacgaaaacaaatgtaattttcttagaaacaatgcattgaacaaaagttttgtatgaacaatatttgatcggcattgcctatatagtgaaatagacaacatggatgaattttcttattccgccttctgatattcgatgtatcatgctaggatcagtcttatccttttggacagagccttaatttgtctctactctctagtttatatacgctattactaaagctgattcacttggttacgatgcagtgcctaccgtgtgctttatatcct

SEQ ID NO: 3605 - DNA, 373 bp, Zea mays
tgttgcaggaacactaggcattcccatattattctcagaacacctagctgactcttccgagacgtcactggagtccaagttaaccaattcgttggcttcctcaccattgcaagtaacttccatcagcagcctgctattacaaggctcagcctccacaatagcctcacagcgtttcctctccaaactgtcagttttactaacctccacagctaccacacaagctgcctcagcctcagcccgcagcttcattgcgtcggatctcaacaccctttttgtcacgtttctgtcctcatccgcagaacccctgcagtccctccttttcttcccagtcaaggcaggccctctgccaagatcctcatcagcagaggactaa

SEQ ID NO: 3606 - DNA, 328 bp, Zea mays
acactcccgcacgcaccgcagcagctaccggttacgacgagcgtcgcatcgacgagctcgacctcccacagcacgaggtggtgcggcgcctccgcgtgttgcgcgagcccgtcacgctgttcggggaggacgacgacgcccgcctcgcgcgcttgaagctcgtgctcaagtccggcgcttcaagctcgtgttgatggtggagacgggggtgctgccggaggcagtgcagatgacggagatgccaaggggagcggcgatgatgctgacagacaaggactccaagaggatgacgaccaagtttgaggagctttgcaatcaagacaagatt

SEQ ID NO: 3607 - DNA, 323 bp, Zea mays
acgcagctctgaagctggcaagctgatcaatctgccagccaccatggaagaattcatagccgtcgtcggtaggagcagaaagcacactacttcattcagttaattgcagttgcagtgacaaattaattaaagcagtcaagtacgctgtcgcgctttttttcaggtgagaaattgaaggttgatacggagaaggcgctgattgtgaacgacgaaggagcggaggtcgactcgatcgacgtgatccgggacaacgacaagctgttcgtggtcaccgaagaagatctgacgcggctggcaccaatggactcggtgccttcgtcata

SEQ ID NO: 3608 - DNA, 273 bp, Zea mays
tgagcacaggcgacccatcggaagacactgttgaagaggcccgaaggataatggagaaatacaagtaatgaacctgcgcaaaggtgttgtactctcagaggtatgatttgtctgtagtttccttacgtgacgtgaggggtgatggatggatggatctgattttagcatactacactacacttagtggtttgatatatgtaaatatagttgcacgactgaaatgagtccttgggaccaaatgaattccgcaaatctacaagaggctaacaacaa

SEQ ID NO: 3609 - DNA, 315 bp, Zea mays
attttttttgaagtgatgaaacatattgttgtcccgcacaattatctccctaccagcaataccagatatgaatttaaaagcccggtggcaatctacacaaattcgcagattcttcatgatccttataggtatgccaggtggtatacatatcaatccaaaagccagagcaagcttttcactgtgttgaaacacttctgattctttctcttcttcctcaagatcatagagagcatattgtgtgtctggcatgtatccagcagcttgcatttgccctttgagcttggccaacaatgcctggatctccctattcataaa

SEQ ID NO: 3610 - DNA, 398 bp, Zea mays
  misc_feature (373)..(374): n is a, c, g, or t
  misc_feature (376)..(376): n is a, c, g, or t
  misc_feature (384)..(394): n is a, c, g, or t
gccagcgactacgaggccaactgccagtggggcgccggtcagttcgtcgatgaggacgacggtggcggcggcgagtccccggtcacggtgttctctccgatgtcccacggatatggaaatgctcctccgcccatggaagaatgcaacggatcagcccgtggccttgctaggtaaatgctgccattattaattaactcgatcatgcgggcatgcggccttccttccttattggaaaagtgcagtttcgcttccattatccaaacttttgaaatcctgttcgtaaaacatatgccatttccatgaaattatgttcgtttttgtttgttaaaattttcatgactaggtactgcctggttgcgagcaagcagatggnngngactgttnnnnnnnnnnntgtt

SEQ ID NO: 3611 - DNA, 350 bp, Zea mays
ggaagtcaccaaattttctgtgtggctggtcagcaaataggttcctcaacttcactgaaccttgaagtgagcatgatatagtctgcaaaaggttcacatgaagaaaattggtgaacattagaaagtgaatttggaaacaaactgaagttatgcatatagcggcactaatcaccatttagcgtaatagacttgagcaggaataaacagtagacacaaatccaaaggtaaaggcacctttaagtgatggagaatgcatgagagatacccttgaatgattttcatcatgctatgcagcagagcatgtatggttatggtacaggcaaatatgagaggacatgaaaaggttcctt

SEQ ID NO: 3612 - DNA, 359 bp, Zea mays
tcgctcgattgcactatattgcccgtcaaaaacatgtcctcctcgttcattcgcttcattggtcgttgcgtctgttcggcgggctgttcttcttccacaacgacgcacgccttcctcttgcaccgcgacgacgacacctccgatcccgggccacgtggtgacctgtacactttgcacaggaccatggcgccgccgccgtgctcttcctcgatagcatacttggtcatcagccatcccggcttgatgaccgaccccgacggcgccatgcacctcatggtacgtcagcttttcaaggtatctgccagtagtgcttcctttcaccatcttcttcttgccctccgagtgccacgacctcttct

SEQ ID NO: 3613 - DNA, 268 bp, Zea mays
acacggcttaacacatcaacggtgtcattgtatccatcaccagcgatgaccatgatggactatggttcagtatcattttcactagatggaagatagcaataataatgtcgtggcttgggcgcttggctagcttgctgccgtcgttgcccagtttatcttggttaacaataaaatataggataaatatgttagatgtgttgtgtggtaaggacatgcattccacaaataatactcctcttgtaccagctggttgtggcaattgtaatga

SEQ ID NO: 3614 - DNA, 397 bp, Zea mays
ctgtatagctatgtaaaattggttgcattttaggtgatttgtgggaattaaattgcaatgtaccagaaatcgatcttaatttatgcaatagattatatgggaaaaatcataccatggattggatgtaggctgaaaccagttacttcatctaggctaaaattgttggttctgtacaaaaggtagtctaattaggctttgatatccgaattaaatgtttatcacctacttttagaaaaaagttagtcatcttcacgatccagttgatacatattcacaaatttgtacatgagtaacaggcaacaacttttctcaatttatccagaaaatgacttatttttaggggcctggtgtatatctctatcctattattttattctcagcacattcacattcacaa

SEQ ID NO: 3615 - DNA, 702 bp, Zea mays
agcgtgccatagctagagcgggaacacgaagaatgctgcgagaattttcaccccgtgcgaccggccggccctccatgatcgaccattcgatcctgctcattagactacctgttcttgtcaagccactcgaggatccgtttctccgactccgtgcgctcctcttctgtcttctctctgacctggccctcgatgagcccgaagtagtccctgtaattcctcttgttgtagtcatccagcctctggaacatgagcatatcaacaattcaacatgatcagtgccgtgttttcagtccttcaatgtatatcgttcgcttaactacgtaatcaagcctctcttaaaagtgtccacatgtttgtgggatggttagttcactccacgcacccattcttacccctcaatcgatcggcaacgataggacactattaaaccacgggaaaagagtctccagttacctccttgtcgttcttctccttgttctccttcgatttcttcagatactctgtgcgcacgcgcgcggacgcactaactgcattagttttgcatgcaaaggacgaaccgcgaataccaattcctcaagcccaggaaaggtctgatcagtttcccgctcaccttgcagtagagccttcctcgattcgctgccgccaggtatggccgcagtggacgtcagcagcgccagaaggcacctcctgctgactccattc

SEQ ID NO: 3616 - DNA, 443 bp, Zea mays
aggagtctgctcatcttaaggctgtactggacaacccgcagttccagcttgacccattcgctgcgatccatcagcacctgctggcaacgcagccgcctgcagctgcaaagaaggacgacgcagcggggaagcaggggaaggtttccaaggacaagaaaagcaggaggaagaagggcacatcgtcaatctctcaggcaatggatatctgattgtgttccttcagtactagtaacttggtccgatgtcgactgcccgtgttccactagagggagctcatcgaagttcgatatcgatggttggcatagtttgagtaccagtagaggtagtactgtaccagccctctcttttggcagcctgttgattgatgtttgcagaatcggtgccatcaacatttggtgctactttggaaactggggattaggagaggattgagggagaaaaaa

SEQ ID NO: 3617 - DNA, 407 bp, Zea mays
cagctgctcgatgcaatggcactgatggagaagcgcttgacagctgcgttggctggcagtcatggtgagcaaactgctcgcggatgcactgccttcttcgacgacggtcgcatcgatgaactcgatgtgtgggacgaggacgccacgagcgtcgacgcagatgactctgtctccgcctccatggtagatcgagaactgcgcttcgacgagttcaccttcaacgacaaatctgcgcagtatcacctctcgtccacccacgaggccctcttctccgacggcgccaaccccttcttcaacgaggcgtgctatgcactcacagtgttcgatcaaatgcccagcccatgcttcgatggagagcctattttcgacgaggtgcccaacgactccatcaccgagtacgaattgta

SEQ ID NO: 3618 - DNA, 858 bp, Zea mays
gctgatcctagtgatgattccagtgatgaatctggttcagaacatacttctgccccaaagaaggtgtgcactagataattgttcttttcctctagtacttattttagtcatgtctcaccctatttattctttatattgttattctttacattggtagactgatgtagtagttggcaagaagagagcaatcaaagctgaggcaccttatggtaagaaggctaagtctgaacaatcttctcagaaaacaggtgagctactacttttatgttcttataaagcccaactaaaaacaggtgagctactacttttatgtagactatcttcagtagacgaccatatctcactctctatttcaaacttcactctgcaaacagtgcaatctacagtataaaacaatattttacacggcctgctggagatggccttaaagcccaactaatggatgtgtaacgttaacatgtgaattgaactcttttttgtccttacaaagaccactctttttatgttcttataaagcccaaactctaagggatgtgtaaggttaacatgtgaatgtttaactatattttcgtttacctaaggtgacaaggcttcaacttctcatcctgcaaagcagtccatcaagactcctgcagacaaatctaggaagacccccacagctgacaagaaatcccccaaatctgggagccatggctgcaagtaacgcaacaagtatgtatagtttataatttttctttttcttttggtgaacgattataatttggtattatagtttgctaatagtatcctgctggaccagatctttcagcagtgcgtcagcactttagtcccatcagagccaaaaaagcatgaagccta

SEQ ID NO: 3619 - DNA, 644 bp, Zea mays
gctcgacgccatgctcatcgtaagaatcgagatcagatcccaaacacgtgctgctccctccattgattctgctttagtcagcactcggcaatgatgatgatccgatcatgcgcgcggcgtgcggtgcaggacattctggacagcttccagaaggcggagttctggtacgcggacgccgggacgaggtcgttcggctcggtcacctcgtcctcgtcgtcgaggatgtcgtgttcgtcgtcattcaggaggtcggctcaccggaacgacgataagtggtggctgccggtgccctgcgtcccggacgccggcctcaccgacaaggcgcgcaaggacctgcagcagaggcgcgactgcgccaaccagatccacaaggccgctgtctccatcaacagcggcgtcctcggagacatggaggtgccggagtcgttcatggccgtgctccccaaggtacgaaaccaaggcatccatccattcccgacggaaacagcatgcataatacagatctctctcctcgttctctgcctcgctgctgagaagtgaaatcctttggcgatcttgatgcacattcagagcggtcgggcaagcgtgggggactcggtgtaccgcgtcatgcttggcgccgacaagttctcgccggagttcct

SEQ ID NO: 3620 - DNA, 406 bp, Zea mays
ctgtctggtcggggccagaactggcggagtggtcgcgtgacggccaggaagcggagcaggagcccgagtcggtgcctcgtcgcaagtcatggtcggcgccagaactggcgcagtggtcgcgtgccggcaaggaaaaggagcaggaggagcccgagtcgtcggagcctcagcgcaagtgggtggccctcgtctccgttgccgtcgtcctccccggcaacgaggacgagcgggcccatgagatcatccccggcaccgacatgctgatgctcgacatcaacgacccgccgctgccctcctacctggtgcttcacccccgcgtcgcccccaatcccaggcgcaccaacgagccactgtccgcctacatcctcgccgccgaccgctccggctacatcctcctccaggtcgt

SEQ ID NO: 3621 - DNA, 230 bp, Zea mays
tcacctggcgctgccgccggccgagatggtgatgtgattgctgccgtccaggaggctaatcgattgctcagttaattagtcaccattagtagctaatcgatcaaggcagccgtcaggcagaggtgtaaataggatgcagatttgctcggttttcgtttgactgtggtggcatggtttgcttcttcgctgcgactctgcgagtcacgcaacaatgcaaaagcaaaatgaaa

SEQ ID NO: 3622 - DNA, 571 bp, Zea mays
agacccgagcgatcgtgccccggcccccgatcctgattcccacaaatttccgccatggcgatccgcccggactgatgcccgattctccatctgacgatcctcggtaagccttcgccccccgctggtttgatcctgcgtgattgacatggcttgtcaggttcttgcgggttcttttgcgtctttttgttgtggttgcagattcgtcttgcgtatgagtgttccgcggattccctcgttgcctggtcgagtatttgtattttccattggcccattcgcgacgattcttaggactccttcggttctatagggttctgttaccaatccgtgggttttctattgcagaattgatcttttttcttgcgaagtcttcgaccactctagtgcgctcctttgattctcttctacccctgcgaatttcgttgctgaacgtcatctgtccgcccgcatggtcttcttctggaggaagattggggggaattctggtggggttcgtgtgggcgcgtagggcccctgacgacctggcctgacgcatcagcggcgagccatggctccggcttccgttccagctcta

SEQ ID NO: 3623 - DNA, 366 bp, Zea mays
ttctgcaagtggaaaactatctgtaccatctggcgctgtaactgctgtttttcataattccatctaccagggttctttgccagttccatctaaggctaatgctttagaacatctactggtgtattcgccatctggtcatgttattcaacatgaacttttaccttcttcaggttctgagtcctctggtagcagcccaagagttggttcaggtcataactcgcaactccaagatgatgagatgcatgttactgctgaaccaattcaatggtgggatgtgtgccgtaggacaaactggcccgaaagagatgaaaacattgcaaacattgtactgtataaccaaagaagcagtatgatggctatggatgt

SEQ ID NO: 3624 - DNA, 518 bp, Zea mays
acgacgacaattttgggatgccagtggaggaacaaccacagatgaaatacactgggaggttttggaccagggaggagcacaggtcattgattctctttatttctactgtttttgaaattctagttgtcacatatttcattgttaattactagtaaagttattaataagcatgtggcggagaatattgattaccgcgaatatcctcaagttttttaagtgcttttcgagatatatgatgtgacgactgacgatatttatattctcatatcctaaccccaatgtaccaacgcaggaatttcctccgtggcctgaacatgtatggtcgtggtaactggatgtacatctctagggacttcgtccccactaagacgccaatgcagatctatagccatgcacagaagttcttccgtaggtaggagcgcacctgcagctggaagcaacgccatgatatcaaatgatattggcctctatgatatgctgagccctagacaaataacggctcttagtttatctcaaga

SEQ ID NO: 3625 - DNA, 377 bp, Zea mays
agcagcagcacagagcaagaccgcaaagaaagcaagcgggcgggcaagcctccttcaccattaccgcgcatgtgatctgcgccggtcatctgccttcggtgtaggaactcttgcctgtttgcttggtgatggacaggcacacctgcaagctctgctcccgtcggttccacaatggccgcgcgctgggcggccacatgcgctcccacgtcatgaccgcgtcgtcggctgcagcgtactactcgccgccgccgctctccctggcgtccacctcgtcgacagagatggacgacgacgccgatccggcgccgcagaagccacccacgccgtgcgttgcacgcgaagaaggcgccaagaaagcgttctgctttcctgaactc

SEQ ID NO: 3626 - DNA, 359 bp, Zea mays
atgacatcacacaataatacaagagcaccaagtaacttttcctatatctatcatgggtacaaatgctatatggtcattcactgccctagcacccaatggatcaaacgacacaatactgctaggaacaccgactgtacaaataaaatgaactgagaaaacggtgccatcgtcaccatagaattaaagcgcatatcacacattgtctatatatattgggtataacaaattatattacttgcattaagaaaaataaaaaacaaacgagagagacatataataaataaagaaataaacaataattaggcaagcacattccatgtgtttgccactcgcattccatacactgatgcacgtacatg

SEQ ID NO: 3627 - DNA, 370 bp, Zea mays
atggtggtgatgagggatcagatgacaatgggaatgaggaggaagatgacgacgacgatgataacgatcctgcagccaacggtgaaggaggaagtgacgacgatgatgatggtggagaggatgaagaggaggatgatgacgacgatgatgatggggatggtgacaatgaggaagatgaggaggaagaagaggaagaggaggatgacgatgatgtcccccaaccacctactaagaagaggaaatgatagatggctgtgatttggttggctggttgcttacatgcaggaatgctccctgttcgcccctgcctagcagtctcctgtttagtgggtagggggttttagcttgatcgtggacaattcatagccta

SEQ ID NO: 3628 - DNA, 467 bp, Zea mays
gggcgcactcttctttggtgtgcttatgatcatgttcaatggcttctctgagctggcactaactgtcttcaagctgcctgtattcttcaagcagagggatctccttttctttccagcatggtcctatactataccctcatggatcctcaaggtacccatcacatttatcgaggttggtggttatgtattcttgacatactatgtcattgggttcgacccaaatgtcggcaggtgagatttcctgactgtttaaatgtttacccttagccattcttattgcgctggtaatatactatggatgttctaacagtaatggtcacccccaggttcttcaagcagtatctgcttctgttagtagtcaatcagatggcagcatcactcttccggtttattggtggggtatcgaggaacatgattgttgctaatgtcttcgcatcgttcatgttgctagttgtcatggtgttggg

SEQ ID NO: 3629 - DNA, 395 bp, Zea mays
cagacggccaggaatctcggagcagctggctttgttgttgctgtggagaatagttacccaggaacaaaatttgatcctgtaccattcagcatccctggaattctcatcacagatgtcagcaaaacggaggtattatacttctagcagagccttatttcatatttgcatatggttgccacttgtagacaacatcatacatagacatatggaaaaatgagactgtatattcatgaatagatcaataaatatgcaatttagttattgaaatagcatgaattgggcttcaaaaaacaatgtgcaaagaggtgcaagatagtggcatgaattctatatggctgctgctactgctactataggatgactgggcagaaaggtaaagtacctatgcatggttg

SEQ ID NO: 3630 - DNA, 771 bp, Zea mays
tcgatccacatcataacattttatcaaagcctctgcaccaaagagtcctacttcgaacttacatctcactgtctgccttaaaatgatcgcaggactatgttgctactagatggtacagagctcctgagctgtgtggatctttctttagtaaggtacccattttttctcatactgttgttttattaagccttattggtctttttttttgttttctccaccttcagtgtttactttaaaatgtttatgttatccccatgttattaacacgattctcttgtgcagtattcaccggctattgatatgtggagcatcggttgcatttttgcggagattttgactgggaagcctttattccctggtaaaaatgtggttcaccagctggatttgatgactgatctcctgggtacaccatcagcagatactatttcacaggtatggtttattatttatcgatatattgagacatgtaaaaaattgtagcataaattattgctaagtctcaaacgtttttgttccttgttctacagattcggaatgagaaagcaaggaggtatctaagcagcatgaggaggaaacagccaatacccttctcagagaagttccccaatgcagatcattcggcgctcaagctcttacaaaggcttcttgcatttgatcctaaggatcgaccaacggccgaagaggtaggcttttcgtgatgaaacataggttttatgtttgcactgctgttatttgtgttactttgcagaattatattctaacaaaaatagc

SEQ ID NO: 3631 - DNA, 640 bp, Zea mays
agttatttaccaccacacatacctgattaccacacaaggaattatccaagtaatgctggcccccctggtcctagattcttttttgaacaagagatagtgttcaggatgataattctgaatgagatggtgggaagcataattggaaaaggtggttccactattcgggcattgcaaagtgaaactggtgcttgtataaagatcttagagccagttgctgattcagatgagcgtgttgttgcgataactgcacgtgaggtatgtatacggggcatgggccagaaaaggtttcaatcctgtttcagtgttttgtctgaagtggtcacaaatcattgtttttcttatgaggaactgaacaagaatttttttatggtaatttgatgtatgtgtctgttcctcttcgagaactgccatgctatcccaatgcctggtagttcaatcactatatcctgccaatttataatagggatttgggattaaatttcctaagaaatatatttcctgctgccacctgtaatattggttgatggatgtgtatctcttggtgcagaattctgacatgctgcattctccagcgcaagatgcagttgttcgggtgtactctaggatctcagaggcatctattgatagaagttctcataca

SEQ ID NO: 3632 - DNA, 612 bp, Zea mays
atcgagccagctggaggcgcgcggcggccaaaggctagcttatattcaactggaacccggcgtcgctgcgggccgcggccgccagcagctgcacgtgcacgtcgttgaacgcgtcgtcgtcgtcatcttcctcctcctgccgtggctccatcacggtcctgctcgccttcatctgctcctcgaacatcttctgcagcttcttcccctgcacctcgatcctcagctggaggttcctctggatctgcaagacacatgcatcaccccacccccaccgccaaaaaaaaggtcacccgatgccacgaccacacatcaatcttgaagaatggattctagccggccaggtttatttatcggcgccgcgctcggctagtgtttgtggcgtagacagagcacctcaagctgctcgtggaggcgcctctgcacgtcgagctgcacgcgtagtgcttcggtgatcttcatcccactgtgtgcgaagtaaagaaaataggatggcaactgttagctagtggcacgtcgcatggtcgccattagaattcttgcaatgtcgtcaaaaggtagacgacgacaactacgacgtcacgtacgtgctggggtcgagattctgcacgtcgt

SEQ ID NO: 3633 - DNA, 364 bp, Zea mays
atgcgagcagcttagcttctcccggtggcggcgcggagggcagtggtggatacggacgaggttgcatcggaacaagcggaaatgtggaacccatcagagagaacgaggcgtgcgtttccttaccagcgggaaggagaatgccgccggagcacacgagggaaggggagggaggatccgcggagggggggcaagccgcagccggcgacgcggggcgagctttggaatgagaaggcgggagcggatggataccgaggaggaggaggaggaggaggagcggggcaggctggagtagaagatccggcggagccagtgagccagccagtactgaagtcaggcaggcgaggcgagggtgcgatccggaccg

SEQ ID NO: 3634 - DNA, 405 bp, Zea mays
aagcaggaaatggtcaggaatctggtcgccgcggcggcgctcgccagagagcaggaaatgatcgcgcagcagcagcagcagcagcagcagcaccccgaggcgcagtactccgggacagagctcgacatctcgctgtggcaaggccccggccccggccacggccacggccacccgtactggcatcagccgacgatgcagcagatgctgcaggagaagcagctgccgacggtgcaacagctgttgcaggagcagcagctggtcgacgcgattggattcggcacgcaccaggccagcacgactttggtgccgcagtatgcgaacggtgagcacgggagcggcaccggcgccgcaatggcgttccagtcgccggggtctcacaaggacgcgccattcccattcccattc

SEQ ID NO: 3635 - DNA, 400 bp, Zea mays
gacaggtagtgaagatgatgacgacgacgaagagagcgatacaaaactggagagggaaattaagaaagtgaagaggcaagcgaaggaaaattcaaaccttattgatgctgatgacagtgacgagttaagaagtatatgccctgagagtgatgaagatgatatgactctctggagtggcagtgaagacgacgacgacgacgatattccctctgaggcacatcctagtgaacgcagtgactcatatcttgataaggtgtttgaatttgaggagtcaccaaagtaccacacaatctcagagctgttgaaagcagagaacgaaccacctgagctatctccgggaaagcaagcaaggaaacttgctgtagaaaatgctcttaagaagttaaagaaaggccctgat

SEQ ID NO: 3636 - DNA, 601 bp, Zea mays
catgagtggtagttatgaagtggccacaaggtgaccaagcaagtcgtctaaaaaatgttgaaccaagctgcaggaacaaacaacatgagaaaggcattcagtaagacaggttgatcacagctagatctaacagagaaataaaaaaatacgacatacagattttgtccaatggccttctgtcttgtgagcaagactccagtcacttgtacgccatatcataacagtcttatcatctgattggcttgcaataaaggaaccaatagggtcccaggtaacccctttcactaagctggtgtgccctcgcaagacagcagtgcaaatgccgttgttcatgttccatatgtgaatggtattatccaagctaccgctggccaacgttgaatcatcaggggaccaactaagatctacctaccttatgcacaagaaatggaaaaggtgttctatagttacaaaataattatcacaaacataaacacagcacagtggaattttagaagataattaccacatcggcagtatgccctctcaaggtcataatgaccttccagttctctgcatctggtggttctccactaccaaactcagatgtacctgagccagc

SEQ ID NO: 3637 - DNA, 309 bp, Zea mays
catgagcccgaccgctttgacaagcactgcctgtggcagtggtagatgcaggaggaggggacccacttctaaagtctggatttactttgaggagatgaccatgatggagcaaggtaaggaggtaagtatctttgccatctaccatcactccaaggagaccttatcagctaaatctagttctgatactaggcatttgctccagcactttgatcattgtcgtgctaagaaagaaaaggagagatctgtcattgtttagttagttcttaagtacaacacaaatggtagtgttatgcgttgggagtactctgt

SEQ ID NO: 3638 - DNA, 384 bp, Zea mays
gtggcaacggggacttggaacttttgtcgagaaaatccagaccaaaatttgaatttgagaatgttagctaaccatccattcttttttaaaaatgaaaccattaacctgcaaaagttccagaaagcttgcaaagatgcaaaattaaaaaggcatccaagtgagcttgtaccctttctaacacggggggccgggcggtcaaatcggcaaccattatctaaattttgtcagctgatcgtgtagtgaacacgaggacatgcaatctttggaatctcgggagggcttgagtgggggtgcaggctacaccaggtgctcctacaccgcagatcaatgcgccacatggtgccggtcgctggcgatcacggtatgatctgtttcaagtcatgc

SEQ ID NO: 3639 - DNA, 383 bp, Zea mays
  misc_feature (271)..(272): n is a, c, g, or t
  misc_feature (286)..(288): n is a, c, g, or t
  misc_feature (337)..(339): n is a, c, g, or t
  misc_feature (364)..(368): n is a, c, g, or t
tttgtcatacaatgactcatttatgtcctacagatttgttatgcccatacaccagttattggaaaaacctatcatgagcagcaatactgattaaaataataatcaactttgctattttcatgtgttgcagaataagtagaacatatcattgaacaacatgttgtcattttttggacatttttatgttgagtatcaacatggctcttgtttaaattattgcgctcttactcaggatgagattgaagctgctcgaatggcagcgatcaacaannaaattaagcgtgtnnngactgaagtcctttcaaaggttttattcttgacttgatcttgtttacannntacattattgaatccgtctaagagnnnnnaggttattcctgatt

SEQ ID NO: 3640 - DNA, 394 bp, Zea mays
gctggagaagacgcagaacgacatcgccaaggcgcggcgcaaggcggaggagaagcgggcgtcggcggaggccaagcggggcctcaagctggccaaggtgctggagctcgccaacttcatgaaggccgtcggcagggtgcccaccaagcgctccttcttctagccagccgactaccgctaccacctccgtctctctctccctgcctgcgtgtgatcgatgtacgctcgctgctgcatccgagaacctaactgtaaagaaaaaaaactgtaagctgtatacgtactactgcctgctatggtcccctgtgatgtctgtcagtgtcatccatcacagggtgccagttgttctcttctctttctcttctcttctcttctcttggcttgtatatcggat

SEQ ID NO: 3641 - DNA, 275 bp, Zea mays
gtcgtgctatggacagcaaacaccgagaggtatagcaacgtggttgcagggcttaacgacaccatggacaacctcttggcatcgctggacaagaatgaagcagagatctcaccatccaccttgtacgcaatagcctgtgtctttgagggtgttccattcgtcaatggcagccctcagaacaccttcgtgcctggtgcgtagcgctgcactacaaaattttacatgtgtgtatttgcttgtgtagtaatgttcagttcatgcacagggctgatgga

SEQ ID NO: 3642 - DNA, 361 bp, Zea mays
gtctctactctctactccctgcccccccccctgaatttgccgcagggcacacctcctctctcactggatccgacgagccgtgcaccgcgccagtctggctgcagcagcaccacaataccacatgttgctttgcttcgccgagtcgagttcaccaggacggaagggacatcttgcacggcgaactgagcgtgtggcggtgtgggagagaatgtggcgatgtcgccgtcggtgccgtctgtatggtggacgctctgcgtttggttgcagtgacatcgacatggcgtatgcatttttggcgtggcgccaagcgcaccgcaacagctacgagctgcggtgccgaacctgtctcacgatctcacta

SEQ ID NO: 3643 - DNA, 211 bp, Zea mays
tacgacatcccggacctcctgaagaagttcaggaacccctacgactgaagccggaaacccactctcttgcctcctcctcctccttagggaggggtggcagagcttcagcgacggacgaggaggacgtgccggtgcagcagcggttcatctggtcagggaagagaaagatgcggcgcctttttcacgactccatcatctctcttctggataa

SEQ ID NO: 3644 - DNA, 349 bp, Zea mays
cgcgcagcttccatgtcgccgaggcgcgcgtacaagtccatgagcgcgttctgcacgaatgggttatccgccatgccgcgcttcaggacgtaaccgtgcacagcttccttgccggcaaaggtctctgaacgagcgcacgcgggcagcacgcccgcaatggtggtctcgctgggtacgatgccggcctcggcctccatccgggcgaagagctccaatgcctcctcgtccatgccagcctgcgcatacccgcagaccatggcgttccacagcccgagctgacggtgtccgcccgggaccatgtcgaacaccctcctcgccacgcccacccgctcatggctcgcgtacatgt

SEQ ID NO: 3645 - DNA, 460 bp, Zea mays
tacaccctcggcgcgctccttgaccccagtgacatcgccttcctcaccaatcgcgccgccgcctacctccgcatgggcaaggtctctcccggttcgcgctcccactctccgttccctctatgattctatgctacccgccggcggcttacgctttgggacatgttcagtacgaggagtgcgtgagggactgcgatgaggccgtgaagcgcggcagggagctcagctccggcagcgagctgatcgcgaaggcgctgtctcggaaggcgtcggcgctgctcgagctcgcgtgctgcgccgcggactacgcaccggctatcggcgccctcaagctgtcgctggccgaaaattacagcgaggagacgctcgagaagctcaacgacgcggagagcgtgaggaaggaggttgaggaacaggagcgattggatcaggaggccgccaaccaatgccgcgaggaaggttt

SEQ ID NO: 3646 - DNA, 586 bp, Zea mays
actggaagctgtaaacgccggatgactgtacgggtttggcaagagctcctccacctcgatcctagagctgaaatagcccgcgtttctccttctgtgccggatgctctcgacctcggccatgaaaatactgtacactggtctgtggtcagagaagcgagactctccgcgaacgtacgacagctgcatgagaccgctaccatgccacagaatgcgatcgcaccttcatttgagacaaaagaaaacacgcgtcagggaattccttccttcggagtaactcgacggagggtgaaattgtcgttggataacgcggcagaagaagaagaagaagaagaaaaattaccaagcgggcgttctccgcttttctttgggccgaaccccagaataacggtctgagttgaatgagtacttatatgttggaggaaaataaatcctgccttctttccatccctggaaaacacgcccacatctccgttctatccgtagctgctttcaagcaagtaatttcagacacactgactaggaaaaagatatatatagcgagacagcagtagcaagttacctgatctttctccaacagttgcttcca

SEQ ID NO: 3647 - DNA, 367 bp, Zea mays
ccttcttcgcggtgcagagcggggtcaccgtcgtctgcgcggccggcaactccggcccgcagccgagcaccgctaccaaccttgccccgtggatcctgacggtcggcgcgagcaccatggacagggatttcccagcttatgtcagcttcaatggcgacaccatccaggtacgtacggtacggctagtggattgaattgaatgtatgcgggcctagctagattttttgctcatcgatcgatcacgtatggcgtcccggtcccgcatgaagggacaaagcctcgcagacagcactctgcccattggccagccgtatccgattatcagcggggggaaggccaacgccgcgaaccagccaaccggaaactc

SEQ ID NO: 3648 - DNA, 237 bp, Zea mays
  misc_feature (226)..(227): n is a, c, g, or t
gtgtagcggcgcctgaggaaagggttcgagcctgctacgctgcgcccaaagatggaaggaagatggctggacgctggggctacaggggcacgggcaacgttgcgccgggcttggacaggggcagccacacgagtcgccggtgttgccgtgcctgggctggggctccatgcctgttcctcgatgtgcacacggccacaccaaacgccacaacaaacgggaagaacgnngaaaggaaca

SEQ ID NO: 3649 - DNA, 916 bp, Zea mays
ggtagtgatgatgttggcatttgtgttctatgtgctgtgtttactgacactttaatctgaagctgtttgtccttttgtgataggtgctgtatgaggatccagttgtagcatttgatggcaaaacgcaaaccttaaagacttcatcggggaaagttctgaaatacggctcacttattatttctactggatgtgaagcatcgaggtatacaactacacttatgtgaatgaggtgcatttaaatgtatgggaaaccatatttctgatgtcattatcatcatgtccatttttcttaaactttttctcccgagatttaagacatttttatgaattcctgttaggttttatgtatgcattggatgcacaagctttgtctactcacatggttacaatgaacctaaacattatgctcttctaataccaaacgtccatttttttcagattacctgagaaaattggagggaaattacctggagttcactacatacgggatgttgctgatgctgatgctctagtatcctcattggtatgttcggtagattaatgtagtaattgtcatcatttctcatccaccagagttaatgccaatgccatctcatttgacaacctcacctctttgatatttgcaagtaattattttttctttgcttattttttgtagggaagtgcaaagaaggtggtggttattggtgggggctatattggcatggaggtagctgcagcagcttgtggctggaatcttgacacaacggtaaggagctaccttttttttgttcagtttgatacgctgaagcttggacttcttcctatatgccaaaaagtcacttctctaattagggctgctacatgcatagattatattaccagaggaccacattatgccaagattatttacgccctcgctgctaagaagtagaga

SEQ ID NO: 3650 - DNA, 457 bp, Zea mays
aggactgcaacggtattttattttatactttatgtttgttaggagccaaacgtttgggcattcattctgaaggatttctttttgcaggaatgtgcgacaattgtgcttccactattgagcagaaggatattgatgtcacctgtatgatttattttgcgtcagtttaaaaattacaacaaatgaccaacatttattcactttatttcagggggaaaatgttttttatttcatgatattctcacagtaattttttctacttcctgtttagaccatacaaaaattatagtttcacttcttcacgatatgcaacttaatgatcaaagagctacactactacagctggtggataagttcaagtcaaagtggaaaggtttaggtacatctcctcgacaaaatttttacgatgttgtaactttttattgatgtaattttacctcttttgttgatagagatggat

SEQ ID NO: 3651 - DNA, 483 bp, Zea mays
cttgcgatatacttgatcttatcctcagtaaggtaagtatcggaaagttcgctcatttgattgaatgaagtaacgtaaactcccatgcatgactgaatcttgataaccgattttctgtttttttcagaatgactcggatggagattcgagcggccaggtgggcttcttatgcggctcgcctccgatacgcgctaacaaccctgttatccatgatccacagtttggtaaaagactgccatccttttctcctctaggagggagctcctatggcaaaatgccagcagtaagagttgaagtaggctcgccatcttgcggcgttagcagcagcccaaaagtaaggatcgaaggtttcgcctgtggcaactctgagacccactatgcagttacctttgtctgagcatttcgttggtatgttcctgattttgccctccgaccgaccgaccgctcgctccttgtgaatcaccgtggtggtgtgcaggatat

SEQ ID NO: 3652 - DNA, 356 bp, Zea mays
cgccggagacggtgtaggactggccctcgtagctgtgcccgccgctgcgcacgcggatggccagcgacgcactacgcgcgcagagaaccgcgcgctggaggccgcgtctggaagtgggcagcactacagcctccggcttgcggaaccccggggctgcgaaccggaggttctggatggagaagtcgaagatggtggcgtagcccggagacccggccatggagaagttacggacgccggaggccagtaggcaggtcgacaaggacctggcgcgcacgtcattgtcgcgcggagactgcgacgcgatgacatggcgatgcgttgataagagtatgctgagtatgcctagaagtaaggaa

SEQ ID NO: 3653 - DNA, 495 bp, Zea mays
gcatttatagtgtcggttggagctattcttcaggccatagtcctgttctggctgcttcttttttacaggtttgatttctgtaaaagctattccgcagtcgtgcctataactgccactgtgattgctcactcacctttatcttgcccacagtccaatggatggactgcttggcgcagcgataccattattcataggtgccttgtggggtgttggtgacggtgtcttgaatacacagttaagtgcattacttgggcttctgttcgaagatgtcaaggtaatcttgttttagtgtttgttgtttggtgtttcatgtacacacataggcttccatctcatctgctgtagctacttgtcttgtcctcaacaaatactaaaatttgacaccatggcctatgcaggaggctgcctttgcacagctgaaggtgtggcagtcgggcgccatcgcagtcatcttcttcctgagcccaagcatcacgctgcaagccatgcttctcc

SEQ ID NO: 3654 - DNA, 442 bp, Zea mays
acggatgcatggttgatcttctgagtcgtgctggtcttgttcaggaggctgttgaattgattgaagggatgcgcatcccacctgacccagttctctggggcacaatactgtcagcttgcaagagacatggccttgtggacttgggcattactgttggtaataagctaattgaactggatccagctcatgatggatactatgttctccttgcaagtatatatgcaaaagcaaagaaatgggacgaagtcaggaaagttaggaaattaatgtctaaccgtggcaccagcaagtcagctggttggagcttgatggaggcacatggaattgtgcacaagtttctagtaggggacatgaatcacaaagattctgcgcggatatataacatgctttgcacgattaacagaaggttggctgaggcgggctatgtaccagacgtgtcatc

SEQ ID NO: 3655 - DNA, 506 bp, Zea mays
ggggctccattcagcagcatggtccgggcaaaagggttcccatctttcgacgagagatggtactcttccctcttggaaaacccatcggaggctttgctcccgacccaagaaaccgtcctcttcaggccatggacaaaggcactgtccctcctgatcccttgcccttctgcgaggttgacatttaggtcgttcctgactgagaccatgaagcccatcgttcggtgcaggttcagcaagagaagagtgacgccaccctgtagtaaaaaaatattttggaagccaagaatcagctgtctgttaatttgaaatcccattaagctaaactaaaatgctgaaataactgcagttgtgcactatgatttgaatatatattttggatagttaatctcgtgttagcaatagttgagtaatcaacattgtgtttctgaaaaaaaaacatcttagggtaggtagactcgtaccttttgcttggcgcaatgcacgtaggcgcgcaagtacgaagaacc

SEQ ID NO: 3656 - DNA, 482 bp, Zea mays
agtgcgctttcagttcttgagcatcaatgaagagagagttacaaggatatgaaatgaacatcagaggactaactccaatctgccatgcaaactgattcagtttagttcgacacgaacctgtgtgcctggatttttgtcatcccaactgaaccatgttggccttccccaatcagcataacttttcccgttctgtacagttacatagctgagatacgtctggtcgcctgtggcgtggtagagccaactcgctgcccatagaagctcatcaacgtaactggtggagttatagaaatcctggagcttgggatagctctcgcttgagaggcctctataagtgtcagcaaaagtgaatagtttctgagcatgctgaagaagcacatcagaatacgtggtatctctggatttgaagaccattgaagcagctgccatggctgctgctgcctcagcagcaacatctgatccgggagtcttcttgttgatct

SEQ ID NO: 3657 - DNA, 218 bp, Zea mays
tcctgggctggatacctcagatgcttggcgtacgacatcgaagacctaatagcaggccaccgtgccggaaccatgacaggtgcgaagcttaatggcaagattactatcatccaggatttaatcagatgtgtagagtcctatccggagtttatggcggttccgacgaatgaggctcctagtcaaggcgctgcttcttcctccactacttcaagcaccca

SEQ ID NO: 3658 - DNA, 355 bp, Zea mays
  misc_feature (7)..(9): n is a, c, g, or t
  misc_feature (349)..(349): n is a, c, g, or t
tcgaccnnntcagatgccttggggtaagcttgttttgcatcgtcgttaagtgctatatatagctgtggataccttttgagctgaatctcatggatagtggcattgaacggcctgttgctgtttttttttggtttgccgtcgtcactgcaagtaaatcttgtgttgctcatgtaaacgtgcaggccatcgcttctcagttatccagccaggatgagaaagttcttattgtaagcatcaatagtctgagcaaggtatgtagtcagcccaccaggttttgccgcgcgcattcatgtgtacagctcattgtcttgccttgacccgtgtgttaggtgtgagggatgcaactagncatgtg

SEQ ID NO: 3659 - DNA, 356 bp, Zea mays
gttggctcgtttgccatcccgccggcatccatgccgatcattggtgtgctcagcttcctcatctgggtcgccgcctatgaaaccgtcctagcgccattggcgcggcgcttcaccggaaacgagaagggcttctcccagtggcagcgcctcgccatcggccaagccctgtccattctgacaatggcgcttgctgcgctggtggagacaaggaggctggcgatcgcggaagccagcgggctgaggcatcgggaggtgccggtgcccatgagcatcctgtggcagggcccagttttctttgtgcatggtgcggccgaggtctttggcgccatcggcatgacagagttcttctacgacca

SEQ ID NO: 3660 - DNA, 335 bp, Zea mays
ctgcccccgtgtaggttgcggtgttcgcgcagaacatcccggccttctgcgagctccacttcggcattcccatggcgggcgccgtgatctgcgcgctcaactcgcggctcgacgccggcatggcgttcgtgctgttgcagcactcggaggccaaggtcgtgttcgtggacgtcgcgctgctgggcgtcgcccgggaagcgctccgcttcatctcccagcaggccggcggagcgagcagggtacccgccgtggtgctaatcaacggggcgctcgatgagccgccgccagcggcgacaggaaacgacaagatcccaggcgtcgatcggtgctacgag

SEQ ID NO: 3661 - DNA, 444 bp, Zea mays
agagcccatgacgccctactcgttcgcctcaggcgccgacttcccgctcttctcgccgacgggcttggacgggcagctgagaagcagccacggggccggcatcggcgtggagttcgagaccctgttcgaggagctgttcaccaatgctacggagcccttccaatgggacctctatgccgccaattagatagatggaatgggctatgtatgctatctatgcaaccatacatgtatgtacacgtgtccggcaacagaattagcttcggactagactagagtatagtcttcaactactatcaacagctcggtgtactgttccgccctgtccatgcagagttgcaaaccatggaatcccagtggaaaaaaaaacgttgtgcccaggctatctgaatctaatctaatgataggagccaagattcagaccaagcaatcacgttgaagcac

SEQ ID NO: 3662 - DNA, 340 bp, Zea mays
tcgtatatggttgccatatgatgttgccagttccattcctgaatgcagtagcattccgaattttccagctctatatggtaatcttcgaactgtaagtccaaaccttctctctgcatgctgcaaaaataaatacctcatggaggaagtcagaataaatgatctggcagacatgctccaaaggatcggggtgcggaagttgtctgggcatgacattgttaaaaatcacatcatggtgtccttgcgtaacggtttagatgctaatgtggctgatatagtgattagagagtatgtgagctttattatggttcatcttcagtcttcttgcaccagctgtaacttt

SEQ ID NO: 3663 - DNA, 1312 bp, Zea mays
  misc_feature (57)..(61): n is a, c, g, or t
  misc_feature (1251)..(1252): n is a, c, g, or t
caacagggtaggtgttcttttctcgctctctggaacagcagcaggtgtagatgatcnnnnnaatgctggatgcatagtataggagacacttaggtcatgtttggtttctttagtctagggactaaagtttagttatgggactaaagtttagagtctaacatgtttggttttaggggttaaaaatagtaagaatatactaaatgattcataagaagactaaaatggcctttaacattcttctactattagtgcaattgaactaaatgataggtaaatgtggaattaatatggtttagtcatttttagcacatatgtgaatgactaaagactaaatcattttagtcctagtgtttggcaaaaaaaagactaaataagactaaaaactagagactaatctttagtccctctaaccaaacaccccttacatacgttgcttgatcaccgtaccgacagtgtatctgggagcttatgacgaggaggaggctgctgcgagggcctacgacctcgctgctctcaagtactgggggcctaccacctacacgaacttcccggtacggtataaacttcgagcgtcttcttcttcactgtctgcgtctgcgagcagcagcagttagtgagccagagccacactggacaagtgaatttcggcatttgttttgacacatgactgtgctagtgacttggttgagtttgtatttgtgtctctcaggtcatggactacgagaaggagctgaaggtgatggagaacctcaccaaggaagagtaccttgcatcgctgaggaggtgcgtgcacgctgctgctgcccctcgacctggaggggcaaagaaaaaaaatcgtttttttttcaggactgaaaccgttacagttcgaaattctgaaaggagtttgtcttgaccacaggaagagcagtggcttttcaagaggagtgtctaagtacagaggggttgccaggtacggttttttttaacaacaaaagagataaaaaataaaattgctccaagtgtctctccataaatcagtagctccaaggttgcatgcatctgttgatgtgttagatgctcaagacagtgcacgcatgtttcgttcagacatcatcagaacgggagatgggaagcgagaatcgggcgcgtcttcggcaacaagtacctctacctaggaacttacagtgagcacatcacatccccaacacaatgcaacttatcatacaaattccgcctgccgtcgtcgtcgtcatcgtgactcgtagaaannaacaaagaaaaaaaaactgctccgatctatctaggcacgcaagaagaagccgcccgcgca

SEQ ID NO: 3664 - DNA, 431 bp, Zea mays
tgtggtcctcgtccttgaagtatatcttgatgaggagatcgacgtggccgacctcgtcgacggggctcgtgggcgtgtacgcgcgcatgcagagcttgccgcctatcgacgcgcacacgtacacgtgcctgccgacgggaaggccgagcttctggtccggcgatggcagcgcgaaccggaagaggcgcacgttgtaggacaggctcttcttatcgacgagccggcacctgaccttctctcgcggattggagagcgcgacggtcgacgtcaccggtaacggcgcggctgcagcgggggcctcgacgatggccttgaggtcggcgtggctgttctgcggggagtagtcgctgccggtgacaacgagctcgcccacgcggtacatctcgaggaggccgcgggccttgtcggagtggatggcgtcgaactcctcg

SEQ ID NO: 3665 - DNA, 1547 bp, Zea mays
  misc_feature (1487)..(1488): n is a, c, g, or t
agccactctaccactattcaataagacaagcattagtgtggttactgactgccgttgttttttgttgcttatgcttgcagtgctacgaaggcaagccgatatttgatttcgaccgtgctaggatgttccggtctggccttgttggtttcacgcttcatgggtcactttcacattactactaccatatatgcgaggtaaccattgctacatgatctgctcagccttgtttttgtacattcaagtcaaaattgcccttgtgtgacgtatttcaaccacacaaaaagctatgaaaattcttaacttgatgaattgacgaagcaaatgaaacgggttttaaggtgttcaagtatgtgatgatttggccaacttttcccatcagtttgacatttaattgtggggctcaactaatcggcacatagcaggcaccagatagagctcttgagttgatgcatacaactaaataaaagggggtagtctcaacattttcaagtcggacgacttgctggtcattctggctgaccgactagggcgattaatcacgattagtcggacgacttgggcgattaatcgtgattggtccaaaccgacttggatgattaatcgcgattaatcggatgacttgaaaacattgtctcaccggatagagcttgactaatcggcacatatatatgaatcattttaatttttttcaacaattttggaggctaacatgctttctaaggcaaacctgatggagtaaatacttttgttatgttgacaggcactgttcccattcaaggattggtgggttgtccctgcaaaggttgcattcgatcagaccatctggtctgcgatctggaacagtatctactttgtggtcttgggtttccttcggttggaatcacctaccactatctacaacgagctcaagtccacattctggcccatgcttactgtaaggattcatcttccctgaataagtttaatcagtttgcagggtgagaatcgagcaagcattaaaagagttgtgctccttatcttcactgtcattacgaacaacccatgggcattttatacatatcggccacatgaattattgttttgatactacccatatctttgggattaattgtctacctttatagtggtatgtgtgtaatatatactcctgcctctgggcatagaatgatgacttctacagacatcacatgtagcagaataattcaaagctagaactgaacttaattatatcattgttagcaccagcagaaccgtgtgtacttaaccattttatttgcttttccaatgttgtagcactcaagttagaaacccttcatcattctatgcttgtgcttttactaccctccctcactccattattggaggttttcaagtgaacatgcagcagggctcgtaacaataacatacctgtctcttgataatgttgttgcaaatatttctaattactagctattttgtctttcttctttcctgttctgacaaagttnnccttgtttgaattgttgcaggctggatggaagttgtggccttttgcacacttagtacat

SEQ ID NO: 3666 - DNA, 342 bp, Zea mays
  misc_feature (337)..(338): n is a, c, g, or t
cggcggcaccaagatcacccaaatgaggaatttactagtaatacgagctagtgaaaaccatacgtttttcgtaggtttttaatttaactactggccccgttgtcatggaacataggaacaattcgtggtcaaacctgtcttcctgcctgcttgttgattcatactttgagcctaggattttttttttggagaagttcaatcagtagaatgtagtggtagctgtgacagacattgaacgtggaattgaggattaatacttataggggactcagttgtgaagtcctctattcatacaccttgagtgtataatctaatctaacacacataaagcatgctnnactg

SEQ ID NO: 3667 - DNA, 408 bp, Zea mays
tgtgctgtgcatgccgtacgtgtgcggccggcctcgacctcgatctcgaagagaggatgtgatcaagctgagttacggataagggggaacaacccatatccaggcatccacacgtacttctccgatgatccaacattatttgttgttaactagtttttttcttttctttatctctttctttcttttgcactctctgtacgtgtaatgtaatgcagtgtaatttaattagtgagagaagcatgacgccctactaccggccggattattagttaacagcaaattaattactacgtacctagctactactcgcgtcagcagcttctactgtacttgaggtttcagaagcccaatatatatgtatattgtcaaatttgtaacctgcattatatgcagaggtcgtcgtacgtg

SEQ ID NO: 3668 - DNA, 402 bp, Zea mays
tctgagatacctgggtttccgcagcgcaagtggtgtcgtgctaccggctcaaataggaaatttacaccatctgcagaccatcgatttaagcgggactggagtgacacagctgccagaaagcattgtccagctcaagcgactgatgcatcttgttgggcaacggctcatcatgccagacgggtttggtagcatggaatcccttgaggagttaggtactatcgactgctgcaagtgccccgtcagttttggggaagacctagcacttctgagcaggctgagggtgctccgagtgaccgagtggctttcgtcggggtcgaaacaagtgacatggaaaccagaaggaaatctttgatgtcatccctctgcaaactcggaggagacaaccttcggcgtgtcactatt

SEQ ID NO: 3669 - DNA, 269 bp, Zea mays
ggtgctcgggagtctaggattaagagaaggtctagggatggatgagtgcgagcagatgatcgccaagtatgacacgaacaaggacgggaggatagatgttgcggagttcaccagggttttggagtctgctggcatttgctaaactaatttgtttgttgggtttgtgtgggtgtgtgtttgctttacccgaccgcgcgtgttcgaccagcagcaaggagatgatactaacaggatgctgagatttggtctggaagagtaacagtgttaga

SEQ ID NO: 3670 - DNA, 394 bp, Zea mays
  misc_feature (378)..(379): n is a, c, g, or t
aaccggccgatgcaggcgtcggcgaggaaggcaccgatgaggggcgtcgcggcggaggtgccgccgaagttggtgagcgtggtggcggccttcgccagcggcatgtgcagctgagtggtcaggtacgtcagcatgttggtcgagaaacccaccacggcgagcttctccgccacctcgttggctgcgcgggcgtaagtgcaaacgcaaaaattaaaccaattgaggtcaaggttcccagcaaaaacagcacctgttggttagtaaactcgcttaccgaagatgaagggcattgttctcagaccacccttcttcctgcacgtcatcttccccgcttcctccatggccatggctgccgccttctccgttcgtggtggaaannctcgaccaacatgct

SEQ ID NO: 3671 - DNA, 877 bp, Zea mays
  misc_feature (814)..(818): n is a, c, g, or t
  misc_feature (852)..(853): n is a, c, g, or t
actagttgttaaaaaccaaaacaagcagaaaaacgtgtcgcaacgagaacaaaatgttcagacctagataaccaatcccaattgagtaattgctatattgcagggatctgtaaaaaaagaaccgcacagttcgctcaactatgattctaagaaggattgcaagttttggatgtcaggtacaatatgagaacctagtcaagaactactactccctaaagcgaaccaaatgaggagcaagaggtcgacaaaaaaacagtccggccaacagaacttggacttctgaaccgaagtagtactgatcttggcacgaaatgcacaaagagttgaatcatcatcagacagaactcagtaataactgacagcttcagtagcaacggaggaaaatctggcgaaatgtaaaaagaatttcgccaaagagggggggggggagtctggggaatatggtcagcaagtttcagtagcaacggtgtaaagatttgcggaatcgacagattccaagaactctactcaaatcgacgcaaataattgcaaaaagaggagagtaggggacggcgagctcacgtcagttgggactgggacgggaaaggcggatggacatggtagtggtctcgcgggaatagcctcgaccgtccaatgcatcatggtgccgtaataatggccggggtgatcgacgaagacgtatctgaagaaggtggtgttctgggtgctggcgcggagaagacggtgagaggcttggagcatgacgacgtggacgttgtccacataggcagcctcccagaggacgtcgtcctgctccggggtctcgtagacgccnnnnnccgtgaggttcgcatggtgacgggtgtcgacccnncatcgtgacgcgcgagacggcgag

SEQ ID NO: 3672 - DNA, 458 bp, Zea mays
agtttccatccaagatcaggacattgcgatcaaaacatgtgggcgacaaagaagctcgccacgactgccctgctcgtgctcacctctctgctggctgcacggtatctgatagagcacaccgcgagctcagggatgtcgtctcggtaccagatcctgcatctggttcaccacctcgagtggctcaagagcccagcggacgcgaaagaaaccagtccgggagtcgtcatcacaacggcagcttcttcaaacacctcctcggagccggaggactctgctagtaaaaactcctccgccgccgctcaagtgtttccgtggctagacacgtggagccagatgacgcggctagccgacatcgccagcggccttccgcacgcgaccgaggcggtggacgacgggaggactgcgtgggaaaacctgacagcatccgtccacgttcaccagaggcagaaagcagagag

SEQ ID NO: 3673 - DNA, 1030 bp, Zea mays
cggacagatgttgaattgctcttgatcatcccgtgtgttatatgacatggacagcgttgatgaagagtggatatcaagctggcggaaatccttagtaagagacaacaccaccacacttcagtttgcagaagatttgtttgagagggttatggacaaactagagaagtttgcatatagccacaactgtaatggactcagcattgatcagatgaaggaactggagactgatgatgtacctctgcacactattgaagtgatacatgcatattggcaagacaagaggcagaaaaggggaatgccacttattcgacattttcaggtgagcatatatttttgccttttatttatctatttttggcttctttttttagctttctattgtttagtggtcatttagttgatacaataaagaaagcaggtgagcattggatagatgttatctagctctgttattatgtttcatgtaatgtttagtaagcagtcttgggttcttggtcacaccttaactagataaagataactgcagttcacttacataattttatgaacatatttatttatttatttagctgggcatatagtactgaagcatgcttgaaattatttttgcaaacaaagtgtactgtcagccttttggtactgccagtgccaatgtagtgaagtaaaaagccataacactctttacatttgctgcaaatccattgtgtcccagagtatgattctgactaagtacttattgaactacatcctcaggggaccttttttgttgcctattcattggtaaagatatgaaagccttctttttgaacagtagcaatgaagcaattgtttggtcatagttgattgtacttatcaattatttttagaattcatggtaacatagatgcttcctgtcaaataattgattgtttttcctgagctttgattatgacatatcttacgaagcagaccacaatcttgttctaagtcttgcataattttcatttttcagtcggctatgtggaagatctacgagcagcagctgcatgaa

SEQ ID NO: 3674 - DNA, 417 bp, Zea mays
tggtgaggaggagatgctagaagcaggagctcgtgatctgctcactgagacggagaagaatccggttcttgtggtacatgtgcctgctgctgctgctggtggtggtggcggttctgccattcctgaacatgctgaagccggtaaggagactgctcagagccctgtgcttgtaggcgtgctgcatattgatggcaccgtttttactcatcaacatctttaattatatccctattccatttcagaatctaacaaagttgaagatcatcatgtaaacgcggagcatgggacaaagaataatgaaagtgataatggcgtagctcattttgataaggaaatacagaacaatgtgcctgatgacatagaggaaagctccaaggaacatgaaggtgatggagcacctgtagttgaccagacaaa

SEQ ID NO: 3675 - DNA, 372 bp, Zea mays
ggcgagggcccgcagttcccggccgccgtgcggtggatccggaacaaccagctccccgacggctcgtggggcgacgcggccctgttctccgcgtacgaccgcctgatcaacacgctggcgtgcgtcgtcacgctcaccaggtggtcgctggagcccgagatgcgcggcagaggtacgtaattactgtgtgctggccgatcgagagaacacacgacggcagtgtacctcgacagaaaacgggcgttgctgaagactcaagtgtgtgtgtgtgtgtgttcacagggctctctttcctcggccggaacatgtggaagctagcgacggaggacgaggagtccatgccgatagggttcgagctcgcgttcccttccc

SEQ ID NO: 3676 - DNA, 1403 bp, Zea mays
  misc_feature (674)..(674): n is a, c, g, or t
  misc_feature (700)..(703): n is a, c, g, or t
  misc_feature (706)..(706): n is a, c, g, or t
  misc_feature (720)..(720): n is a, c, g, or t
  misc_feature (797)..(797): n is a, c, g, or t
  misc_feature (815)..(816): n is a, c, g, or t
  misc_feature (1328)..(1335): n is a, c, g, or t
  misc_feature (1370)..(1372): n is a, c, g, or t
  misc_feature (1388)..(1390): n is a, c, g, or t
  misc_feature (1393)..(1399): n is a, c, g, or t
tcgcgctaaacccattcaatttggagccagttgatgctcctcctagtggtttgttgccatcttcatcattcctattcatttatatatcattaattgttcgctagccactcgtaacatgatatgtttttactaagtttccatcatgccttttctcacagtacctgaatcttacactatgatctcggagtcgaagtttcaggtttgcaagtttccatttgtttgtagtagtattgacaattacgtttacaacactaatatcctaaaaacaggtgcctgtggaggttctctttaatttcttgttgtctgatggtgcttttggctttgtggatgatttccacacaaaatgtggtgacaaaggttgatgccaatctataatttcattattcatgaatatcttttggtctttagaagtattttgagttttgacctggatgacctgcagaatttagttgctccaaatggcgtacagatgagcaagggggacttgtaagggatgtctcatttttgcatccaataaaaatttatcttggtaagtcaagtgctttcagttaactgaagaaattggttggcattgaatatgacatgggctatgacttgctttatattttcttatgttccattttgattacactaaattttctttaggtgcaaaatttgggacttgtcaagaggtncagaaacttcgtctttacaaaaacannnnagnctaagatccactgnctgccagttaagttgcgtctttactgagcttttggtcattggggaataaagaatctgtttggtttgctgcctcagtngccatagtttgccacgtnnaaggttaggcaggtttgaccggcttgcgtgtgtgtttggtttgtagccacacttgtggcaagttttttctcttgcgtaagtctcactcgtcaatgacttgtaaaagtgtgatatgaatcctttaggcatatgccaagatgtggcgaagaatttgagcgcctaaccttaggcaagtgtggcagaaaatatgtggtattttttggcatcttaagtatacaaccaaacatgctatttttttgagacgtagaactagcaattattttagtgtcctctttttgtcgttttaatcaaacttagttctgtacctgaacaaaattcatgccttaattccttatatttggattttggcccaattaggttgccttcttggcagttgatggctatgtgcatgtcttagctttctaacatgatgtcctgtgccatcttctgtgttaagatattatccatttggcgtccagagatgatcatgctaacagtgatctgttgctagtcctgttcattctgctgcatgnnnnnnnnttgtagtaatgtttcccttccgaagaataattgannnacagctccctgcaatnnntcnnnnnnntggg

SEQ ID NO: 3677 - DNA, 771 bp, Zea mays
agcgcacacggagatgtcccagctgagccctgctggccacatggctgcgacgctcctcctcatcctcctggcctccgcagcagcagcagcggtgtcagctgaccaacaggtctctgcctgccagaatgacatagacgcactgtggcgcagctgcaagcagttcgtccagaaggaggggcccaagatgcctccgtccgaggactgctgcaaaaccatcaaggccttagacgcccacgcgtcctgcatctgcgactacgtcggctccccggacgccaggaataagctagacctggacaaggtgttcttcgttaccaaacagtgcggcgtcaccgtccccaagggctgcggtgagtataatagctttagctgggcatggccaatgatcatttgagaacgacaatgacatgctggcccgctcacagtagcagccagagagggtcctgcatgtcgatgtcagtcagctcatgctccacgtggcgtgatcatggtggaataatattctgtcatcaatcagacaagtaaacagacagggatatttacaagcatatgaaaacaacctactcagcagcaactcatgtgaagatcaagacttgcttacctgtgacctgatgactttttaccactgcacctgcacaaaaaataaaccgttagatttttagatctcaggtagttatgggctatatacatagattaagcattatagatctcgtctgttaccattgcttttactgccctcctcatttcgtgtcccttccactgcaggatcaaagc

SEQ ID NO: 3678 - DNA, 378 bp, Zea mays
tgttccattgtaagtgatcgggacacagttttcactagccagttttggactgaactgtttcacatggccggggttaagttacagatgagctcagcctttcacccacaatcagatggtcaatcagaagtggtgaaccggattataactatgtacctccgctgtctcgctggggatcggcctaaatcgtggttgaagtggcttccatgggctgaatattgctataattcatcatatcagtcggctctaaagtgctcgccattcaaagtagtgtatggcagggaccctcctcctatggtttcctaccagccagggaactccaaggtagcagccgttgatgtccagctgcaggacagagatgcatttcttgaggaaatcaaa

SEQ ID NO: 3679 - DNA, 484 bp, Zea mays
cgccgccgcactggatggccacgcgggcgcctgatgcatgcatgcatcatcaaacacacacacgtcgacctcgtgacccatccatccatccatccatccatccatcacaagttcattcattaggtgcgaggatgcaacagcatgcatgtacctaccgtagagcgggtagtcgaagagtcccctggcgccgtccttgcactgatcgcagaacaccatgccggccaccaccgtgctggccatggccggcaccgccaccgcggcgaattccagcagcagcagggtcagtagtagcctgctgctgctggtgttgatgaccatcatatgacgcggctccttcaccatatatataatatatgcagcacaagcagagcagacgatcgttgttgatgcttaatttgccagcaaaactcagatgtgtatatatagagagagagagagctgaactagctagctcaaaggtatagtagtaagtagctcgctttgc

SEQ ID NO: 3680 - DNA, 315 bp, Zea mays
acacaagttcaaagctgatggttctcttgagcgctacaaggcaagatgggttcttcggggtttcactcaacgccctggtattgatttttcagaaactttcagtccagtggtcaagccagctacagtccgaaccgttctttccctggctctctcgcacagatggccgattcaccaacttgatgtcaacaatgctttccttcaggggaccttgtcagagactgtttattgtgttcagcccactggttttgaagattccactcatcctgattatgtgtgccgtctcaatcggtcactttatggcctcaaacaggcccc

SEQ ID NO: 3681 - DNA, 459 bp, Zea mays
tatgtgtgttgaggagcgaaatccgtgaaatctaggtgaagaagagacgaagcactaatgtgaattgtgtttatgtgcctatgtgtgttgaggagcgaaatccgtgaaatctaggtgaagaagagacggagcacgtcgtcgtcatggttgcagctttgcttttgtcgtcgtggagcctccaccagtgccgtgtagcagtgagcccctcgctagtagtccgttgttttttgcatccctagtgcttgataaaatgttgaaccgttgtgtgtcgttaatcgcagccaccatcgacgttgtgcctcgcgcttcaccaatgcgatgaaatgttttagttgtgtgagataatatggttgtcgttcgaatggaaagtagaattaatctatatatgtgattagaaagtgccaagcacatgataattataggagtaaattgaatacttgctgtttggactgtgttcag

SEQ ID NO: 3682 - DNA, 353 bp, Zea mays
  misc_feature (345)..(346): n is a, c, g, or t
gcagaagctccgtgcaatactatggccactgagcacctcatctattgctaagaccttggatgtgttttgtgtgagcaccaccccatccatgacagcatcaggacaggagtggccgcgtctatgtaaatgggaagaaaagaggaaggaggctaactctgcttctactacagaatcctcatccttggacagaaactggtacatttgtgtaagggatgcgaggctcctccggtcgctacaaatctttcgtacctatgaaaacaatcgtttttcccttggctggcctacacgtgtggagatcactacaccaccagcatcaggtgatcttgttgctgctcaaggagtcannatcttgc

SEQ ID NO: 3683 - DNA, 353 bp, Zea mays
  misc_feature (30)..(30): n is a, c, g, or t
  misc_feature (34)..(35): n is a, c, g, or t
  misc_feature (40)..(40): n is a, c, g, or t
  misc_feature (109)..(109): n is a, c, g, or t
  misc_feature (115)..(115): n is a, c, g, or t
  misc_feature (117)..(117): n is a, c, g, or t
  misc_feature (153)..(153): n is a, c, g, or t
  misc_feature (167)..(167): n is a, c, g, or t
  misc_feature (175)..(175): n is a, c, g, or t
  misc_feature (180)..(180): n is a, c, g, or t
  misc_feature (189)..(189): n is a, c, g, or t
  misc_feature (232)..(232): n is a, c, g, or t
  misc_feature (237)..(239): n is a, c, g, or t
  misc_feature (245)..(246): n is a, c, g, or t
  misc_feature (252)..(252): n is a, c, g, or t
  misc_feature (257)..(257): n is a, c, g, or t
  misc_feature (261)..(261): n is a, c, g, or t
  misc_feature (278)..(278): n is a, c, g, or t
  misc_feature (284)..(284): n is a, c, g, or t
  misc_feature (296)..(296): n is a, c, g, or t
  misc_feature (345)..(346): n is a, c, g, or t
gcagaagctccgtgcaatactatggccacngagnncctcntctattgctaagaccttggatgtgttttgtgtgagcaccaccccatccatgacagcatcaggacaggantggccncntctatgtaaatgggaagaaaagaggaaggaggctanctctgcttctactncagaatcntcatncttggacanaaactggtacatttgtgtaagggatgcgaggctcctccggtcnctacnnntctttnntacctntgaanacantcgtttttcccttggcnggcctncacgtgtggagntcactacaccaccagcatcaggtgatcttgttgctgctcaaggagtcannatcttgc

SEQ ID NO: 3684 - DNA, 398 bp, Zea mays
gcgccagcgtttgggaacgtagcccacacctcccgtctcgcgccattcttctccactcccaacttgagagcttcatcttcctcgtcctgctccacctcgacctgacccgcccaacgacgtcggcgatgccgaccttggaagcggccagaggtgagattagtccgttgcggcgccttgccgggactagaggaggaggcaggcgaggccctcgctaggaccggggcgccggcgtgggcgcggaggagaaggtcgccgctggccatctccggcaggcagtgttttgtgaggacacggaggagaaggtcgccgctggccatctccggcaggcagtgttttgtgaggacacggggtttcttgggcgtgctgtgtcgtggcgcgcggcgtctaggataaacggc

SEQ ID NO: 3685 - DNA, 616 bp, Zea mays
tagtggaggagatctcgctctcgagtaagaagaaattttctttcttaaatttcaccctgagattctgcttagtacgtacgacggaaacagatcgatcgacaaggctttccatgaaaaagggacgtgcttctcagcaactctttttacatgcagcagacagtcccaagcacagggcagcagcaggggagatactgcggatcggcaaccacaacatccccagcagggtgtttacgttccgtgaactggtggacgccaccaactctttctgcccagaaaacctgctgggcgagggcggcttcgggagggtgtacaagggatgcattccagacaccatggaagtaataaatgagcatttcattccttgtgcacgttccattaaatttttttttaaactaataaggccatgaagaaacacatgttaaatatgcaggtcatagcggttaagcagctcgacaaagatgggctgcaaggtaaccgtgagttcctcgtcgaggtgctgatgcttagcctgctgcaccatccaaacctagtcaccttggtcgggtacagcacagactgtgaccagaggatcctagtgtacgagtacatgtcactcggttcactgcaagaccatctc

SEQ ID NO: 3686 - DNA, 424 bp, Zea mays
tcccactgcacttctcgagctcctcaatttttgaccacagctttactgcttcagccttctgagtgtccagagccttcagaactgaattcttctcatcatgcaggcgtgaacacttcatatcaagatcattgcaggaagcttgaagttgggacatggaactgtggagctcctccaatttggccctcaacttaatggcctgagcatccttctcacgggttgctacctcagctacttctttgtctgcctggatttcctccaacttcctcttcaggctctccaactcgcccaaaagtctagccttctcagcatcaaatgccttagcagcagcctcattctcagccagcaacgtggacaattccatcctgagacttttaacctctgcgacagcaaagttgtgcttcttctcagcagccacaacctcaga

SEQ ID NO: 3687 - DNA, 355 bp, Zea mays
tcagctggaaaacgtgggtttttttctaaaaagtctgttggaccacaagctcgtgagaagttcactttggaagatatgttgtgctttcaaaaggtgatgctgtgaaatctcattccatctgtgaagttacaccgttgcacttgtttcaacttatttttcttctaaacttctatgttaaagctttacatcaaatcacatctatgaatctatcgttttgttctgctaatttggcgcttctttgtatctcctgcaggatcctattccaacttcattactgaagataagcagtgaccttgtaagccgctcaattaaattgttccatgtcatattgaagtacatgggcgtcgattcacca

SEQ ID NO: 3688 - DNA, 344 bp, Zea mays
agcctcattgcctcaaccccaaaccaatccgtcgcagacactcaaggtcgcaggatgccgccgccgcgtgagcaccaccagccccaggacgaagaggacgacgataccgcaggcgttgtcaagctcatcagcgccgagggcttcgaattcgttgttgacaggaaggccgccatggtctccaacaccctccgcaacatgctcacatccccaggtagggtactcttcacctcttccattcccatcagcgcgccgtcctcgcatcacatccatccctctcgtcttccccacaggcggcttctctgagacgcgccagggcgaggtccgcttcccagagatccccacca

SEQ ID NO: 3689 - DNA, 557 bp, Zea mays
gcacgcgacgcttgacaccccgactgcctcgacccgcctgcgcccaggaagacccgacgccgccaggcgacccctcacctctctcctcccttccctcgggaccagggcaacgcacaacgcgccggcggtgaccagtagcccgctctggcaccagctcggcagctccttgcatcgcatctcccctgctaggcctcctcgtcccggtacgtcgtgcctcctcacctcccgctttccaaactctcgtctgctgctttgcttcgccccgccccgcaatgggggagatgtccggtcgtccgggccgtgttcttagcctgggttcagcaagagctgctcatggtgctgcagctcggaagatgattcagctggtgcatgcgaggaacctattatgctgaaacaaagtaccagctcaagaggtcctagccgctcctcaaaggattcaaagagcctctacgcaaaggtcagaagcactcagcgtaaatttcacagtgatcactgaacctgcattttttgttttctgatggtttagttatactacataacagaggagaagggagagg

SEQ ID NO: 3690 - DNA, 364 bp, Zea mays
gggaagccgctggccaacgtggtgttcaagacgtacggcttcatcagcatgggccaggcgctggcgttcctggccgacttgaagctgggccactacatgaagatacccccgaggtccatgttcttcgcgcagctcgccggaacgctcacggcgtccacggtgcacttcgccaccgcgtggtggctgctcaccacggtcaaggacatctgcgacgtgggcaggctccccgccggcagcccctggacgtgccccggcgacgacgtcttctacaacgcctccatcatctggggcgtcgtcggcccgctgcggatgttcggcagcctcggcaactactggcagatgaactacttgttcctcgtcggcc

SEQ ID NO: 3691 - DNA, 298 bp, Zea mays
  misc_feature (289)..(294): n is a, c, g, or t
gtcttcacgagggaagctgtctgccgccggcgtcctcctgctaatgacgctcctcatggtggccgccatgcgggcggttgaggcacgagactgcctgacgcagagtacccggttaccggggcatctgtgcgtgcggtcggactactgcgcgatcgggtgcagggcggagggcaagggctacacgggcggcaggtgcctcatctctcccatcccgctcgacgggattctctgctactgcgtcaagccttgcacatccaccacgacaaaatgatgagacaagagcggaggnnnnnntgca

SEQ ID NO: 3692 - DNA, 341 bp, Zea mays
ctgaagatgatggcattcggaggcaacaaccgggcacatgctttcttcaagcagcatggatggaccgatggcgggaaggtcgaggcaaaatacacatcaagagccgctgaactttacaggcagatgcttaccaaggaggtcgctaagagcgccacgaccgataatgccctgccatcgtcacctgtcgcatctgaggcttccaagccgccatccgatgacttccctgaattcaaactcccagatgtgccagcaccaccggcagaggatctgaatgggaagcatgagcccaagtcccccaaagctgctcctcgttcaccaaaggccgctactcattccacctt

SEQ ID NO: 3693 - DNA, 440 bp, Zea mays
aacaatacctctctagctcgccaccaacaatggcctctaggttctccatcatgctcgccacaacggcactggctacgttttttgtgattggttcgtgcaccaccccgctcaccttcaaggtcggcaaaggctccaagcctggccacctggtcctcacccccaacattgccaccatctccgaagtggagatcaaggagcacggtggcgatgacttctcctttgagctcaaggagggcccggccggcacctggacgcttgacacaaaggccccactcaagtaccccctctgcatccgctttgccgtcaagtctggcggctaccgcatcgccgatgacgtcatccccgaaaattttaaggccgacaccacctacaagaccaccctcagcatctgatcatcctcttatgaggaataatattttgaaagagctcatctgatccat

SEQ ID NO: 3694 - DNA, 574 bp, Zea mays
cacttcaattaggtgttcgtgtaattgaattggacatatggccaaattcttgtaaagatgacattgatgttctccatggaaggtatatatctgcatactttgtgcattcctttcatcaggatgttttttttgcacaccatcttgtcgaaacattatttctagactgaaactgaagctgccatgagatgtgctgactgtgacttcattcacgttttcactcttgataggacactcactgccccagtatcacttatcaaatgcttgagatccatcaaagaatatgcttttgttgcatctccctatcctgttattataactctagaagaccaccttacacctgatcttcaggagagagtagctaaggtaactgcatttctttgaatgattaatatatggcaggtgattctagtgtagctatttctgaaattttgtatagatggtccttgaagtgtttggagacatcctgtattaccctgaatcgaaacatcttcaagaatttccttcacctgaagctctaaaggggcgtgtcatgctgtcaacaaaacccccaaaggagtatctcgaagcaaagggt

SEQ ID NO: 3695 - DNA, 534 bp, Zea mays
caaacatattgacctggataaggggtgcacatacagccatgccacactgtcaaattgcgcctcaaatgcttttggagatgatttatacggcttcagagaatttacagtgttggatatgcaatctgctacgtgtaaattctcagagagcttcatgatgtggtcgcaaggtggtgggtgtgtttacaaaggagaaattatgaacagaactgtgatgatctataagctgcactgccatagcattgagagcgtgaggcagttccagcaagaggtattccatgtttctccgattttctcatcttttgcacttgatatgtttattgattagccagtgcactctagaagttgctattgaattcatggggaccttttatcagttatgcatgtatctaagaacatatcctcgcatagctgaagatacttatttctcttttctatgtcaggtttatatcctcagcaatgtgaggcaccctcatctagtgacactggttggggcgtgcccggaagcgctgtgcctcgtttatgaatacctgccaa

SEQ ID NO: 3696 - DNA, 455 bp, Zea mays
tggcccttgtagggcgacaccactcccacgcggatcgccttcctcgtgtcaaccgactctgcgcacacacacgttcatcagatcagctcgacgtacgtactgtgtgctctaggtccagggagatcttggaaccgcgtcagatacctatgaacagcctctggacgatccgggcgacagccgctgcctcgacggggttgatcaggctgcggtcctgcttgcccgtggcctcgctgccgccgtcgatgttgatgaacgagtaggacccgtacatggggccggccaagtgccgcctctcgtagttcctgttcaggacattggggccgtcggttatccggccgccgtagaagctggagacagggaacttgctgatccatgggtgcatcctgtactgtacgtcgaggaggtgcttgggctgttctagagatgttagcctctcaaacaaacttcttccaaaa

SEQ ID NO: 3697 - DNA, 393 bp, Zea mays
gtggtcgtgcgtgcgcagcaccgcctcggcggcccgtggcgacgacaccacgatgaccggcatggcgccgaggcggaggaacatgaggtccgtgccgtgcttcctggcgaggttccagagggagaggtgagggagcgagccgaccaggtggaggtgcccaaggacgggcagcgccggaggcgaaggcgggagagggtcgtcgtcgtcgtctaccagcagaggttgcctctgcctctctctctcttggcaccgaacgagtagcgcacgaggaagagcaggagtgggatgagtagtagaaaccatgctcgtggagacgtcatctcacgcatgaacacctgctgcacttggtttgccatggcaaaggacgcgaactaggaatagcgcactgatcag

SEQ ID NO: 3698 - DNA, 355 bp, Zea mays
aagagaacgtgactcctgcctctaaggtgaagaccgttgttaggggagttcttggtacaaggatggataattcagtgtcagcagcaaatgcttcaaataagaagaaagttcttgggtcaagggtagataattcagtgtcaacagagaatagctcaaataagaagcaatgtgaattatcatcgaagtccaaaaaagtccacacagtagattttgatgttttctattcggataaggagaacttgactcctatatcttcaggaggcatgaaagcaaggaagtgttttcccaaggacctctcagtcgacttagaccaagatctggaagcattctgctcagacaaggagaacttgacacc

SEQ ID NO: 3699 - DNA, 340 bp, Zea mays
aaacctacactgtacacatcttgactactaaacaggcaccacatttacatactccgccgcagcaacagctgccgcgtcctgttccgggtgctgttcctccatctctccgctgatctcctccagtgccttccccttggactccggcaagaggagcgtaaacacaaggccaacaaggttgcacccaaccaaggcgaacagcatgcttcggttgttgttatgtttttcggcgtaaacgaaggcaaacacgccaattatggcgccgagcttaccgaatgccccagatatgccgtggcatgtcgaacgtagccgtgccgggaagatctccgctgggattatgaat

SEQ ID NO: 3700 - DNA, 315 bp, Zea mays
gtggagcagatctacggcacgccggggcggccgtacggcctgttcatgggcggcggcggaaggctgctggccgcgaacgtggtgatgatcctggtgatcgccgcgtgggttagcgtcaccatggctccgctgttcctggcgctcaacaagatggggctgctccgagtctcggccgaggacgagatggccggcatggaccagacgcggcacggcgggttcgcgtacgcgtaccacgacgacgacttgagcttgagcagcaggcccaaggggatgcagagcacgcagatcgcggacgcggccagcggcgagttctag

SEQ ID NO: 3701 - DNA, 454 bp, Zea mays
  misc_feature (437)..(438): n is a, c, g, or t
ccgaacataccacggggtccggggcgtcatcctgcttgcacatcacccacggcacgccggcgttggtcccgacagccatctgggccgcccagtgagcgtatggcttgccgccactgcccacgacggactccattggcccgaactcgttctccacctgcgcatagtgcgtggccggatgaaggctctaaaagttctgctccagtttcgagttgcgtttgcaagtttggactggaaatgtgacggtggtgtggtgcacacctgagccatgatgatcgggcctccctgccactcgaacagcccctccgacttcatcatggacactatcttctccacgaacttctgcattgccgcctgccgtaaaaaaaagagagagaaatcaggcacacatccctgccaccccaattggtgcaaagtgaaagaatgacaaaaaaaaattnnccataaccaaaaaaaa

SEQ ID NO: 3702 - DNA, 973 bp, Zea mays
  misc_feature (60)..(61): n is a, c, g, or t
  misc_feature (63)..(65): n is a, c, g, or t
  misc_feature (283)..(283): n is a, c, g, or t
ttcagatttcctcccacgaaggctactggtacctctccagcttcttcatcctcagtactnntnnncgaaccataagattctaattaggccgataaagcgcaggggaaaatatgaagtacacacatcaggaactagctacgttaaaactcacgacgtcacagccacatcaacaattccagggtgttcgatcaaaactgcttccaagtcagctggagctatctgacggtcagaaaaagtggggaaacagtttgttattactaaaaaaaaaagaacagaccaaacncggtggtgacggctttcacacaagtagccttgtttctgcagttttgcggagaggctgcatcgaactcagaaacattggctcagtgaaaaaggctcgccactgcgccaggcttgttcttctcagtttattattatttttctcacaatatatataatataataacaatggcaaaaacagtgtactttatttggcctgctaaaggaagcccgcatacctgaaatcccttgtacttgatcacctctttcaagcggcccactatatacaagtacccatcgaaatcgaagtaggcaatgtcaccagttcgcagccagccaccatttattgcgcatggatcaacatgattcaagtaacctgtgaagaaacgttcttcagaatccaaacacatatttggtcttattaggatttcagtcaccagctcacagcagataagcacaatcaggtctgtttaagttttatagcatattagcaatcctaccattatctgtgaaagaactactaaacatctgaatgctaattgacaatgaaacatgagtttaatagagtgcatgcaaaatggtacccagttcgtcccaaagtgacaaagtagcattaaactcatgaggttacctttcattatagctggaccatggagccagagctccccacaagagcctggagacaaggagcaaccagttccacagaacaatctgc

SEQ ID NO: 3703 - DNA, 470 bp, Zea mays
cttattgggaattacgttctgtacaaatcttcttttagtacttcaacctaaataaagcgtgtgacccagccaaatgcgcaagcaaaatactcctatgtgcaacaaacgctgtcgtctgtacatctccggaggctgcaaaccaaaatcaccggtcttcccgtcgaaccgtgtttgggtccgacatcatgtccatcatcatcttctctggagagtcttcccagctagcaaaagttttgagatcaacctgaaagagtaaacgggaatattgtgggcatgcatgcacgtttcaataacgatgaacatggcaacaaatggttcaagtttgctcttagtcttggtagtacctttcttcgctgctctgagaagatgtcctccctcttcttgtacatattctgctgtcgtttcgttgcttctccacccagcccccatacctcaacatcaagcactgaagcctcaacaggcaaataaca

SEQ ID NO: 3704 - DNA, 891 bp, Zea mays
catcctcttcacttcacctgattctagatactgtaattctgtaaaaacacctttacaaacatgtattaactcattaatatggaactgcgatggttagctgaactatgtataacaacttctgcttaccaaattgttgtcacacgttcttctagagaagataatcagtgaatttaagactcttatattatagcactaaacaaggtaatatatcttcaaacaatgtacttagctttctttttacctggccatttaggaatttagcagtgaaggttttgctcttgccactaaacaaattcaagtgttattctgtattttggtttggcatgcattgggtttcataccgtagcatcatcacttctcatcacattggtatgtctgatagtatccctatctgatgcattgggctggttaattttgtgatttacttgatattgtttttatcacttcatattaactttaagtgcatatttgcactattttatttgaaatgaactgtaggtatacagtctccaaatattgagagcttcttttttgcatgcagattatccattacgaattgccaaatgatccagaaacttttgtccatcgttctggacgcactggacgtgctgggaaagcaggaactgcaatcttgatgtttaccagcagccagaaaaggacagttatgtcacttgagcgtgatgttggttgcaagtttgagtttataagccctccgtccatagaagaagtgctggagtcatctgctgagcatgtcattgctacattgcgaggggtgcacccagagtcaactcaatactttcttggagcagctgagaaattaacagaagaactaggacctcatgcccttgcttctgcactggcacatctgagtggattttctcagccaccttc

SEQ ID NO: 3705 - DNA, 333 bp, Zea mays
ggagtccaatggcaacgatgagaaaacagatgcctcagcagttgataagtatccacttgtatctgtccctgatgagacactgacgccagaacagttaaaggaaaagaagaaacaaatcttacttaaaaccacaacagagggcaaattgcgcgctaagcagaaacgtgctgaagaggaggctttgcaggagaaacaagaagaaaaggggcgtgcggagaacccagagttataccttgaaaagcttcaggcccgatattcagaactttctgataaatttgagcagaggaagcgacagaaagttaatggtagtcagacaaatgggaaccatagttc

SEQ ID NO: 3706 - DNA, 465 bp, Zea mays
atggaagcacgatgcagcatttcggtactctaaaaggtaagtaatttacattctcaatatgcttttccagaagaactttgttgaattagagtagcagtttgtgctgatcttttactccacgctagcagctcaagtttttagcagcactggcgaccatgatggacgatttcatattaagaggactatatgctttgctgctacggacaagcaggagccggtcgtttcacgttcctcagacatgccggttttgcatgaggcagaaagtggtactaaagttacccctgcatctgaaaactcctacttcgctggcagaggtgctggaaaaccaggattcatctcttttcaagaaagcagcttccgaaagacaactgtggagagcgtgccacatcctggcaaggaagcatctcgattagtttggtttattggccctactattctcgtgtctttcttggttcttccataaaa

SEQ ID NO: 3707 - DNA, 527 bp, Zea mays
actggcggcgccaccggcgtggcggacggcagcgcccttgtccacccttgggatgttccctctcaggcacaccacgatctttcccctggtcttctcggggtccagcgaccccaccaagcacaactggctgcacaaggctcgaatacacgcacgcatggtcaatacattgcacactgtgattagtgcagttaatggtgagctagcttacgcgtcttcctgcttgctgccaggatgtatggcttggtcgccggtgatgagcgggtagaagcctttcccgtgcagccacctcgccgagaggctcacgccctgacaaagcacaaggcatgtgacgttacggtgcatggctttaggtgtgtgtgccgcacgtacgcagtgcagaagcgcgcacgcacctcgaccctggtgtggttgaacacggcgaaggccgagaactccctgtcgacggagctggcggcgacggtgaggatccacggcgcgacgttggtgacggtgccgaggtccgggccctcgttgctggcggagcagac

SEQ ID NO: 3708 - DNA, 411 bp, Zea mays
atcaagaggttgcaggacactcagcattcagaggaccaatttacatctgagatgtcaactctgggaagtgtaaggcaacgtaacttagtgccacttttgggatactgcattgtcaagaatgagaggctcttggtgtataagtacatgccaaagggttcactttatgataatttacaccagcaaaacagtgacaaaaaggcattggaatggccattgaggctaaaaattgccattgggagtgctagaggtttggcgtggcttcatcacagttgcaaccctcgcattcttcataggaacattagttccaagtgcatattgcttgatgatgactatgagcctaagatttctgattttggcttggcaaggcttatgaatcccatcgacacccacctgagcacatttgtgaatggt

SEQ ID NO: 3709 - DNA, 402 bp, Zea mays
gctgcccaccaagaacgcgctgctcttcacggtgctgtcgcagtacgtgccccgcctggtgcgcttctaccccatcacctcggagctgaagcgcaccacgggggtgttcgccgagacggccttcggcggcgccgccttctacctgctgctctacatgctggccagccacatggtgggggccttctggtacctgctggccatcgagcggctggacgactgctggcgggacaagtgcaccaacctcaacttccaccagtgccgcacctacatgtactgcggcggcggcagccagggccagtcgggcttcctcgagtggcgcaccatgatccggcaggtgctggcgcaggagtgcgcccccgtcgacggcagcggcacggggttcccctacggcatctacaccac

SEQ ID NO: 3710 - DNA, 564 bp, Zea mays
tgccccaggtagtacggtaccctgttctgttctttacgccacagatacttgtatatcgatcgatcagggtgtcgtaccgtcagtccgtcacacactgtgcttacggctatatatatatatatatcaggttttcgtgtgggtagtgcggccacacctccagagttcagaggttatgaacgcgaaaaacgtgctgatgttcatgatcctacttcagtacgtgcctcggctggtccggataataccactctacctcgaaatcacgagatcagccggcacagtagtggacactgcatggccgggggcagcctttaacctgctagtttacatactcgctagccatgtaagttctctgatcatttaccaatgctgttgaaatatactcacaggatgtaagtcctctgatcatttaccaatgcattggcttcgttcttacaggtccttggagctctttggtacattctggccatacagcgagaggacacctgttggagagaagcttgcaacagccaggaaggctgtgatctggcaagtctgtactgtgggagtactgcatctggaaacaac

SEQ ID NO: 3711 - DNA, 393 bp, Zea mays
acgacacgacagcagcaaggtcatggtcatcgtcacgagccggtccgagaaggtaaccaggttcgggacgacgacagcggccgtgcgtctgcagaacctgtcgcacgaggcgttctggtacttcttcaagacgctggcgttcggcggcacggaccccggcgccgggacgacgcacgcgagctcctccgtgcgcgtggcgatggagatcgccgggatgctaggcgggtgcctcgtcggcgccaacatcaccgcctatctcctgagagacaactgcgacgtccgcttctggcgcaaggtgctggccttcctgcgaggcgtcgtgctcacgcacaggcagccagacgacagcggcgacggcgagcacccgttcgacctcataagcgacaacaggct

SEQ ID NO: 3712 - DNA, 360 bp, Zea mays
  misc_feature (329)..(333): n is a, c, g, or t
agccggagtccgtccagcgcggcgcgggttgatcccttgcgtctccgcccctgccccgcgccggcgacacctttttgcggtgcttgcgttgcgtcgaggagggacaggcgcgctgcgtccttcgcacggcaacggcaagacggcggcgttgaagatgcgggtgttggaggaggacctcttcccctccaccccaggcaaggtgaagatcgagcgggcgggcgccatgaaccggcagctccaccgctgcttcgcgtccaccagcaccatgttcctgtgggcgctgttcctcgtcgccatgacggcgtcctacctcagcttccagtccttcnnnnnacggcgtcctacctcagcttccagtcc

SEQ ID NO: 3713 - DNA, 397 bp, Zea mays
  misc_feature (390)..(391): n is a, c, g, or t
cggagaagtgtcggctctgctcggaaagatggcctcgctgcaggatcttgaccttagcggcaaccccggcctgtgcggcgacatcgccggcctgagttcctgttactcggatccgattcgaggcggctcccgctccagacgctacagagcgaggctagtcctcgtcgtcgtcacgctggtttccgccacggcgcttctgccctccgtagctgcagtgtcgttgctgctgatggccaggaggaggaggaggcgagccggacatgacagcggccccgacacgacggcgagcggtgccggcggcgcgatggctctaacggtgtccatatggggcaaggacgcggcgttctcgttcggcgacatcctggcggcgacggaacacttcaacgaggnnctactg

SEQ ID NO: 3714 - DNA, 362 bp, Zea mays
tttgccaggctgttgaactccactgattttgagggcagtgcagggtaacgccgctgggaaagcgtcatgagcctcttgattgactgaaggtacttgcgagtggtctcgtcattcatgatgtgggcgacgctgtttgtgtagatcttctctcgggcagaacgctcgtggatgccaaccatagtcactccaatgggccatggtgcattcccgattgccaacttgatatattggtccattgctgctaaataatctcgcttcatgcaacactcgacaataacaagcaacgctcgacggatatcatcaggaagaacctaaaaatggatccagccatacatgcatcagaatcagtgaagcaccaagaa

SEQ ID NO: 3715 - DNA, 384 bp, Zea mays
ttttttccttctttgtgccctccaaaaagttgcatgagaaccgagctagtgcttaggtcgataagcaaggtgggctatgatgggtgtgtgtaggggtggtaatgggctctatgttttagattataaaatttaaggatcggatcattattaggatcggactctatttttattcatttttgaactaaaaattaattaagagattaaacaaatcgtgaagaaacatttgagttgtgatccattaccacccttaggtgtgtgtgagtagcgtgtgtgtgtgttcacatatgaaccaatgctacagctgtacccagatgcgaggcttcaaaaaaaagttgcatggaattggagatgtctggagtatgaactgactgcagacttcacgag

SEQ ID NO: 3716 - DNA, 781 bp, Zea mays
ggagccctccgaggagcgcggccacgacgctggaggagcttatggtgctcagccggagactgaggtgcggacaagctctgccggttgacgtcgggaagaagagactgccctccgtggtaattctctactaccactcacgttcatcttcatctttgtttatatctgcatcagcgaatctgaaacagccacgcccttcatttaataaatagccagggacaagcttgcaaaatccgtaaagttggttagcattaatcagttaaaaaatacaaaaaaagtgtcacatcgctgcagcatattcagacaaattcatatcatatcgttgtgtgaatgggaccattacatctgcattgccgttgaggcaacaggcaagccacggatgcatcttctcattggcaagcagaagttgttgttattattatattgttgtcagtgtatgatgcagacaccacaactgctctagccaaacgctgatgacagtgctttgtccctgctcttgctctgtctgatgtttcaggagctcatgaagaagctcttcatcgtgtgttcttagctgcactgcacatggacgtgccaaaaggtacaggctgcatgtgagaccataatagaggaagcatggcaaagtggggcgttcgcaagtagaaagcctaactgtcgggtgactggagttgtaccgtcagagtcgtcaaaatgttggtctttgtgtgtgtgtgtgtgaaatgaaacgttgtgcaggagagatactctggatttttgtttgtacgacaagtttgaaagaaatgtt

SEQ ID NO: 3717 - DNA, 351 bp, Zea mays
  misc_feature (345)..(346): n is a, c, g, or t
aggagacagctagctgctactcttgatgagttctgggggcatctgtttgattaccatggtaagctcactcaagaagctagcaccaaaaagtttggtatcttgcttgggatagaccttagaacacctagcacatctgtaagaacggataaacaagctgctgaaatacttaagagcccactggtgagagactcaatgcggggggcagcttttttgtcaagctcagtggacctgatgtcccctaagaatgaaacatcgaatttggaacttgcatatgggcttcagaggggacctggcatgggattgtcaagctggtctcagggtatgcagctaccaaatacacagctnnagagc

SEQ ID NO: 3718 - DNA, 353 bp, Zea mays
ctcatcaaatgcatataaatttgtcaagagattgtagtagccaacatggtcaggatccagcttgagcagattctttgctgctacttcgctcatcttagtgttgttgtgttttctgcatgcagcaagtaaggcacaccaagtatgggcaacagctcttccatccatatcacgaatgactcttatagcctcttgcagttcaccagcccggccaaggagatcaaccatagcactttgatgctcggcatttggcacgactccaaaaacttgagtcatgctatcaaaaatttgtattccttcctgaaccaggccagagtggctgcatgctgataacactgacagaaacgtcacactgt

SEQ ID NO: 3719 - DNA, 398 bp, Zea mays
gagcaaacccatttggtgcaaagcttcctgagccgccgcttgggttggccatggaaggggagaagtggcggaaacagcggattttggagctggaggtgtacttgaagaggatcgagctgctgcaggatcaggcgaaggcaacgcttgaggagctcaagtcatcaacccctgggtcttaattcatgataagatgagatcgctttggttttaggattcttgctctgattcttagtgtagatgtttaggcatttttgcatatgttacgtccataaaagaatattgttgacctgattggggcttggaactagtttatttgttgttctgtatgttcatgtgatattagcttcaatttatgatctttttttctttataacataggttcatgttcctttgtttac

SEQ ID NO: 3720 - DNA, 394 bp, Zea mays
cgggtggtggaccttggcggcaacaagctcgctggtccgttcccgacttggattgctggggcgggagggctgacgctgctcgatctctcgggcaatgtgttcacaggcgagttgccgccagcggtcgggcagctcactgcgctgcttgagctgcgcctcggcggcaatgctttcaccggcgccgtacctgcggagattggcagatgcagcgcactccaggtgcttgatctcgaggacaaccacttcaccggcgaggtgccatcagctctaggtggtctcccgaggctcagggaggtctatcttggtggaaacactttctccggccagattccggcgaccttggggaatctgtcgtggctagaggcattgtccatacccaggaacagactcactg

SEQ ID NO: 3721 - DNA, 919 bp, Zea mays
  misc_feature (908)..(914): n is a, c, g, or t
ttttgatatataaaaagtagtagcttctattgacttagaaaacaccttaggaagtagtaggaattaccttatttatggttttctaagacggcgtttcagaattgaggttgtggactgattgcaacatttgcttcgacctgtggggcagatttttttcaatgagggaatgcagtaactggaaatacttatcatagtaataaactataaaaaaggatgtagtattggggaaaaagattcagggaaaccttttttgcaggtgaatataatgtattggacagaatgtcgagatcgctagatcctaaattttctgtaacttgcgatttttttaatcagcaaaagtaagcgagaaaatgaatagagagctatgttatagactaaaggaaaggagaagagcaggatgcaaactagagaagagcacgatgcaaactttgccgccagtcacaaagcgctgccttatccccttccttttttctttttaacttaccacatcggacatcagataactctcgtagcttctggaacctcccacaaatgacagtacattatcgggagaaggggaaaaaaggtgcagaagccagcatctagatgatatccgacggctgacaccaattagaacgtaccatgcttgttaagctgtttatttagcagtagaattctatatttgagatgagatttgaatgaaaaaactttttctttcaagcggaaatcagttggtaccttgggagggggaaggactggtgcttcttgctatccagctaccggacagaatgctcaggtcggtccttccccattcgctccttgggcagcggtggattgaaggtgcatcattcagatatgcagggacaacgggtatggggtagcgacatggtggtggagagggccaaatcttcgatgaatgcaaccggcannnnnnncatca

SEQ ID NO: 3722 - DNA, 355 bp, Zea mays
ggaggccggcggcggcgagagcggggttgacctggacaagttcttcgaggacgtggagggctggaggcggtgaaggaggacatgcgcgggctggagggcatgtacaagggcctccagtccaccaacgaggagaccaagacggcgcacgacgcccgcaccgtcaagtccctccgctcccgcatggacaaagacgtggagcaggtgctacgccgcgccaaggccatcaagggcaagctcgaggatctcgaccgctccaacgctacctcacgccaggtgcccgggtgcgggccggggtcctccaccgaccgcacccgcacctccgtcgtcgctggcctcggcaagaagctcaaggacc

SEQ ID NO: 3723 - DNA, 472 bp, Zea mays
cttttttttgactgtgtatatctttttcatgtggagtccattaaaaatccatgcataagcagccgcgagaggtctcagacagataagatggtcgacggcatggacttcgaggagctctgcagcgacttcgaatgcataagcagcccctacgtggagtccataatgaggcaggtcgcgcgggacatctttgagcttcgcgaggataaccgcgcattcagctgctacgccgtccccgtgaagtatgaggtgttcctctgctatgtgaaatcttttacattttgtacattaattggctctttcaggcttttggtttgagtcctcttagatcgatatttcactttggattttgcacttgaaaacttgcaggcggttacactatgttgccacggttatcagtttctatgcgtttttatcatttatgttatatgacattttcatgacacgtatgtagagcatttgatagggcgttttt

SEQ ID NO: 3724 - DNA, 507 bp, Zea mays
gtcatgtaagggcagacaggatgaaattaatcatgcataagacatatgcattgcaccgtcagttatcatcaacatgatctgtatatatatacccccgtgtgcacgcaggtacggttcatttgaagatggtgacgcaaagctagacgagatggaaatggcggatggtttcgagatagctatcaagaaactgacggaatggcttgcagagaacattgacaagaacaagactaggatatttttcgcaggatcatcaccaacacattcctggtaatatatataagatcgagatgtggtgttgttgttgttgttgctgcttaattaattaattaatttcagggctagcaactggggcggacaagacaagaacaagtgcctgaacgaaacggagccgatcagctacagacccggcggcgggtacaaggctgcaaccacggactacagcctgatggccatggccaggtcctacttccggcggacgctggagccgagaggcatacgcgtccagat

SEQ ID NO: 3725 - DNA, 309 bp, Zea mays
  misc_feature (23)..(24): n is a, c, g, or t
  misc_feature (27)..(32): n is a, c, g, or t
  misc_feature (48)..(49): n is a, c, g, or t
cgccattacggcagcaggtgganncannnnnntaatggcaacatactnncatgtagccttgtctgggccagcccggacctggctcatgaacctcaccccaggatcgatctactcctgggaagagctctgtgcgcggttcacagcgaacttcgccagcgcttatcaacagcatggcgtggaggctcatctccatgcagtgaggcaggaacccggggaaactctccgggctttcatctcccgcttcaccaaggtacgagggaccatacctcgcatctccgatgcttccatcatcactgctttccgccaggg

SEQ ID NO: 3726 - DNA, 259 bp, Zea mays
  misc_feature (249)..(253): n is a, c, g, or t
gccgccctcggcggcccgcacgatgacgttggccacccgctcgcaggcctggcagatgtgcatccgcgagaagtcgctgagggtgaagagccgctcgtggaggttggcggcggcgccgtgcgccagcatgcagtcgcgctccatctccccgaacttgacgccgccgaaccgcttcttgtcctccaccggctgccgcgtgagcgggtgcaccggccccgtgttccggaacttcaccttgtcctccgcatnnnnngaccag

SEQ ID NO: 3727 - DNA, 361 bp, Zea mays
tcgatctggtcgtcgtagcgctcatcgcccccgtcgtcgccggcctcctcctcctcctcctccgctccctcgcctgctccagccgatctatgcgcaaggggctcaacggatggaacaaatcctcgtcgatgctcaggtccgtgccccccgctctctttttcctccgtgttttcgccgatctgggaggtttttgaccgggttttgtggccctgttcgtccagatctggggagttcgtggctgctccttccatgggttttgacaaaaaaaaatctgctcttgtggttgcagggacgggttcggggtcaagtattccggattcctccacatacggccgtgcggtttctgtagaggagactgacg

SEQ ID NO: 3728 - DNA, 360 bp, Zea mays
ccttcacaaatacaagctagcaaggcatctggataacttacaagataagtttatgcgtgccacctatcatttgatactgcctgatcaagtctttggatcaagtatgtttagaaaaaggaatatgcacaggaaatcaagcaagaggatgcggacagtaacgatcgcgtaaaggagggcccgcttactaatacggagagggttccgcatgaaaaagacaatcctaaacttcttcgtttcgttggtttttccaaggtcttttaaattatcttttttttgaacatgaacggaagtagcgtaggacacccaatcctcggtcaaacctctacttcaatgaaccacgtcgcgttctttatctttctc

SEQ ID NO: 3729 - DNA, 435 bp, Zea mays
catgctgttcgagaattgtttcatcaagaaactgggaaggcgacaagtttctttcgaaacatcggtcagccaaggacgccacttgtgtcttcacctgttgcggataagataattcgagcccagcttcttgagaaacaggttgctgggtttggcgggctgaggaattggcttttcggttgtggtcttggatggtttgtcaacatactggacagtgaaaagctggggacgtatcagcttgcctctcttactatggaacagctgaaagatatgggtcttgttgctgtaggtccacggaggaaactgatccacgctatcgacagtttatgcggcccgcaccatgctgagatgctttcttgatcccttgcattttagttagctagaagaaaaattattacaggaaggatgtctgaagtggtctctggttgtagccaactc

SEQ ID NO: 3730 - DNA, 610 bp, Zea mays
gggtggaatcatgtgcgcaaaagcatcgatgctgctgcaggtttgtacatgcgctccattctgtgtcatgtttgttcgcttgttagttcattttagttgcttgttagctgttacaatactaaacaaacaatcttcatggtagttttccttgcataaagttgtttctgtggtacaattaaccttaccccgatgtacttcttttgatattgcagaatgtgccacctgctctacttgtgcgatttttgagggagcatcggtctgaatgggctgatcctggcatcgatgcttattctgtcgcctctttgagggccaacccatacactgttccaggtttaagggctggtgggtttatgggcaaccaggttatactgccccttgcacgcaccttggagcatgaagaggtaataatctattgatcatggttccttccacctgtcttcttgttaatgtccaaccaatataagctccatctaacttaatgttttaatttcagtccttggaggttattaggcttgaaggacatggctttagccatgaggaggtgcttatgtcccgggatatgtttcttctacaggtatggaggccttccaatctgtttcttgcttcttgg

SEQ ID NO: 3731 - DNA, 556 bp, Zea mays
tctcgagctctcagtcgctctcttcagatctcctccaacggttcgtcgacagagcctacagcttctccgaggagccttctctgaacgaggtaaaagaaaagaaaaaaaagaaaaaaaaaaaaactgaatgcacgcaaagacgcatgatcgatcggtgccaaagctgctgctttttcgcatctgatatgcaaatgtctacgagcaaattaaactaaactttcccagctcgtgacgctacgtactactacaggggaatttccggcctgtcgacgaaaccgacgaggcagtttcactttcactcagcagtctcgacggagaggaggtcgtcccggcagattttcctgagggtgtctacatcagaaacggttaaccactcagcccatgtaaagtcttcacgaagctactaccatcgtatccatggcatgcctaattggtgattgtgtattgaacacctgcaacaggtccgaaccctctcaacccaacacagacggtcgcgggctccgtgttcggctcgacgtcgtacacgtactacgaaggccacgggatgctacacgcc

SEQ ID NO: 3732 - DNA, 510 bp, Zea mays
tttgaagctggtctctgctatgaaaggaggccgtgaaaagaacggagtggcatcatcaccaactgaaaaccgccatgtcaagtgggctcctgatgtgtacgacccccctgtgacatcggtatgccattcagtgaccaacagctatcagcgccggtcaaagcaccgcaagaaggagaagaacaaacagaagaagaggcagaaggggaagtcgaagaagaaccaacaacagagttctgcccagaatccatctgcgccgcaggttcctggtctcgggtatgttttgctagcgtattttttactgctattttgtctctgtgagcatgtgacgcattccgttgattttacacactgtgaacttgttaggccgaaaggcgttagcaccactggtggccagtctccagtagacgatctcagcgaacatgaggccgggatcatggactacagcatgggtagccaggaagccaactgtggaagcagcttcttgcgcgagtctgttgctaagatgcactt

SEQ ID NO: 3733 - DNA, 783 bp, Zea mays
  misc_feature (163)..(166): n is a, c, g, or t
  misc_feature (173)..(177): n is a, c, g, or t
  misc_feature (618)..(619): n is a, c, g, or t
  misc_feature (622)..(627): n is a, c, g, or t
  misc_feature (630)..(631): n is a, c, g, or t
  misc_feature (635)..(635): n is a, c, g, or t
  misc_feature (667)..(669): n is a, c, g, or t
  misc_feature (700)..(704): n is a, c, g, or t
  misc_feature (710)..(710): n is a, c, g, or t
  misc_feature (712)..(714): n is a, c, g, or t
  misc_feature (749)..(753): n is a, c, g, or t
  misc_feature (755)..(761): n is a, c, g, or t
  misc_feature (767)..(768): n is a, c, g, or t
  misc_feature (777)..(777): n is a, c, g, or t
gtccatgatctccaccctctgcgactgcgagtgcgtctccttcatggggccaaagaactgggccatgaaaaccgggaccctcgatgcaagtatgccctttgcgctgcgaaggactcaccgcacaccaccagcacgacatcggatccggttcccttgcccaagnnnncaccgannnnncctgaacctgatacagcaaagactaacgccgtcttgccccgaattcggcgattgacgggcgtgcattccttgcaccatgatctcggtgagctcttgggcaagggaaccggatccgatgtcgtgctggtggtttgcggtgagtccttcgcagcgcacaaggccatacttgcatcgaggtccccggttttcatggcccagttctttggccccatgaaggagacgcactcgcagtcgcagagggtggagatcatggacatggaggcggccgtattcggggccatgcttcgcttcatgtacaccgacgtggtgcccgagcttgagcggcaggagaacggcgacgtcatcgcgcagcatctgcttgcagctgcggacagatatggactcgacaagctcaagagctcgggcaccacgtcggtgtacatgaagcgaagcatggccccnnaannnnnnctnntgtnctgatctccaccctctgcgactgcgagtgcgnnncttcatggggccaaagaactgggccatgaannnnnggggantnnntgcaagtatggccttgtgcgctgcgaaggactcannnnnannnnnnnacgacnncgatccgtnccttgc

SEQ ID NO: 3734 - DNA, 383 bp, Zea mays
atttatctagttttaactcagtcgcctcacgggcttattcaaagtatatgtagttggtgtccagtaagagtaacacaaaaattctagaaagtgtgaaaacagacaaaccgtgaatccctggaacttctgttttctataatcagcttcttccttttggcccatgctggcccaaacatctgtatacacaacatctgctcccttaactgcttccctgggatcgtttgttatttcaatcttactgattccagcactcctggcgatctccactgtctttgcatcgggctcaaatcccttgggacaagcacatacaaagtgaaaaggaagtacagcagccaatagaagccacgagtgcacaatgttgttcccatctccaacatagacaa

SEQ ID NO: 3735 - DNA, 379 bp, Zea mays
  misc_feature (17)..(18): n is a, c, g, or t
tgtctctattatctttnnttcatcagtcggtgcaatatacattaatggatcgttttttctccaggccacaaatcggcaatcaagaaacgctacttccaccacacggaggagctgctacgcggccaccctgcattcatcgaccggtccatgccatcgttacatgagcggcaggacatcatggctagtgccgttcccgagctcgctgccgcggccgcagttgacgctatcgccgagtgggggcgtccagccacggagatcacgcacctcgtggtgaccacctactccggcgcccacatgccgggcgtggactggctcgtggcctcactgctcggcctgcgccccaccgtgcgccgcaccatgctctacatgaacggctgct

SEQ ID NO: 3736 - DNA, 645 bp, Zea mays
gagcttctccatcccacacaaactgcatgtgttctgatcaggcaatccatcaattgatgggaattcttgagatgtcaccttgctctgaaaaaatcaaggtaaattatgttcaaatactaaatgatgcaattgatccaatctgagtgaaataaaatttatattcttaaccatggataaatcatgcgcaggattctcgtttgatcttttagcatcaatgtactatgtcgccaagcaattagacagttatataatagccatgagcccatgagtatgattagacagtgatatcatagccatgacccatgaatgtgattattgttcaactatccaactgtttggtggcataatatgttgattctacagaatcaaataaagtcgcagaaaacatagggagattgaaagggttatccactcacctgacaagtatgccggtttattagactactcatgtgatctctaagctcctcagcagttaatccataaagtatagaagcccctctctttcgtcttgaacttaaattgaccccttttggtgtatgatccaatgcaacagtcttagcatctttcatctcaatgtcaccttttacacgggacaattcctcttccttaacaatatccatgttgggtacatcttcactaccctga

SEQ ID NO: 3737 - DNA, 505 bp, Zea mays
cgccgccgcgcagcagcgccgtcatcgacgccgacaacgatgccaaggccgcccctgccatcgtctcgccgcccttcgagagcatcccagagctccccgagagcgccatgaaggggaactactccttcgccttcccaaagtactacgcataccgccacctcgttccatgcgacacgttcttgttgttttagaaagctgaatcttctcgaccggaccaactgatgaacaaaatctgatggcgcagtttgatagaggacaagaggaactactccaagaagcagtctcatcgagaccaccagccggaagcagcagcagcaacgacggaggcggtcaaggccgcgccagcaccgccagtagttgaagcgaaggcggagccgcagccggagacaagaagcaaaccggaggcaggaaagggcggcttgttctcctgcttcccctgctgctgataagcaagcaaaatgcagcggccagcatgatgtctctgtaaatagccacttgggcgtta

SEQ ID NO: 3738 - DNA, 505 bp, Zea mays
  misc_feature (358)..(358): n is a, c, g, or t
  misc_feature (365)..(365): n is a, c, g, or t
cgccgccgcgcagcagcgccgtcatcgacgccgacaacgatgccaaggccgcccctgccatcgtctcgccgcccttcgagagcatcccagagctccccgagagcgccatgaaggggaactactccttcgccttcccaaagtactacgcataccgccacctcgttccatgcgacacgttcttgttgttttagaaagctgaatcttctcgaccggaccaactgatgaacaaaatctgatggcgcagtttgatagaggacaagaggaactactccaagaagcagtctcatcgagaccaccagccggaagcagcagcagcaacgacggaggcggtcaaggccgcgccagcaccgccagtagntgaagcnaaggcggagccgcagccggagacaagaagcaaaccggaggcaggaaagggcggcttgttctcctgcttcccctgctgctgataagcaagcaaaatgcagcggccagcatgatgtctctgtaaatagccacttgggcgtta

SEQ ID NO: 3739 - DNA, 364 bp, Zea mays
tattagtatggtgatgtgcagttgttttactaatccctcatactgaaaattctattcgcatggtgacgtatagttgttttactaatctctcgtacagtcatactctttaatttttatgtctttttcttcaccttgtcttgcgaattacatctgaattgtccccatgcaattttgacattgtattgacttcatcatagataagtatatgtgttctatggctgttcctactgatgtcttaggagacatgatcagaaggatgagtgtgctttttacattggcatcttgactgctcctgcttgtgtcatgagttttaattgatttagtttgagaagttttaccagagataagttagttggcttgattg

SEQ ID NO: 3740 - DNA, 767 bp, Zea mays
gatgacctttcctggcaagatttccttggaagggttaattataccgagtgagttattttcttgtcatgatactttgaaatttggggagaagcccaggttctatgacagtctttcctgtgtcatctgaacacttggcgatttctagagtgaattgtactgagctgtctctagaacacaagtcaaattaccgagcagttctagattattttcacaatgtgcaataagctaactagttttttggttaagtaatacgaaaataaattagttaactcatgaaatccacctagtttccttggaataacttgatgctattggacattcactgactgaaccagaaaaaaactgcagggctgaaaattacactgctgttaaccaacctgccgatgcattcaccaatattctattttcatcagggaccacaggtaagatgatgtttgataattttgtcagttctgacatgtctcgcccatatgcaattattaggtatacagctgcatactgcaaactggccaatggcagatccaatttatgataacaagttgatcaattagtgcatttaaaaatatttttgtacagaaaattctgacagttctccatattcaggggagcccaaagcaattccatggacacatataacacccctaaaggcagctgccgatggatggtgtcacatggatattcgtaaaggagatgttgttgcttggccaacaaatcttggttggatgatgggcccttggcttgtttatgcctccttgctgaatggagct

SEQ ID NO: 3741 - DNA, 365 bp, Zea mays
tctggtatttcctcgcggaggaggagctcggcggggaggcgtcgtcttcggctgcgatcgaggaggaggaagcggtggccgtggcggcggcgcggccgtccgccgtggtcatggtgcaggtgggcaagctggtggacaattacctcgccgaggtcgcgtcagacgccaacctcaagcccgccaagttctgcgagctcgcgctttcgttgcccgaccatgcccgtatctacgacgatggcgtctaccgcgccgtcgacatctacctcaaggtacgtgccagatcaccacggaacatgtcgtccaggctaaaaggacaaggaaaatatgtctcctttcgagctgtcacgctcacgcccaaagacctc

SEQ ID NO: 3742 - DNA, 426 bp, Zea mays
gacgggacggactagttttatctgtagatgctctggcacgcaccgatcagcagctggtagctatggctatatttatacatatatattgtttattactaaggtaataaggtaaaggagagtggtcgtcgtcgtcgagttgttcctagctatagcctatagctacttatatagctagtcaatcgagtgttagttgtgagtgagtgtgtgtgaactcccatgcatgcatgcatgcatgcatatggctttgttgactgcctagtcaaacttagctgctgctgctagtactagtagtactgagtactgccctaatatgtataataatatagttcttcgctagctatagggcctaatgatcatcagaggatcgacgacttcgagacgactatattattgaactccatccatctgtaatggccgtgatttgtt

SEQ ID NO: 3743 - DNA, 506 bp, Zea mays
gtctactccacccctcacccgctcgccggtgagaaggtccccctgaccgtcttcgaccgcgccgccttcgacatcttcgtgcccaccgtgctcgcctaccccgcgccggcaccgtccaacgaggcgctcaaagatggactccgcagggccgtggctctgtaccctcacctcgcgggccgactcgccgtcgacgaccggggccgccggttccttcacgtaaacgacgagggcgtgcttgtggtcgaagcagcaatctcggctgacctgtccggcgtgctcgccggcggtatgaccgacgcaaacgtcgtcgtcgacgagctgtacccgagtctcccagaggtaacgagctgtcagctatctgcctatctgtggacgtgcgctgtgggcctgtggcatatgtgttatgttcctgctgacgtcgttggtgcactgtctggcttgcatgcatgttacaacacacgcgtacaggacaacgttggcgcggcactcctgcagatcaagctcaa

SEQ ID NO: 3744 - DNA, 245 bp, Zea mays
tctttactcctactagtcctagtagtactaattattattattattattattattattatcttattattattattattattattattattattattattattattattattattattattattattattattattattattcttcttcttcggtaaaagatggtaaaataagaaagggagcagaaaagaacacctcatcaacaaaaggagaaaaaaaaatactactactgtacacatcagccgcat

SEQ ID NO: 3745 - DNA, 375 bp, Zea mays
ataactctctggagctgtggaaagcagaaagtgatggtagcataccttgcccaccaaaggagctaggaggctgtggcggttcgattttggatctcaagtgtttttttccagaaaagatgctttcaaatttagaagaacgagctgacagaattatgaggagcgaagtatttgcaaaagcagtagccaaaagaagtgaccagtgcccttgttatgaccattcaggaaacataagaactcaggacgtgcgagagactgcaaatacgaaaggctcaagtgataaccatctctactgcccagttgccactgctatcaaggaggatgacttggcgcactttcagatgcactggacaaaaggcgaaccagttattgtttctg

SEQ ID NO: 3746 - DNA, 564 bp, Zea mays
cgccctacgccaggtgccgaggcctccgccgatctcttcgccggcgaagagcggccaccaggtattgcccacacccttctcatctcttccctgtctgctgtgcgaaaccgagtttccaaactcttaacctcaagctatttggctattttacgccgaccaacttctaacatttcgcaaacaaaataaaattatccgcctctgattggaagcacttaaaggttgcaattaatgttgcgaattcagaattctggtggttcctgtagcttgtggatggaggaggaggcgctgggtcgtggtggtggtgaaaagctttgatttcgtagccgtggtggacgccgctgctaatgcccttgccgtgcctcgttggtggcgtgcaagatgtatgccgtggggaaggtgggcagcctcatctcccgcagcgtgtacaccgtctccggcccgttccacccgttcggcggcgcggtcgacatagtcgttgtgcagcagcaggacggcagcttcaagagctcgccgtggtacgtgcggttcggcaagttccagggggttctcaagtcgagggagaaa

SEQ ID NO: 3747 - DNA, 545 bp, Zea mays
ttctatgaggaaggtgttcgtgttttgcgtgaggtctgatcacatccctttccttatccttaatcaacaagtggcatactaaatcaattatctcataaataaaagacaaactatggctatcataaatccaaaaaaagttaactatttgctgatccaccattgtttcttaagcagtttctattggctttgcatcatccagtgataataaatgtgcttatatttagatgattggaacttcgacaaggttgcctccaacccaacgcctggttgagataaaagcagttgccgagcaatttcactttaagatatcaaccttgctacttcatgccgggaaagtggtagaagcaatcacatggttccgtaagcatatcaaaagctatgaacgggttgttggaacaccagaagttgcttttcttcactgggaatggtttagcaggcagttccttgtctttggtgagctgatagaaacaacatccacaactattccagatacactatctcctcgatttggcactgcagacaacacattgactgagtgggaattt

SEQ ID NO: 3748 - DNA, 587 bp, Zea mays
  misc_feature (572)..(577): n is a, c, g, or t
gtgacgtgggtagtggcgcaccaggtaaacaaacgtaaaatttcatcactacagtaaacggaacaacgtccgacgaccaaaaccgtcggacataaggtcaaaaggctgtccacggcgacgaacgtgtgtgtgacgcggcgccacttacgtccagacacggcgggtgacgcggcgccaggtcaggctgctgcggaacgccgtccacgacgtaagcacccttcagtcatccacctcggtcgccggtcggccgtgccgtgcggtgcggtgccgccaccgccgttgcgttgcgtcatggagttgcagctagtagtagacttgcaaggcctgacgaaacatgtgtggctttcgctgcgcagggcaccaggagcaacaggaggccactccaggaagccaacggcagggccatcaccttctactacacctcgccggcgcacggccgaggggcgaacggggactagcacgcattgcaaggagacggccggcggaatcttggcgtccccgtgctccttttctgtccaggcgacacaggccatggccaagcaaactcttgcatgtgatcgatgtccgacagnnnnnntcagagtgca

SEQ ID NO: 3749 - DNA, 374 bp, Zea mays
tcgacgcgttcccgccggggagctttcgggagaaccccaagctctgcggcaaggtgatcgccgtcccgtgtactaagcccaatgccggaggcgagtcggcttcgtccaaactagtcagcaaaaggactctcgtgaccatcgtccttgcagtttgctctggagtggtcgccatcgtcgtcttggcaggatgcatggtgatcgccgtcaggagggtgaaaccgaaggggtcagtcgacgacgccggcaagtttgcggaggcatccatgttcgactcgacgacagacttatacggcgacgactccaaggacacgatcctgttcatgtcggaggccggcggcgacgcggcgaggcatgtcacgttctcggacatcctc

SEQ ID NO: 3750 - DNA, 405 bp, Zea mays
gctatggttgaaaataataaaaaatctgaaaagggattacggtggttgcagtcgcagtcgcagtcgcagtcgcagtcgcagctggagcagaagcgggaggagtagcgccgttgaacacatgcgaaacgccgatcgcctgggctccctgcttcggcaagacctgggtctgcgttcccctctgccttggactgcactacaccggcggtttctgccagcaggagcagatgagcgagggagacgccggcgccgagcctgctataatcggaggcgccatctgcgtgtgcaccaagcagtgtcttttggatgtggaggcggtgcaaggtgcaccggcaccgtcgcagccgcccgtcgccgagcctccgcgggggatgcgtggggttgggatgctcaactgatgatggtcta

SEQ ID NO: 3751 - DNA, 903 bp, Zea mays
gtactccactacactactctaatataacccctggcggtgtagcagtgatcacagcattctaacgtatgaacgatgacgccgcagcgtgagggtgagcaacgagctcggcgccgggcaccccaaggctgcatccttctccgtcaaggtcgtcacgattgtgtcgttcacggtggcgtcgactatagccgtcgtcctcatgtgcctccgcgactacctcagctacgtcttcaccaaaggggacgacgtcgcgcgcgccgtgtccgccatgaccccgctgctcgccgtcaccattgtgttcaacggaatccagcccgtcctgtctggtacacactcctactactcatcaaattaactgtctcgatcgagcaacgtgctagctacttcctctatagtattcctattttaccttctccctctatatatctcattcttatgtagcagtatcctctaaatttcgttctttattcaccgccgggtcaacaccggcgcccactcggctcgtcggcaaacgtgcaatataattgtagtgatactgtaaagatttaaattgaatattttttatagcgaccactcatcaacgtctcgctttgttcgatgtcaatcatgtggtggcgtcgtgttctttagcagctacacgatctttcagtatatagtactcctactagcccggatcggagtcccggaccggtcatcaacagcaagctagctagctggtgcagtggagtggagtgggtgaaaaaacatgcatgcatgcatgcatgagatcgtgcaccgacgacgacatgtattttgagagagacgtgtccacgcctcgcaacgtgcttgcttttgcaggtgtcgcggttggatgcgggtggcaatcgttcgtggcgtacgtgaacgtcgcgtgctactacggcgtcg

SEQ ID NO: 3752 - DNA, 320 bp, Zea mays
ggatgaaaatggaggcgtcatcattgagatgaagactccaatggatcctggagtgttttcagcttacttgaaagcagcgctggcaaaatggagggagcaggtgacccccccccccttctctcagcatcaatgttaccatttatcctatcatgccaagtaaatatcccaatatttaagttttgaactgtggacgacatacctcaaagatccatcaatccatgcaagcatctttatatggtaggtttggtaggtgaaaaaaatggtgctgtgcatgacaactattttaaaggtttaagtacactgtatatcttctatgagcc

SEQ ID NO: 3753 - DNA, 717 bp, Zea mays
  misc_feature (691)..(698): n is a, c, g, or t
  misc_feature (704)..(710): n is a, c, g, or t
cacgcctccttcaccatcacgcacccgctcacaaattttctgaggatttcctcaggcgtcatcttggtgtacctagggttttcacgaataaggttcacaagatgagggtcaattactgtaaatgacctgagcatgagtcggacaacgtcatgatccgtccatcttgtgattccatagcttcagattttgttgaccagggttttgagcctgttgtaggtctgtgttggctcctctccccttatcatcgcgaacctccccagctcgccttccaccagttccatcttggtgattagggatgaaagtgataatccaaactgttaggacaaatttaacattttacaatagatatgtataaaatttgatgatgatatttctttatattatcaagcacatttgtacaaatatgaataaaatattacataaattgttttatgtattatttggtccctacaacacaaatagttgaaaaaattaccgaatttgtttttgaatcaataccgaagtttatatctattatttgagaaaatatatgatgaatttgaggttatcttttatgaatctttacaagctagatgttaaaaacaagaatacaaaattgtattatagattctataacctatttattcacaatcaaaggaaaatgacttaaaaactgattaccgaataaatatcgtttccgacctttttcatnnnnnnnnggtgannnnnnntggcgtc

SEQ ID NO: 3754 - DNA, 579 bp, Zea mays
ttccacagtttccaccacaatttcattttcaaattaccgtgcgcattctggaataataataataaaaaactcccggtgttgaccttgatgcccagcgcatgtgtcggaattggaactagtatttctgatggacatggtgtacgcagtttcttttcgtcatctgggattaaccttgcggcacagtgtctgacatgtttcagatacagatgtgtaatactgattcatgttggtacacacaggcgcccacatagatgatagatacaggcggggccccttagctattgctgtttttcctgttccaggataggcaattggggtcaccttgcggcctgcgggttcatcaaacacgagacttgagttacatagcttaaaaacgaccgcaaaaaatacaccaagcttttttaaagaaaaaaaataaggatgagcaggaggttccgtcctttcgcacgtgaatgcacacagcccatgggtttggttcttatgaaagataacaagcagagatgcagatgacgtgagcttattgtttaccttgggtacttcacatggatcagagcaaagagaatcgatatgatgatgctc

SEQ ID NO: 3755 - DNA, 466 bp, Zea mays
tccggatgactaaaatatagtatgtttttatgctatgatttttttactgttactttatgaacatataaagctgagatttatcttatatagtaaaaaataagtaacgaagtggatataatatcttttagtgctactttggaaactctatttttttaaggaatttatattttttaagaaaaaatgaactaattttatttgagaaaatataaataatataaatctttgaaaaaatgggttttcaaactggccctccttaaagagaagataaaaatcggagacctcatatcactagtgaccatagaaaaaatgagaatttcgtgggtctgtctgaatatgaaattcaattccacctagggaagggagacacttccagttccagtgcgggattttaccgaacgctaacaatgagcgcctggcgtgcgttaatttggcagtgtcggcgcagcagaaattcgggatcaactac

SEQ ID NO: 3756 - DNA, 700 bp, Zea mays
  misc_feature (459)..(459): n is a, c, g, or t
  misc_feature (461)..(465): n is a, c, g, or t
  misc_feature (655)..(657): n is a, c, g, or t
atttcaccatccttcttttgggctgccgcttgcagctcatctacattctgtagaagcttttgtgccgcttcggtagcctgctttacctctatgtgcttgctcttaatagttccagtgtaatctttttccatatttttgagctggttccaaacaaaattcttttctgcttgtaatgctgaaatttccttgtccttttctgatctcattgtcttgtaagctttctttaatttctgtaactcttccttagtatatttcccacttttctcgtgatctgaattgtcggtgctaatctgcacctgactttcaaccatcttcagtttttcctggcattatgagagaaggtaaaaactcaataagatggacaatttgaaatccacaatggtccaggcaaactaaactcatgtatttgtaattacctttagctcagtattttcagcagccaaattcaaaatacaactngnnnnntgagtttagtttgcctggaccattgtggatttcaaattgtccatcttattgagtttttaccttctctcataatgccaggaaaaactgaagaaggttgaaagtcaggtgcagaattagcaccgaccattcagatcacgagaaaagtgggaaatatactaaggaagagttacagaaattaaagaaagcttannngacaatgagatcagaaaaggacaaggaaatttcagcattacaa

SEQ ID NO: 3757 - DNA, 432 bp, Zea mays
tagcagcgccatcgccagtggggcaaatcgtcgaacagacgccgcgcggccagtgggctgctgcgctattggcctattgcctttgtttggcgtcagtttaccccaccacatcaagaggcccaaccgtcgagagaggaagcaggagtaccgagtactccgagatctggcctgtgtccacagccttctcttccctgacctcgacatcttgccgatctgcactgactccgcggcccgcgttcatggcggtgacctttccctctcccaccccgcggtccccgcgccggccggatgccattgtggctcctgacccctcgtctgctgacatgtcgccctccctcgacttcggcgacccgacctccttcaccgcgctgcgcgtcctcaccgacgggggtgccgccacccgccttctccacgagtgcgtggcctaccagc

SEQ ID NO: 3758 - DNA, 407 bp, Zea mays
cttcccgcccttgcagcccatacatggtccgacgtcgtcgcttccctgccggcttcctcggcgctggttacggccatcgccaccatccaggcggctgtttctgcttctcgcgaccacaagcgcgtcgcgacactcgtcctggagtcagagcatgccatgagcgccgctgctctgaccgcccggatggccaccacgcagcacctcatcctcgggcatcctccagtcgttcatgaggctcatccgcccactgctaagggccccctcacctctgaactcgacgctgaccacgtcgctactcttcacgctcaggccaccaggttgcacaatatccgatccctcatgtccatcatattggacccaacatcctcccacaacccttgttggtggagtcagatcctcctcactct

SEQ ID NO: 3759 - DNA, 306 bp, Zea mays
gagcattatgaagttgatccctaatttattggaacattcatcttctatgaagggaccggtaaattgaaaaactaatgtcactactcagtactcattatggctatcaacatgtctctttcctgttttgatggcaacttacgtttctgtttaggaagctaaggacaatcttttggggcgcctgtttggatttggagcaattgagaggtctggtcgtgtgccacgacagtggtcacgtgacaaaagctcacccattgttaaggaatttgtgagtgtggttgtagaactcggtggcaagaaacgatattt

SEQ ID NO: 3760 - DNA, 371 bp, Zea mays
accttccttagcatccttgctaaaatctgatgatattatcaataaatactttgctgctcaggcactggctagccttgtttccactgggagcagaggtatacagcttgctattgcgaattctggtgcagttttgggtgctgtagcattgatcggacaggtagaatctgatatgccaaaccttgttacaatggctgaagaattcaagttgtcagacaatccatgtcaaataatgttgagaagcctttttgagcttgaagatgtctgcactggtgcttccgcccggaggtccatacccttgctagtggatctacttaaaccaatgccagataggccaggtgcacctctgattgctttgcaccttctgactcaac

SEQ ID NO: 3761 - DNA, 765 bp, Zea mays
  misc_feature (720)..(722): n is a, c, g, or t
cattgacattggatatgaacgctttcttgggccagaggtttattgctatttctgtcatcccaactacaaatagttttagtttttttgttcccaaactattcatccaaaatggtataatattatggccagtaatcatcttttgagttaccttgaagttatgttcccaaatcccaagcatgatcagcttgaagaatgattttaaattctttaagatttacagtaaaaggacatttaattcccagaaaagtggggagttccaacggaaagaaattagtaagtttgatggttcacacagtgaaattatgttgaattgctaaattgttatcaccagagttcacatcaatgattggatttatagatgtagagttgtgaatgactgtcttgcatacttataaaagcatcctttggcatatagatttgctactatttatgaactgagatcatggtttcctcggttcatccacaaaattgaatagttgagatcatggtttcctcggttcatccacaaaattgaatagttgtcaattgctattattctctggaactgtcttaacctttggcactatttttgttcattacctccttgtagatactgtataaacattggtctctacctccaatgggatactacggtgtgcatcattctacactgttaagtgatatcaataagattttgtagtagttcagaattgttaccttacatcagatgtatgaaattgnnnctaataaatggctattatcaaatatatcttgaaaaggttatta

SEQ ID NO: 3762 - DNA, 533 bp, Zea mays
gcttccctgattactaccgattgtttggcccgatcaaggagaagtaagttcctgttttcaagttgcctgtacctcatcttgtcactcttgaaagttttcagcagcaagccattcatcagttagttacagctcttgaaagccttacctctgaacatgtgtgctttctctgatggtgataggtacattcaagtcgggaacgcagtggctgtccctgttgcccgggcactgggctactgtctggggcaagcctacctgggtgaatctgaggggagtgaccctctgtaccagctgcctccaagtttcacctctgttggaggacgcactgcggggcaggcgagggcctctcctgttggcacccctgcaggggaggtagttgagcagtaaaaggatgacagatctgagctgaggtgaggtgagcagtgcaacatccagcggcaggagcatttctggttcggttcgattcgggctcacgagcgcatcgtgctgattcgcagggtgcactcgagctcgagtgcggagttgttgtaatgtag

SEQ ID NO: 3763 - DNA, 365 bp, Zea mays
cgacccggcgtgcttaattaattaactcgcagtgaaactaaaattaattaaagcaggcgattattattaaccggtgcaaaacggctagaaataaataagtaaagctagcgctggaacaggcatgcataatataatggcggagatacatacatatatatataattagcataagtgtcattaattcatgatcacgagattgatgatcttaccgtggcgcatcacttgctggatgatgctccaagattatctattttgagcgagaagagatgtatgttccatgtaattgtagtgctgttgatgggtgtaaatgcatgtgcaacttattaattggtaattttgcatgctgaggaaacaatctttctttg

SEQ ID NO: 3764 - DNA, 817 bp, Zea mays
gagtgatgaatactgggcttcgattgtggtgggcagcagtgggtttctgaaaactgcttccccaccggaaccctagcaaagccaagtatgaaggatcttgattatatagataagctgctgcagttgattgaaaaggaggagatacccgcacctggacctattgagcagcgttggactgctcgcagcaagagcccgatgagcccgggatcaagctctgaagaagatgatgtattttcatgggtaattaatttgttcttgtccaatagttcttatgttttctgtatgttaatctgtgctgctattgcctcttgtaatcacctgcctaaaagctcatttgcaactcattctggtttgtttgtattggtttatttgcttataatttggttcaaaaaaagcaatattttggtaattaaattcagttcgccatggtgtgaaaaaaggcaattcgattgtgtcctctactctcttctgatagtttctgctaaatatagtagcataacttgcttttttgctttctctactccgacaaatacgagggacatcgtttcttcagcgtagatgatagtaccaaattgttctactgtatgtaggtgttatctttctcatgtttctgagacaatcacatctattgtgacacagtcacactttacaactcttgactgctttggaaagcctgtcttgtcttgcaaaacctggttctattttacaccagtcatctatagtctctgtgaccaactcactgggatccatgtaggttggtattataatgtatctgccaacatctgatgctcgccaaaggaaggaaatcacagaggag

SEQ ID NO: 3765 - DNA, 411 bp, Zea mays
ttgatgggtgtgtaagggcaaccgagaattttgagcaagcacgagtttgcagccaacgaaaattttgatgtatgaaatagcgattgtagtttattatttttttattcggtgtacgtctcaagttttatctttaatgagtgacatatctggcagggaaactgaagcatattattatcttgctgaatgctatgtgaatcctgctgtacgtgttataaaaaaaatcatatctgagctactagctgcaagaacctgacttctaaatactgtggatcctgaatagtttcgacttgtggcttgtttggagatctagatcatgaaggcgcagtggcaactgattctgaagttcacgtttggtttggagtcttgggagacaaggtgagatcagacatgcctttagctgatcgatgtttg

SEQ ID NO: 3766 - DNA, 381 bp, Zea mays
cctgtcaaacaagctgacggcgtcctgtgcacggccagacttcccgtaagctgagaccattgcggtccaaagaacagcgtcgtttgacgatactgcttcgaagacgagctcggccgaatcgacacagccacacttggcgtacatgtccactaaggagttcctgacgacgacatctgcctcgaatccattgccagcaacctgtgcatgcgcctgcatcccctgcttcagcagcgccagctccccgcacgcatccacggctatagagagtgagaaaccatccacaccgacgccagaagaaaccatggaaacgaacagcctcagcgcgtcctcggcctgcccgctcccaagaagcgctgccatcatcgagttccaagcaactat

SEQ ID NO: 3767 - DNA, 472 bp, Zea mays
gtggcatcaggtagcaaactaatggactagcctgtttacacgaaacaaggtacaactagccaaaaataaacaacaatccagtaccacagccttgtcaccagcgcataactgcggagaaaacaaatgagtagttaacaatagctggaaaaaaaatgccacatgttcaatcatgctaaactgctctgttcaaaaccataccttcacttttcacagtgccaaaacccctctctatcagctcaacaatgtttcacttggtcttcctgaccagcaaaacttccggtaaagacgcaggatcaagctcccagtaaccacaaagatcgccagtttcgtctgtcaagcggtaggcaggaacctgatgagagaacatagtcaagtcactccttgctattctcctggatttacggttctgctctggcatgaacaccgtgctaaagccctccgctttagtaaggcacgacactgttatatcacc

SEQ ID NO: 3768 - DNA, 476 bp, Zea mays
gggcaaggttacaagcaggtaaaacacttcatttcccgtggttaagggagggttctatggttcagttgagacagtttgcggatcaagtgtgaagcaaagccatttgacatcagatacacgaccaggtttgtgggcgagcagatgtgtggggcgacggcgttgttcctgagatggcagcgcatctggagggagcgctgaacgtaagctttgacggtgtgtaccactctccggtaggttccgatgatgaacaaaggccctggtatggctctccggcgatcctcaagcagtgggtgcatcaccttctcagctgagatagtgacatacaagaggagctagctgccggaacagacagaaactgggatgtgtcctgcagctgacatgacaccattggccaccaaagggcaaaggggaacttttttctctgaaattgaggtgcatgatatagcatggcagatccctggttgtttgttgtcagt

SEQ ID NO: 3769 - DNA, 359 bp, Zea mays
gagcgggaggagttcttccgcctcaagaagatccaggggtacaagcagcgcgagctcgagcgccagaaggaggccgccagccgctacgccgaggagaaggccgccggcgaggtcgcgctcaagcgcggcgtttccgtcgccactgcggagagcatgctggagaacggcgacagggacgaggaggatatcatcttttgagcctgtggagtgtggagtcctatgagtagagcgtgcagtggctgtgctacacctgcgggctgcggcgccaaacagcaaccttctgtacacacagcccaataagctcgtagctgcagccggtgagccggagcccggaggctacgcgtatattccatctctgc

SEQ ID NO: 3770 - DNA, 553 bp, Zea mays
tcgtcctcctcgcgctcgtctactgcgtcaccggcatcggatacaccttcgcagtcttcttccagccaggttccgcgcagctggtgagtgagtgaggcacctgtcgtcttaatattgctcctgatgaatgaatgaatgaatgaacaacacatgtgtattccagtggtcggccttgcttccggtggttttgactctgatagccactcagcagaaggacactatccttgccgacctgtgctacaccaagtgggctctggaagccttcgtcattgccaacgctcagaagtattcatggctcagcgcctcagctcctcagctcatcaagcttgtccctgtttgttgcagcaacctgacaaaacacaacatttctctgccctccctctccctttggttgcagctattccggcgtgtggctcataacccggtgtggctcgctggtcaggagcggctacgatatcgagcacgaggctctctgtatagcggtcctcatcgccaacggggtactcttccgctgtgtagccttcttctgcatggtcaccttccagaagaactg

SEQ ID NO: 3771 - DNA, 353 bp, Zea mays
cctcagccttcacgacgagggcatgattagcgggactgatcatgattggagcgtggattgccaaggattggagactctctacatgccgtaactatacacacgaccaaaattcttcttcttctcttcttgctaatttgttcttgttcttgtgatgattggtttcctacatatttttctctttcttttctttcgttaaattcggtttggaagaaatatatatagagagatatatatatatctatgtatctatgttttgaagagaggtacgtgagggacaagtcgcgcgctcatgtaattgaattaatgattcggtatacttgtgagatagatcgatgcaatacaataatggtgaa

SEQ ID NO: 3772 - DNA, 533 bp, Zea mays
acgcggccgtgggccacgccgacctgaaaccgcatccccttccggcagtgctccccgtccaaggcgtcggagaagaagtagttggtgccctccgccgtgagcatcacgacgaggaacgcctcctccggcttccacccgccgtcgccgcctctcgccgcgacgccggcgctgcagaacctgtacgccgtggcgttggtcgtgtgcaccaccgtgttgccggtgtccgtcctgaagcctttgcgatggatggagcatgccgccagccacacacgtcagacacgtcagtacgtaaccagcgtcgatcgattgagctccatacagaaacagtagtttggacttgggcaggggaggaagccgaggatgaggactcactgaggtagtcgccgaggaagaaagtgcggttcgcagcccaggcggagtagttggcggccgaggcgttcgccttccagtcgaagatccaccccgcgccgtcgcccacggcgtggttcgtgccaaacggcggcaacagtggcgccgtggcgttcttggtcgag

SEQ ID NO: 3773 - DNA, 482 bp, Zea mays
ggcccttgatggctacatcaccacgcggcagaatgctcgcgtccgacgtgtgaaagaaatcgtagtctgaccgttttctctctgccacggccatgaaattctcgtactccacaccagcaaactcggggaaaactccaacctgtaacagaatgtttcacacgcacgcatcacactcgctcgcttccatcactctctcatggcactcaataaacaggaaacatttttttgaaaagaacaggagacatcatccttaacagcagtggaaacctacaagaatcactcctttgtcgccgatggacgcctgagcagcctccgccgaactgagctcgatggaagccgggccgacctgcttcttgaggtactccacgatgccatcggcatccctcggaccaccatagccacgcacgtccttccctccgttctctatgatcttgagggtggggtacgcgtgcacctggtacttgtccttgatatccttgttc

SEQ ID NO: 3774 - DNA, 458 bp, Zea mays
cgctctgcctcgtccgctgtccgctgccggtgttgcgtctgtttcgaccgccgccatcacgtccatcttctacgtcgactcggccccgccagtgtcgtccacagcgccgtccgtccggctcgccagggacttgagcaccgccgcgaccttcttctccgccgccgtccgcgaagtctgccacatctgcgaccttctcctatgccgtctcgttgtccgggcaaccatcgactttttttcttctaaatataatgatacgcagctcaactgtgtgttcaagaaaaaatattgccatttcagtatggtccgcttatctatttatgtgggaaaatgtcttaggttcttgctgaagttaaaccacatgagaaaaagaagttcatatctgaactccagaaagagcacaagttagttgccatggttggtgacggcattaatgatgccgcagcactagcttcagctga

SEQ ID NO: 3775 - DNA, 199 bp, Zea mays
  misc_feature (97)..(97): n is a, c, g, or t
aactgtaagggtttgtccaggcagaagtgtacggtcttccacggacgtcaaagcaagaaaagcatgcttttcctcctcattagcatcatctgacggnggtctcatcattgatagaacatagctgtcttctgggttcgaagagaaaattcttacactccacagatttacagattcaggagaggtattctcaatctgtatg

SEQ ID NO: 3776 - DNA, 597 bp, Zea mays
gatggtaagctcataagacaggaaatttcaacctgtcaacctgctgtagtcaccatatgcctgctgtttattcggtacttcacatttaacagcaacatactgctgttctaggtggcacgttcgccctctactcacttatatcgcggcactccaaggtaaggctgataccaaatcagcaggctgaggatgccatggtgtcaaattatggcatcgaagcgcccagtccggaactgagggtggcacagtggctgaagcagaagctcgagtctagcaaggcagcaaagattagcctctttatcattacaatccttggcacatcaatggtgatgggggatggaaccttgacaccatcaatttctggtaacagaaacagtatacggagaagtcataagcacattcgtatccagtattcaaaatcctaacgtgtttcttgctcttctagtgctctctgcagtgagtgggatcagggagaaggtgccaagcttaactgaaagtatgtgaaaaaagagctcctacagacattgatcagttggtacgctttgttcaacatgtaaattgtttgctgtcacttttcgtgcagcgcaggtagtctggatc

SEQ ID NO: 3777 - DNA, 407 bp, Zea mays
gaatttggtctcagggtttgaaggtgctatgctgtatcagactgctaggatattcgttgtgccatcgtcctatgccttcatgctcaagagccatggccgacattttgtccgccttcacttcttccccttcaaataccagagctatgacctcaccacggcgaccttcaaggtgtccacgcaggatgtcgtgctcctcgacaatttcacagcgcccagtagttcttcgccggtgttcaaggagtattccctgaacattaccagggacatgctcatcctcacatttgtgcctcttgggaacaacacaccggccttcgtcaatgctatcgaggtcatctctgtccctgatctcataaccgactcggtactaagtctggaccctgtcggtcagtatcttgggctgtcaacac

SEQ ID NO: 3778 - DNA, 356 bp, Zea mays
  misc_feature (274)..(274): n is a, c, g, or t
tatgttgtgaagctcaatcctgatgaggataagcagcatattctccttgccggaatgagcgataagaagattgtgcaatgggatatgaagtcagggcagattacacaagagtatgatcagcatttaggggctgtgaacaccataacttttgtggataacaacaggagatttgtgacctcaagtgatgacaagtctcttcgtgtgtgggagtttggcatccctgtggtgattaagtacatcagtgagccgcacatgcattcaatgccatcgatgncactgcatcccaactccaattggctggcagcacagagtttggacaatcagatactgatatacagcaccaaggagaggtttca

SEQ ID NO: 3779 - DNA, 362 bp, Zea mays
agctttcgccttgccaggctcgagagcttgtgctgttgaatccttccttggatgtctgagccaaaatttctcttattgtccagctcttcatctttcttgggtgttgtttttttgacgtgacgatcctttccccaaattaccgactttgattgtactgtgcgatttttcgagttccgtctcctcggagatgggatcttaagccagatgttctgatcgaaacaacaacactcagtttcctcttcaacacatcattccttccgcatgttcttgactttggatcttggaatttttctttggtctctttgacgatggaaatgaggaccctttccccagctgatcgactacgattacactgtgcgcaa

SEQ ID NO: 3780 - DNA, 401 bp, Zea mays
ttgatggtccttctatttttttcttttatttcaagtaatatgtgttatgtgtaaaacgcctaggctcatctaagctctaggtggagggtcaccacctagaaaacgcctgatgcctaatgcaactttgatggcaatatttggagatttgattagagaccgttagagagttttttttttcaccataatttctagtcctatcaacaaggaaggatataaaagatgctcttgtgattgctatcatctgacctatttagcgaacatgacagtctgcctacatgtaggtttgcagctgcatcccaatcagctcgaatggactggtcttcatttaccaagggttacttcttgaacagagataccttggttggcgtacttcttcttattgatgccagtattccacctca

SEQ ID NO: 3781 - DNA, 366 bp, Zea mays
  misc_feature (358)..(358): n is a, c, g, or t
ctcttgagcctgccgagctgcgacgggacggacccggacaacgcgttctcgtagaggtagatgttctccaggctggtgcagtggccgagctccggcggtatcgggccagagagcagcgccgtgtaaatggctagcgtggtgaggttcttgagctggccgaggctcgccggcagcggcccggtgatgctggtctcggcgaggccgatcatggttagccgagagcaattgccgatctcggtagggagcgcgctgtggaggttcttgttcccgccgccacggagcacctcaaggctggccatccggccgatagccgccggtatcttgcccgcaagctggttgtcgtagatgatgagctccncggagaga

SEQ ID NO: 3782 - DNA, 799 bp, Zea mays
  misc_feature (492)..(796): n is a, c, g, or t
ctggaacaagaattggaagtgctaaatcagacttcagacagtctctataatattgtggctcctactcaagctactgttgcaaagatggtacaggttggtggtgatcacatcgagggaaacaccatactgaagttggacgaaatgatgataattcaacccacaggtggtactcctgattcagcacttcccataacaggtaaccctgcacatattatttttttttgaagatttgcattctcaagaagatcctctttatttaaccatgacagaagtaaatcttcaggacattattagcacccctgtagaggatgctatgactggtattatgaatacatccacagaggatgctacaccaaaggatatttcagattcagatgtgaaggatggttatgccttcatagaggccgtggaagtgcaggagactgttgtcaggagactgttgtatctatggacaacatcaaaatacccaagaaggttacagctgaattgcannnnnnnnnnnnnnnnnnnnnnnnnnnnnnnnnnnnnnnnnnnnnnnnnnnnnnnnnnnnnnnnnnnnnnnnnnnnnnnnnnnnnnnnnnnnnnnnnnnnnnnnnnnnnnnnnnnnnnnnnnnnnnnnnnnnnnnnnnnnnnnnnnnnnnnnnnnnnnnnnnnnnnnnnnnnnnnnnnnnnnnnnnnnnnnnnnnnnnnnnnnnnnnnnnnnnnnnnnnnnnnnnnnnnnnnnnnnnnnnnnnnnnnnnnnnnnnnnnnnnnnnnnnnnnnnnnnnnnnnnnnnnnnnnnnnnnnnnnnnnnnnntcc

SEQ ID NO: 3783 - DNA, 273 bp, Zea mays
tatgacgagagacgggcgttgacagctaaacactccgtctgttgaatgttgatcccttcaacatttcccctattttaacattattattattattattattaaccaatcgaatcaactgcacctcttgaccgcttctactccaccgcctgctgctccgctagtcttcttcaaccttgtgatgcttcagcccccccgcccctggtattgatcgctcagcacaaagcatcgtacttggataggagaaaacaattctagacagtcgacagagagaga

SEQ ID NO: 3784 - DNA, 404 bp, Zea mays
gaaggacctcgttacccgtcacgagatcgccgagcagattcaggagctcaaggctcggatcgttgaggctagccacagaaggaagaggtacaagattgatgacacagctaattctggtgccgccaatgtgatccctgtggaccggcggttgccagcgctctatgcagaattgggtagccttgttggtagcgatgttcctagagatgagattatcaagctacttgatgatggggcgctggccgtaaaggtggtgtctattgtgggctgtggaggactgggaaagactactgtcgtgaatcaggtttacataaacatcgccgagaaatttgattgccaagcctctgtgtccttgtcccaaaatcctgatatggtgaacatattccggtcaatactgtctcaagtca

SEQ ID NO: 3785 - DNA, 482 bp, Zea mays
  misc_feature (475)..(479): n is a, c, g, or t
gctcgccagcttcgccttcttctgcttcaccggcttcgtggtgtgggcgatcgagcaccggatcaaccccgagttccgaggcacgcggtggcagcagttcggcctcatcttctacttcgccttctccaccctcgtcttctcgcacagtacgcgccaatctgctagtttagttccattctttctttctttctttcttggacgaccgatggctgaaaaggctgagcctgcatcgtgcagaggagaagctggagagcaacctgtcgaggttcgtggtgatcatctgggtgttcgtcgtcctgatcctgacgtcgagttacacagcgagcctgacgtcgatgctgacggtccagaagctccagccggcggcgaccgacgtgacagagctccagcggaccggggcctacatcgggtaccaggagggctccttcatcaagcaacgactccagaaacaaggcttcgacgagaccaagatgannnnntac

SEQ ID NO: 3786 - DNA, 683 bp, Zea mays
caatgtagacgttggaatctttgcccgcagatataaggtatctgccgtctgatgttaacgacggcgatgacagagccttcgacttccaaggccctgtatcagagattcagagataacaagtagagaagaagggagcacatcctatcagtaactgaagttcaagacgtgtaacgtggttgaaccacgatgagtttctgctttctttgtgaatttctaccttcaaacttttggatggtatcaccattgacgactcggattttggaatctcctgatgtaactacaaccctattggaatcacttgtacataactgcaaggcggtgttcagacttcagaggttagagatttgatatggtttaatttataattgcaggaatactagtgcttccaccaatcagctgcacaaaaaccatacagtatgaacaatggagaaaaatgaacctttagattgttgatccgactggcggctgacttcttcttcccttgcacaaacaattctttctctagctggatgttttcacctaaaacgggaaattgaaccgctcactcttagtactgaattatcggtaaatatatttcgttcactattacaagttggagcactcaacataagtggaattacattaagaaataagacctccacgtaccagattgatcatagaaacgacatgcgcctgcaatcgtg

SEQ ID NO: 3787 - DNA, 503 bp, Zea mays
tgttgaagctgatgggcacctcgtcgcccaggtagtaggcgctccgcagcgacgtcagcagacgcagcagcgacttggcgcggttctgcgtgatgatgttcaccgagatccgcatccggttccagtctgcagttagcagatcagatcgagcgaagttagctctgttgcgatgcattcatggccatggcgtggcggcgtgcaaacgatgcagagatgcaggtacgtgcttacttggcagtgaggcgggcttgagggtggccatccagagcaccttggagacagagctcctggggacgaggacgagagcggtgcggttgacggcggctgtagcggcggccatgcggagcgcctccttgaccttgtcgtcgatgtcggcgagggcgacgaccacgctggggttgtgcatctggacgatgccccgcatgctggcgtagacggcctggagcacgggcacctctgagcgcgacggaccggacagcgcgccgatccctaggtcgaagatc

SEQ ID NO: 3788 - DNA, 350 bp, Zea mays
tagtggcttgtgcctagtggtataatgctcatttgtgagtgagtccagatatcccgtggaacaagtgcacaaacatacggttatagagcctctacattatactgcaatgaaatgttgataccctccatgatagtaaaagttgcctttgtatttggaagcatccaacttaatactatttaatagtatccaagcatgcactgcgccagagtcagaacagaacacaaagccagcttcttgttacaatggtagggatcatcagttgtatgcaggaccatccgattcttactgatattttgtcagtatggggatatgttgcaaatgtaccgcagtcgtgtaagcacgatatgttt

SEQ ID NO: 3789 - DNA, 382 bp, Zea mays
agattgactgactctgctcttccaatatttagaggtccatagattggattccccacagatttcttattactgttgtcagaactgcattttccatctccactagactcaactggccaggccttagaaacagaaccgtcgacattaatgatggccatgagctttcttgaggatccaagacgttggatcaatttaaacatccccttggaactcatggaattagccacacattggtttttgtactcttcatttacaatagcaatagtatttccttcagggtcgtataattgatctccattacttcgcctacggaggcaactaaagacagtggcatggatcgaagccacgctccgatcaacattagtgttgttgaccttgggaacta

SEQ ID NO: 3790 - DNA, 868 bp, Zea mays
  misc_feature (860)..(860): n is a, c, g, or t
tatcctccaaatcctttcagagaacaagaaagaaagataccaaacagcagaaacactacttcacaacgaaaaatgcttcacaggctccattgtcattttggcctcactgggcttatgagatgtatgattcgtattcactttccaggagagctgcaggtaccatgttatttatccactgtccactctttgtaatttctcttgattgtagcaaacggaatttatgttactctccattcattgattgttaacttcctgtatttttttctctcggaaacgtaggaaaactctatatctttatattatagagagataagtcctgttatacgaaagggcatctagcgtaatggttaagccttccgagtagcacctctaggtcctgggttcgatccccctcggtggcgaatttctggcttggttaaaaaagttccctcaccgtgcctcgctcgctcccgggttacgtcttgtgcgctaccctccggctgggccgttgcagagtgggcggtgacggcccgctagtgatggggggttagggttcaaggattttctcggcctggaccatgtttcggtctcttcttaatataataccgggagggcggtctttccctccccggccgagttttttgataagtcctgttatgtcaaagtataaatatgtgcagttgtgatttaagtgttgttgtatgtatgaccttgaattttcttcatggcagatttgtggagacaagtaattttaaacccaagcatggatgatcatgtgagaaaaccaaattatttgtcatattgcattggaagcaaacttcctatctcagaatctctgaggcaagaattgcttgagattgatggagtctcatatcgactanagcgggag

SEQ ID NO: 3791 - DNA, 379 bp, Zea mays
  misc_feature (369)..(372): n is a, c, g, or t
gctcttgctcccaccagcaccacctctggtgggaggcatcaggcatggagtcgcgggtgttgtcgggagttgggttttgcctcctatacagcataaatgaattatattgttttacctgttggtagaaagaaccttgaaagatagggaacgtgtcgttttttgtcaaagcggttcctgtgctgtataacatgttgcatgagtattggcgcaacttataagacaatgtcaaatgggtttttgggagtcccattctggtttcttgagtcttcttcattggtgtctattgtgtaacatgtacacaggtttgtggttcgtcacgtcttgtcttgtcttgtctgttgtatttgccaccgttgtctggaagttgtnnnntgcttat

SEQ ID NO: 3792 - DNA, 786 bp, Zea mays
acgaggcgaacaccaactgcttccttccccgccgccgcctacaaccaacacttcacgtgcccccatccttttccgcctcaagtcaagtgttcacggtccatcctctcgagagtctaggcccttctcccgaagccgcagacgcagaaaacggctctacatatggaggcgaagaagaagccgtcggcccccgccgccgtcggagccgcgccgccgcctccgggtaacgggtacttcagcaccgtcttctccgcgccgactgcggtacgggccgtctcttcacgccatcgttctgatattttgctctcagattcctggggtcttagtaatttttttgcatgattagtgagctggtgcgatttgctgaaagagtccgttactatgttgcgatttgtggagggacttcaacggtttcccaatttaattctgatgaggggtgattttgataatagaggacctataggattatgcaaaatctatttggatatgacgttgacattttgactttgttttgcattcaagggtagcgcaagtgacgcaaagcatgcggacttgtacacgatgctgaacaagcagagctccagagggcagaatggcagaggtagttctgggtactcctgtcaatttgatgtttctcttcgatttaggtcgcgttcataagcacaacgatacttaaaaccttttctcaccatcttagcttagaattaatctggagcacactgatgtaactatggaagtttaaattcgtgctcagatggcaaatcccacagccgccctacttacaaggat

SEQ ID NO: 3793 - DNA, 391 bp, Zea mays
gggtgaccagggtggactgaagaccttgagtcagcacgtcatggatgccaagctcagggttcttcacatgcgacaggagggcggggaaggttgaagcaaggtcgttgtcggagcaccaagcatcatgccagaaagcggtgccatgaccatttctgacttcacaagtagtgattgcccgatagatagggaggctggagcggagggcgtgccagtgggcaccggggaggttaccagtgagggtagccaagcagatgtgttgtctttcccaggccccccaagacgagcatgtcgagttgtgaaggcggtggaggagcctcaggtggaggcacgtgttgcaagtttccagatccttcacaccgaggccgccatcagctcgtcctttggttacaga

SEQ ID NO: 3794 - DNA, 402 bp, Zea mays
cgccgccaaccaaggtgatccgcgacgtgcaggtgcagcagatgcaggaccccgccggcgccatcttcaccggtgctactgcttacccgacgatggatgatccccggatggtcggaggcgagttgggcaagtccaacgtcgactacttgctcaacatcaacaatgtcgatggggagcagcagcagcagcaacagccatgcgctgagccgagcagcgacgtgcaggtgcaggtggaccccgccgccaccttgatgcccagctatgttcatggtcatcaacaaggcggggatcccctgatggccggaggcaaggaggaacagagtcgacgcgttgagtcaccagaggcggagctcgactacttcgacgactggctcaacaatgtcgattggaaaggtttcctag

SEQ ID NO: 3795 - DNA, 402 bp, Zea mays
gaggttttgcatgcgcccgaccgcagcggaattccgtgaaccctgtacggcaatggcaattggcaatgacagggttactggggtgggtgaatggtttcgggatagacaattgtttgtgggagctgcgctggcgaaatgtaggctgtctattgttgcaattgcaggatggatgggtagcctctggtcggctctgctagtgtgtagtgttgctgtctgtggtctattcagggattcccatgcccatacccatgcagattgctaggtgccgttctgtcggtacatggttggtggcgtgtctgcgtctttgctgtcactgggtttaaggtttaaggtgtagtatcagtgggtaccctcatgaattaggggttaagcccaatgttcctttgtgggtacatcatgaat

SEQ ID NO: 3796 - DNA, 381 bp, Zea mays
cagctgttgcctcagctgtgtcgtctgtggtacattctgcagaagggccagtgaaggggtctgaactggtagcatccgtgcccgtgcctgtctctgctgagatgccaaagggcaggatggacacactggtgccatcagcgccgtatcttccagatgtggaacgtttgatattggggttgctcttgctacctgcagtgccaatgaagcctgggagcagggattgtgcaatgtgcagagaatttctacctactgaagtgctcctcatactgccagtgtgctcgcacatgttccatcagtcatgcatcatcacttggctatgccgcaccacaccaccatgctgcccgttttgccgtgcctctatcaccattcctggctgtaaca

SEQ ID NO: 3797 - DNA, 577 bp, Zea mays
  misc_feature (522)..(525): n is a, c, g, or t
  misc_feature (531)..(532): n is a, c, g, or t
  misc_feature (536)..(557): n is a, c, g, or t
  misc_feature (563)..(570): n is a, c, g, or t
ccatggaggccgggctgcaggtgacggcgatccggacgcgcttctccgcgggaggcgtgtggatgaacatcggagtggaaggccaggtacgtacgcgaaaagcctagtttatttcatgtccatcatcactcactctggatgtgaaatattctcctgaaattggacattaaacgtttgctctaggtcaaaccccacgtgaacttgttgacccaccaaatgttcagctccatgacaagtcaaaagcatcatttcctgttgaataatagtactcaaaaccacgctagtacgcagacaaaatttaatgaacacatacgtagtactcagcttagacatgtacaacaccatttaataagatctgttgagtgatctttagaggttaattgaaaaaatatataagagacgtgcacattcgcgaagagatcgtctatacattattctctatgtgtattctcttaaatacatttatgacatatgggttaagagtcatatcgtgccgtcttttagatgtcttctttacttaannnnctatcnntgannnnnnnnnnnnnnnnnnnnnntatcannnnnnnnttctttg

SEQ ID NO: 3798 - DNA, 726 bp, Zea mays
  misc_feature (705)..(706): n is a, c, g, or t
  misc_feature (711)..(712): n is a, c, g, or t
acgaggctactttagctttttcacacgaatgctgtttgttttatgcttctgctgttgttattctactgagcaattcaagctaggtttgatttcttgtacggttgagactttactgtcatgacatgtggatgtgtatttagtgagataataatgtcactgtttcatttgctgatcgagaagaatttatattgatgacatgcattttttggctgtaccaataccatttcttacgtggttctgtctctgtgcatcaatcctgttatcatgctgcagagttattccggtcaagaagatctttactgtgtctatgtcccaacgaaccatctttacattggcgatatcttcatggtgaattcaaaggatgtcataaggccaaacctttccgtgcgtgaaggcatcggtaagttcgtactctgccatttcaggagcacggcttaattggtattctgcttcagggaataaggatggctactcctgcgaaaagaaacttaacgtatttgcattcatgggtttgcagaaatcgttgtgtctggtggtatgtcaatgccccagattctgtcaaccctcgacccggagatgatccttggtgacagaaccggaccaagcagaagctgaagctgccacgagccctttgtgtaacttttgtagtggtttgctagtaacattttcatacaggctaccaagagtacggcgaactgaacttgnngcacnngtatctctgtatta

SEQ ID NO: 3799 - DNA, 370 bp, Zea mays
aatctgtgtcaggtgtttcacctctatccaacaaggtttattgtagtaatctatctcctgcaaactatgccatttcacctcagtatgtgccgtctgtaagtgcttcgatctattcttatgtgtttttgattgtttcatttatttcgccttcattggataatactatattatcctcttgatatttaaaaaggctattggatgacaacttgtaacatgcctttggttcaagttgataacttgctgcatatggcttaggcttactccgttatcatttgttctatatttgaggccatgcacgtactcagttactcctatgtgctttgcctttgcagttgagctattcaagccattcttacctgttagctgccta

SEQ ID NO: 3800 - DNA, 375 bp, Zea mays
tgctcctcctcctcctcctcatccttcagcaactgtctgcggctgcggttgcagggatggccaccaccaagcttgggttgtctgacgtggtaaccgacacctgcgacagatgcagcaagagcaatccacaggtgaactacaccctctgcgtctcgtctctgtcgtcggaccccgagagcaggcaggcggacctccacggtctcgccatcatctcggccaagctgctgaggtcaggcgcggtggccatggaggccaagatggcggacctcagcaggaaggagcgcccatggtccccccggaggtcctgcctggacgcctgcgtcggggtgtaccgcaactccctctacgacctcggcagctccatcgtagccatcc

SEQ ID NO: 3801 - DNA, 363 bp, Zea mays
ctcgacggacccggactgcaagacctggagcaacgacgcctcggcgctctgctacaactgccagtcgtgcaaggccggcgtggtggccacgttccagcggaactggaagcgcgtcgccatcgtctgcatcgtcttcctcgtcttcatcatcatcgtctactccgtcggctgctgcgccttcaggaacaaccgcagagacaacgcctaccgcggcgggtggaagggcgggtacgcttgatccaccatcgcgtcgtttaggagcggagccatgcacgcgcgctcggtgctctgctgtctgctccctgcccgccgctgtcgtcgtacgtacatgtttagtaggctcgttgtagctctgtacaggtg

SEQ ID NO: 3802 - DNA, 387 bp, Zea mays
tcgggcgaggaatccggccgccagggtttcttgatccgggcgcgtgattcgtcgtgcccaggcaccagtgagaaatcaaatcaagaacacgccagcggaagtgagacgagagcgcggggaggaatcaaggtcgcttctttgagctgccagttcccccgcgccaatgccggatccggccggcggcgccgggctggcatgttccctctaactgcccctgtccgccgccgcggctcccgatgctcgtgtggtcttcgggagcaggagagggagcagcggccgtcgtgggcggcggctaggagcgaagatgcagatccggctgtcgccgagcatgaggagcatcaccatctccactagccatggcctgctagacttgatgaggctcaaggt

SEQ ID NO: 3803 - DNA, 405 bp, Zea mays
tcctcttctgcagtggttagcttcttatacttatctaattatgtataactgttctctgatagtgatcatgcacaattacaataattagtctcttgaagtcatggaattcaatcattttagagatcatatccaagagcagcgatgtgagcctgcatgatatctgtaaattagttttcatgtggaaattatattatcacgtcaattgggacggttaattctagatgcaacaagttgtccaaacaagcattctgaatgtcaatgaaagcatcatttcatttggagtcaatggagtctctgtgatgtatagtgattctttactgtcctcttaacttgcaacagcgcgtccgattggaaagtgccgactactttcatatatgggcagcaagattggatgaactaccaagg

SEQ ID NO: 3804 - DNA, 432 bp, Zea mays
agaggctgaggctggagaatgacgaagcccttggacacatgttgttgccagacacagacacattcctgcagtactgatggagtgtactgtgcatgtgcagggcagcagaaagatactggcgatgccattctgttcgggcatggttggtatcaatgctgtgcacaaagcctgtgctcactgcccagagcatcagcagccatctcaggcccataacgcactgcaaatgcaaatgcaaatgtggcacgggtcagcactttggaaggagttcgttagggtggtagcagcgccgcggtctacatacccatcattatggctgacgacgattgtttgtcgtcagtggcggcagcagcagatgggcaccaccgggaccggagcgccagcctggacatcagccacttcatgacgttaaacacagatcatcatcacttgata

SEQ ID NO: 3805 - DNA, 266 bp, Zea mays
tgtgtggcgtcagatatgtactgccgccgaactgctgtggttcaagcaatatccttttggatggaagtgaagagatgtgtttctgtccatcattcttcttctgttagtgtatgcataattggaaaaattaatggatcctttattcatcagcagttaatgatgttctccacgcctgtcaaatgtcaatagagttgttgaaggatatcagcttagattggatcatctctttttttttatgttctactgtcttcagtcacatgccattc

SEQ ID NO: 3806 - DNA, 378 bp, Zea mays
cgagctggacaatatcgaagaatttctggagacgtacgacatctacaacaagctcggccgctcctacctgctggcctgcatctcctcgcatgaacgccagcgctacgcagagagaggcggtgccgctcccgtcgacctctacctcacgcagcgcatgaacaagtacttggatcaagcccacaaagttcacaagaatcccaaaaccaaaatctgatctcatgcatgcgatgatcagctagcaagacgatgattcatccgcaccgcgtgcactcgcatcgatcatccaccaataattcccctttactttctttgcttatataataacaggcccagttctatatgttctagtaggccctggattatttactgctgcatgct

SEQ ID NO: 3807 - DNA, 383 bp, Zea mays
agctaacccaacagacactaccatcccctcttcaacgttgcgtatcgactcaacacagcaagcaaatcactaattaatttgaaccaacttagaaggcaatggaacaggcaaccgtcgcacaaacaattgcttaacaaaatgttaccagatcaccggaggccgaggagccaaggggaacgcgtcggcacccggccggcagcgaagttgcggggcggagcaaggaggctagttagtgcctgctggatatgctgaaggaagtgaccttcatgggcgtggccaccaccagtggagcctccggggagtcgctgaccgagtacctgtcgtgcatgaagcggctggccacgatggactcgtccttggggatcaccttgtagcaatagcag

SEQ ID NO: 3808 - DNA, 384 bp, Zea mays
cccggcggcgtgcatgaggagctcgtccagtcgttcgaccgccccaccggtcaccgagccgttgtctcggccgcagagtggcacgagcagcctcagcgcttccatcttcctcctgatcgccatcgcgcgcttcctcgacgctgccgcccttgggcgtttgctgccggcagccttcttccttagcttcctcgccatcaagagcgaggccgacggcctcgtcaatttgaggcgcctcctcctggcagccggtgcagtgccggcggcaacggcatcatcgcagcaagtctggtgagcagtcatctggccggcgcgcggcgacgaggaacgaagctagctagcgctctggctagctttcagctttccaggtagatgcgagctagctag

SEQ ID NO: 3809 - DNA, 458 bp, Zea mays
ataccccctgcaagaatttacgaacaagaagaaaagggggaaagaatcccagtcaatctaacctgcgttaatttcagacgggtgtgaaaaggaggagagcaaaattgctccacgggggcgtaccggcgatgccgaacatggagtccctggtgagcccgacccacttcctgaacacggcctgcacgggcttggtcgggtagaggaagatccccgcggcccaggtgaggaacaccgcccacatcaggaacttgagcacggtcctagccagcgacggcagcgcggcagccgacggcgccggcgccgaggacgagtccttggcaccgcaggcattgccgacgccggtctgtcgttgctgcaggagcggctcccgttcgtgggccatggccaggaccaggagaaggaaagcggaagcgcgagagagaatctaggggcccgggaagcctgcactagcttgtcta

SEQ ID NO: 3810 - DNA, 455 bp, Zea mays
cgctctccttcgtttcgtggttcacgcgtggtgtcgcatcgggcggctcgacgaggcggacaaagccggtggccagtgcgtccaccacctaggggcgcgaccgactcgtcttccccaccggtctggtgctccatggaggtggctgtctccattggtaccacgcagggccaggcttgttccactggctgcagcgtggacaatgacgtgaagccgaagctctagacggcgatcaaagcagaggaggaacaccagctgagactactctacacccgagtgtcacagtggtggcccatgaatacgcaggctggagctgcgatctcgtcgcagaccatgggtgcaatgggtgcagaggtgagtgcctggatgattccgtctgttctgttcttatataatattgaacaaatattcagacatgatacaagtgcagacttaggtggatggttctaaatgttcac

SEQ ID NO: 3811 - DNA, 387 bp, Zea mays
  misc_feature (357)..(375): n is a, c, g, or t
aagaaagaaggaaggaaggaacgagcgggagtggaaaagttggtgagtgaaacttacccactgctgcagctagctgctcccacttcctcgctgcgtcgtcctccctcacgcacctcgcctcgtctcccgcctcctggctccggcacgcgtaccatctcctctcggtctaaagcggtgcgtgcatgccggccgtccagtccttgcattgcatcgcattgcatcaggcaggcaggctctaaaaagttcggcagcatcctgcaatctaaacgttgcccgcgtggatttgtttactgcgccgcgccacaagccgcctgtcgttttctctgatcctccctctgcccgcctgtctgtctgtgnnnnnnnnnnnnnnnnnnnactcactcactc

SEQ ID NO: 3812 - DNA, 526 bp, Zea mays
gcaagaacgtcttctactggttccagaaccacaaggcccgcgagcgccagaagcagaagcgagctgccctcctcaccctcagcaccaccaccactgcttccacgctgctaccaccagctgctgaaaccaaggtatataactatatatgcattgcagcagcttgcgttatgtatatatgcattgcatgcataaatttaaatgcagtgaacagctagcagtatcatcatatgtacgtacgtatgcatgcaatgcaggagggagtggagacgaaaaaagaagaagcgtgtgaagatgcgtcgagccgcaagcggaggtgcaggacctgggaagatgtcgtcgtccatggtggcggcgacgatgccggtacggaggtagctgacgactactacaccgacgacgatgtgaccctggagctcttcccgctgcgtcctgatcaggggaaataaagctagctagctagctagctaactaattaagtaaggcggacaagcgtacgtatatgcgtaaagtatatgcccgatccatg

SEQ ID NO: 3813 - DNA, 420 bp, Zea mays
aggagaggctgaagactaaactcgcgccgaagatccaagtgtccagcgagccgttggacaggtactcgtagacgaggagcctgtgcgatttctcggcgcagaatcctaccagcctgaccaggttcagctgatggatcctgccgatcgtcttcacctctgccaagaactcctccattccctgattgacgccctctaggcgcttcacagcgacggtttgcttgcctatggtgcctctgaagaccgacccgaagccgcccgctccaagcttggtggagaagttgcccgtggcagccttcagctcgtggaaggtgaaacggctcggtgtccccggtatgccgtgaaacagcggctcctcctcttccctccacttcttccatacgacagcgaaacccaaaactgatgcaactgaaatacctgcaa

SEQ ID NO: 3814 - DNA, 797 bp, Zea mays
  misc_feature (782)..(782): n is a, c, g, or t
  misc_feature (790)..(790): n is a, c, g, or t
tcagtagttcacaacaacattaacagagttacatcaaagcaacaaacacaagagaggctaaacaacatagtgcattagtgatttagtgatagagatccataccagagctgcaaagcagaatatcaatggaaatgcacaggcaaacatcatgatcatgccaaactgaagagccagctccagaaagtctgtagtggattcaataatataagcacaaacaccatcatttgctttcaaactgcaaatgctaagcacaggtgttatatatgaactgcatccagagtgactattaaaagaaccgaaaaggacatatttaccatcaaataaaccgtcttcaagttctgctccaatgctcgcagtataagagggttttaaatactctttctccactcttgttgataaccgcactgacctacccactggtgattctttctcatgctttttcttgctacaagatgggagagaattcttgtattactctattgatctgggaataataagtataaggacaagagttcatgtgaaacttactgaacagctatgtactttttgtagctgtacttaaggtaaggaatggaattctcaatcagattttccaatacctgaaaaaaagtaaacatatcgtaaatagggtactatggtacaaacatatttgacagtaaaacaattatgttgcacatgcctgggacacaatgagacgctggatgaggacttggcggagggacagtatatcacgatacaatgaagcatggtaaaataacccaatatatgactgcataaagtanggggccanagggggg

SEQ ID NO: 3815 - DNA, 948 bp, Zea mays
cgcggcctcgtctggctcgacctcgccttcctctggccggtcagcctcgccaacctctacggcatcctcgcgcgccgacgctggtccgccaccacctccctcatggccggtgtccacatgctcacctacctggtaatttgtatgaccatcatctccccgggcaggccttcgtgcatgccaaaaagcagcattatatttagatgataattagaaagaccaaaacataattgagttttaaaattaattatacaaacggtatccagacgaatctattagttctaattagtttaggattagttctccatcctaaaattcaggtaactaaactatatgagaaacgttattacaatcttataatatatattccatttacttttgttttgtttcagtccgcaatgtttggggagatgctgggttcagggagagcaacgccgaagctgctcgggttgtacgttctgttccttgtctttgctgtagcttcagttgcgcgtggcctctgctcccgctcagcacaggctacaccggcggcaggtccatcgcctgtacttgctgctccgaagaagagggtttagatacctgatcaggctatccgcaaccgttacccctaaattttttcccctatatcactttttccccctattttttcatctctcgcagcggttccccataaatactcccctataccccactacaactataaaatattattttctatatcaactatcaattttttatctactaacaattactcgtggacccacaacacagtgtttagggtgatgaacagtgacacactaaatctggagggagagagaaggggaccgacgcgtaggagacgctgtaggggcaccgctgcggccgtagggtgccccctacagacggcatgcaaggggaggggattgccagcggcaaccgctgcgcacagcctcagggcatgtttaggagtct

SEQ ID NO: 3816 - DNA, 294 bp, Zea mays
cacacagacagggaagacaccatgtgcatctagacaacccgtatacatggtcgcctgcacatgtcttcttgatccattttccaccatggtttgctgggcaccttttttctcctccctaggcttcttcccttcaccgacatgccatcatctgaaacctcataacaaatcaaccattccctgtctcccctcccttcgacaaccatccaagactattcacaaagcaggaacatctgtacaaggaccaggaaaatatttgtaaaaaaactaaaaaattaaaaatcttcctactttttt

SEQ ID NO: 3817 - DNA, 557 bp, Zea mays
ataaagttcggccttgttcaatacgtacgtgacgtgacgtgacgtgagctaatatcgttcttccgtcacccgatgccataactgatatatagtaactaattaacttcgtctgacgaaactgcagatgattctcaagacactatgcgctctcttggcgttggtcttggagcctcttggagcctatggagatggcgaattcaagtggaattacgggtagccgtccgtctttctcgttatcagaatttgttactaccatgtcgttgtttcctgattaattaacatgtctgtcatgctttgcctttttttacgcgcaggtatccttacattgccgctgtcataaacttcagccagacatgggccttgtattgccttgtgaagttttacaacgcgacgcatgaaaagctacaggcgataaggccactagccaagttcataagctttaaggccatcgtgtttgccacttggtggcagggagtcggcattgcgatcatctgccaaactggactcctgcccaaagagggcaaagtgcagaacgcgctacaggacttcctcatctg

SEQ ID NO: 3818 - DNA, 379 bp, Zea mays
atacagcgtacacaaattagagtaagctaaaacgggaaactttacattccccttggcaaaagaatgataaatacatgtaagcagaaactcacattgtcaagattccttcataggaggttatgggccctcaaacaaccacctacatgaagcactgcagcttgaaggagacgaggctatcaatccactcattgtgaataatgaataagcatttaatcccaggattcatcatgagccaaagggtatgcacagtttggtcttcaaccttagtgctactcttctattaagttcttgcttacaactcctcttgagcacaacatgctcagtagatcttgggcctccttcaacaaaccttcacgagcaaggccttcgataagtataa

SEQ ID NO: 3819 - DNA, 547 bp, Zea mays
tcctccaacttggggccgagctgcatgaaaaacaaaaccgaaaacttataccaaaacccctgaatgttgcttgcaggtacgacgggaaatgaacaatctaaagtctgaacgagatgtgccaaaagcacacaactacgaacctgatagctacgctttctattagaaaaatgaaaaaaaagaagtggtacctccaagggagagtctccacgctctctcttgacgcctgtgacagagcaacccatgatgaggccatgccttcagacaccacggtaccacttcggtccgatcctttttcagcttgacatccttaaacccagccttcttgaacgactcgatgtactcttcctccttggggaagagcacccacatgtcggcgaagaagcggggtagccagaagggtgggtacatcgggccaatcacgtaagctagctagcccaacgagcctcaagaccctgtatgcttccttgatcccccgctgtgggtcaggccagtactccatgctgcaaggtatcatgacggggcagggaaatcagcaatccgtagtaca

SEQ ID NO: 3820 - DNA, 266 bp, Zea mays
cctccaccgcagcttcgtacaggccatagactgcctcggcggccaacacagtacgttctctccttcctccgatccgcctcgtcccttcatcataaagatctatacgtactgctgcctcccagttgaatgtaatcttgccccccccatttttttatgctcatgtagtaacattgcccttgaccttgagagatttggtagaattatctagtgatttgttccccgccggttctaatattgatcgtgttctttctttttgggaaaaaaaa

SEQ ID NO: 3821 - DNA, 266 bp, Zea mays
  misc_feature (12)..(12): n is a, c, g, or t
  misc_feature (100)..(101): n is a, c, g, or t
  misc_feature (105)..(106): n is a, c, g, or t
  misc_feature (121)..(121): n is a, c, g, or t
  misc_feature (125)..(126): n is a, c, g, or t
  misc_feature (135)..(135): n is a, c, g, or t
  misc_feature (138)..(139): n is a, c, g, or t
  misc_feature (144)..(146): n is a, c, g, or t
  misc_feature (173)..(173): n is a, c, g, or t
  misc_feature (181)..(186): n is a, c, g, or t
  misc_feature (193)..(193): n is a, c, g, or t
  misc_feature (221)..(221): n is a, c, g, or t
  misc_feature (227)..(227): n is a, c, g, or t
  misc_feature (250)..(250): n is a, c, g, or t
  misc_feature (253)..(253): n is a, c, g, or t
  misc_feature (256)..(266): n is a, c, g, or t
cctccaccgcancttcgtacaggccatagactgcctcggcggccaacacagtacgttctctccttcctccgatccgcctcgtcccttcatcataaagatnnatanntactgctgcctcccngttnnatgtaatcntgnnccccnnntttttttatgctcatgtagtaacattncccttgannnnnngagattnggtagaattatctagtgatttgttcccngccggntctaatattgatcgtgttctttnttnttnnnnnnnnnnn

SEQ ID NO: 3822 - DNA, 608 bp, Zea mays
tgcttgatattgaacacggagcaagctcctgaacttgttgccgaggaggccacactcttgcgctgccttggcaatgggggaggttgttgctgcttcctccctggccctggtgctgctcttcttctgctcttgcgggcctgcaagcggccttctctcccccaagggtgtaaactatgaaggtcaatattccgtcccaaatcaagaggcatcttgtttatttttgtgtttgttctctttcgttggtccttgtaatcatccctgtgatgctctcagaccaaacaactctgtgaaagaaatatttgtctattcgtttttccctttttgctacattgttgcagtgagtctctcctttgtttgcagttcaagctctcatgatgatcaagaactacctcaaggatcctcatggtgtactgaagaactgggaccaagactctgtggatccttgcagctggacaatggtcacttgctctccagagaaccttgtcaccggcttgtaagcaagccacctaccatttgtgtgtgtgtgtgtgttccagctcaatcaatgtttcctctgtatcttattgtttctgtggctatttccatttggcagagaagcaccaagccag

SEQ ID NO: 3823 - DNA, 984 bp, Zea mays
  misc_feature (56)..(59): n is a, c, g, or t
ttcggttcgcggccagctgggcagccgctctttgctacacaatcagcgcctgcggnnnncaactgccattcatggggccacccagggtaaatgccccggcgtttggacctccgtcttggcaaactcaggtgatcttgctagttctactgcagaagtttagttttttttgtaagggagtgagtgacactgggaagcggtgtcggtttacactttttgtggtgtttccaatctcacatacccaaggattatgttttgaatgttcatctgctaggtattttaattaggttgtctgatatgacatatgagccttatgttgattgacctgtaaccatgtgtggtagatattagatttgttattaaattatattctaatgacccataatttgttaaggattccaaaagttttgtgttgcctatgtttctgtagttatttgtttggcttaaatagcatatatgtggacttttggcatacatggttgttgtgattactagcttagtagtactcttatcaatatgacgtgaaaatttcgaaacttaatttatttaagtatatggtttcatagtgtgtgagcagagaattactgaatcttaaactccagtgattctaggaaacatagaagtttgacctctgacatgctctatggaattatttgtagggagctgggtctggtgcaatgcagccacctttgagaatgccaggcattcctggtagcatgcagccaaacacactaggaccccctggcaccccgactataccttattctccacatgctggaacccaggtatcaaccccgtccaaaattgatcctaatcaaattccacgtcccatgcgtgaatcatcagtcatcatttatgagacccgtcaaggtggccaagcaaccattcccccggtatgtcttaaagcttggtgtccattttcgttcatatttcgttgcatgctaaacctgttcctgcctctcataaaagagtagttatgatcacagg

SEQ ID NO: 3824 - DNA, 719 bp, Zea mays
gtcgtccggtgagctaccgccgcagaagcagccgagctcggcgccggatctcccgccgggcttccggttccatcccacggacgaggagctggtcgtccactacctcaagaagaaggctgcgtccgtgccactccccgtcgccatcatcgcggaggtcgacctttacaagttcgatccgtgggagctacctggtacgtataagctagcgcgcgccatgccgcggccgccatatacaaatcctttccaacgtgatcgatgaattatttattggcatggtgatctcatcttactcattctgctagtgattatactgtatatacagtctcgatcgtgtctattaaaatattattttttagtcctgtgcatatcttttttcattgtaaataaagtagtactgtgtatatatatatgcgcatctactagctttgcatacatacatactgctagcttccatgcatgcatgtgccttactattctcacgcactgtgtggccgcctggacatgcatgcatggttggatactctggatcagataaggcgacattcggcgagcaggagtggtacttcttcagcccgagggaccgcaagtaccccaacggagcgcggccgaacagggcggcgacgtccggctactggaaggcgactggcacagacaagcccatcatggcgtccggcggcaaccgcgagaaggtcggcgtcaagaaggctctcgtgttctac

SEQ ID NO: 3825 - DNA, 355 bp, Zea mays
  misc_feature (31)..(32): n is a, c, g, or t
tgatggcgggggatcagggtctgggtccggnnccggatccggtgatagtagtccttatggtacccatgcaagtgctggagggggtggtgcaggtggtggagctagccaatacggtgggtctggatatggttcaggatcagggtctggttcagggtctagtacatatagtcaaggagggtattattcgggttatggagaatcttctaatgctggtggttctggtggaggtgggggtggaggacaagctggaggttatgggaattccaatgctcaaggatctggtagtggcaccggttctggctctagctatgctaacaggtattgggatggatcaagtggaggtgcaaatgctaat

SEQ ID NO: 3826 - DNA, 770 bp, Zea mays
agcgggctgaaggagtgcggcttgtgggtcactcggcaaggctacgagcttcatcgaacaagaagacacgcgggtcaaggtatcacgccataccggatgctccaccgctgttccctatccacatcatctgccgcatccatctcatctcgaaaaaacttcgcatgcatctgtttcctgtgccatcccttatgataaccttcgcatctccttcgtgtggcatataggcaatcgacaggattgagaaggtaatgctccttccattatgttattgaaccatgtatgctgttaaatgttactagccaccataagtagagtaagattacttatattcttttagaaacggtaataccacttctgagcggtgccttccatgctgaacgatgccatccagacgtgtactgatcggccggagtggaagaacaactcacatttgtgcagccagcccaagggatcttcagtgccgtcatattttgggaatccaagcttctgcgctcctggagggggtgggccgtgcctgaagtcagcgccattggaggttttggaggaatcgctgaaggtctgtttcttgtctgctaacacctgggattgtagacggttcacagtgacagagatgcggccttgttctgcttgtggtgtattcacggtgtcgttgagagcgcaattgtactgtccaaggggctctgggtgatgacgggatcctctcctggcgctgagtcgttcatcgtgagaacaggccgaccggcggcagcagaagagaagatcaggcggaa

SEQ ID NO: 3827 - DNA, 549 bp, Zea mays
aggaggccctaattatccccttcctccctatggtggtggtggctacatgggagatccatatggtgcttatggtggcggcggtcctgcatacaaccaggtgatccaacctaaccattcagacaatcacatgtatgcaatactgcattgtgttattttgctttattaacataatacttttggcagccaatgatatatggcagaggaccagcaccggcaggaatgaggatggtgccgatggtgcttcctgatggccgccttggctatgttctgtaagaccattcttgcagtttgtgacagcatattctgcctgaagctcaatgtctgcctgagcacatatctgcagtttgtgacagcatattcttctgtcgacaggcaacaacctggtggaatgccgcctccgcccccaccgcggaggggtagtgaccgaagagacagtggcagaggtggcgaagggcacagccggcgatatcgcccttactagcttttcccttatgggctctactcccatcatgtggtatgaagcgtttaacttatgagacaacgagatag

SEQ ID NO: 3828 - DNA, 397 bp, Zea mays
  misc_feature (385)..(389): n is a, c, g, or t
gactgggcgggcatcctttcgggctgcggcgatgacgacgccgccgacataagcggcgtcgatcttttcgaccattacgcgggcgatggctttgatgaacaagtctggatgtgatgcatgctcttcctgcaggtagcagtgagtacactgggcggtaggatggttagaactgtgttgtgttgttactggtgatcgtatctctgctcttgcgtttgcgtgtccagttgcctctcttgttttctttggtttcttgggtcaattcaagttcgcccgcgtccatgcatgcatggttgctggtatgggggagaggcacggcctggtttgtgtggtacgttcttcgtgaagattgaggaatgaattgtgattgcgtcaagctgttgatctnnnnnctcgtggg

SEQ ID NO: 3829 - DNA, 381 bp, Zea mays
aacttgacaggacgcgtccgagcgagaccacgccactgggaaacgacgggcgaccaagcaaaaatccgagctgggcgagttcgactgagctggagcatggaagaccgtggctggggaagtgaggagcagggaggtcgtggccagaaagaccatgggcgagctgcacagccggcgagctggagctgagcgtgcgtgtgaggaagctcgacgtgggtgtccctggccggaccatggcggatagaggcgagctgaaatagggagggacggcgtgctcatctactggaaggggaggagctcggctgggagagggaactggccaccgggctcacttgatgcaaggagctgggcgcctactgctgctccatggagtccgtggctaga

SEQ ID NO: 3830 - DNA, 272 bp, Zea mays
  misc_feature (264)..(264): n is a, c, g, or t
tgttgtcccgactccggtggtggccacttcgccgaaggcggcagtatgcgcgaagggtgcttcgcaggacccgtggtccaccttctgcgcgagcggcacgattccgtcggccgccgccgctaaggacatggcgggttccgtgtcccggcaactgaggcaagcgtcgcagcagctgaagcaagtaagtcgtgttggacttcgatagttcgttgtttttatgaggtggcgagtctcatggtttgtggtggcaggcggccgacttcnccgaccac

SEQ ID NO: 3831 - DNA, 473 bp, Zea mays
aagtttactccataataaaggctatggtacactctgagaggcttgagaatgagaagcagcctgcatttactagtcaaacaggtggaagagggagagaagccagtgagggaattcaggatgagaaatatggtgctggttgcaagaagtgccatatgttgatgaaagacaataatgcggtgtttcaccaagcactgcctaccacatcacagttccttgcacaggacgtcgataggctcaaactgcaactctcatcagcagtcactatgtcttcagacagggcctgcagtacatcagctgatgatccagcaactaatcatgattacatgactgtactgtcagtaaaaggtatccttccttgcttatttaataaaccattctgtctaaatttgcattgggtactacttatggaaatatctgtctcaatactttttcttgctattttgatgatcagcggccactgttgcttctcagtg

SEQ ID NO: 3832 - DNA, 270 bp, Zea mays
cacaggggttccaggcacgagctggtcgcgctgatggcttcagccatcggggacgtacagtggtgagcgtgcagcaggcgaacgaggaatctgcaaaagggagttgttgtttgaagcttataaaggaagcatatgcggaggctagacgccacgcgacgcggtgcattgcaggaatggggcaacacggcagacggttgcccggatggggattggattggaaggattcgggccttgccaagaaaacgtccgcgcgcacgttgttcggtgggc

SEQ ID NO: 3833 - DNA, 352 bp, Zea mays
gcatcgagtgcttatggactgggccgctatttcacctttgctgaaattcagaaagccacaaaaaactttgaagaaaaggatgtcattggtgtcggtggctttgggaaggtttatcttggtgttcttgaggatggtacaaagctagctatcaagagaggcaatccatcttctgatcaaggtatgaatgaattcttgactgaaattcaaatgttgtcaaagctgcgtcaccgccacctggtttcactcattggttgttgtgatgagaacaatgagatgatcctggtttatgagttcatgtcaaacggtccacttagggatcatctatatggtggtacaaacctaaagcctctat

SEQ ID NO: 3834 - DNA, 386 bp, Zea mays
ccctgcacttggtcctcgtcgaggatacgtcgccctccactcggttcatggcgctcggcctccagctcgcgaagcttccctggtggccgcttcctcgtcgttttctatagtcgcgcccggccgaggttcctccctgcgtgcgcaagctctgttgcgagcgccgatccgtacccacaaagcctcgtcggtgctcaattggctcgaaccctctgctcggacctttcttccgtggcgctcagctcggccagatgcgacctcgccttggctctctgtccctactgcgctcgccagtcggactcctggccatcgtcaacgaatctcgcgatcacagctctctgttgctcaaccggcgactcgctactcgtcttgctccaggtacgttaata

SEQ ID NO: 3835 - DNA, 556 bp, Zea mays
cggagggatggtcgcatgacccatcaaccgtgatgtcgctcgcgattgtcacttccacgacgcacttgacaccttgttgcgttgggctttagaccgacacacctggtcggtcgagtatcatcgtgtagtttactagcatagtcgtggcaaatacccgaacctctaggaggctacctttctggtacgccgtctggaggacaacctccagggtgcagaggcctgctcagagcactatgctatctctgagagggcactactgaagcggccatgcaggatgtttcacggcgtgcactctcgtagtattgctctttgttcggtggggtggctgatagtcttaacctcaggtattaccctcaccgttgactggcaacacggagagtgtgattgtcccacccatctgtgaaggcaacccttggttgagcagcacagtaaacctggtcgccatgcttaacactaagctggaccacgctctggacgagatgagcagggatggtacagagatcacggagctgcgtgctgagcgcgcagagtgccagcaccaggagggtggttctct

SEQ ID NO: 3836 - DNA, 1277 bp, Zea mays
  misc_feature (501)..(549): n is a, c, g, or t
  misc_feature (554)..(555): n is a, c, g, or t
  misc_feature (557)..(565): n is a, c, g, or t
  misc_feature (567)..(573): n is a, c, g, or t
  misc_feature (575)..(577): n is a, c, g, or t
  misc_feature (579)..(590): n is a, c, g, or t
  misc_feature (592)..(599): n is a, c, g, or t
  misc_feature (603)..(626): n is a, c, g, or t
  misc_feature (629)..(643): n is a, c, g, or t
  misc_feature (647)..(652): n is a, c, g, or t
  misc_feature (654)..(664): n is a, c, g, or t
  misc_feature (667)..(676): n is a, c, g, or t
  misc_feature (678)..(688): n is a, c, g, or t
  misc_feature (693)..(708): n is a, c, g, or t
  misc_feature (710)..(724): n is a, c, g, or t
  misc_feature (728)..(787): n is a, c, g, or t
  misc_feature (790)..(790): n is a, c, g, or t
  misc_feature (797)..(801): n is a, c, g, or t
  misc_feature (803)..(803): n is a, c, g, or t
  misc_feature (805)..(807): n is a, c, g, or t
  misc_feature (813)..(814): n is a, c, g, or t
  misc_feature (816)..(817): n is a, c, g, or t
  misc_feature (820)..(828): n is a, c, g, or t
  misc_feature (830)..(834): n is a, c, g, or t
  misc_feature (836)..(836): n is a, c, g, or t
  misc_feature (841)..(845): n is a, c, g, or t
  misc_feature (847)..(862): n is a, c, g, or t
  misc_feature (866)..(868): n is a, c, g, or t
  misc_feature (876)..(884): n is a, c, g, or t
  misc_feature (896)..(899): n is a, c, g, or t
  misc_feature (901)..(901): n is a, c, g, or t
  misc_feature (904)..(912): n is a, c, g, or t
  misc_feature (920)..(920): n is a, c, g, or t
  misc_feature (922)..(924): n is a, c, g, or t
  misc_feature (926)..(933): n is a, c, g, or t
  misc_feature (943)..(944): n is a, c, g, or t
  misc_feature (948)..(963): n is a, c, g, or t
  misc_feature (965)..(969): n is a, c, g, or t
  misc_feature (974)..(975): n is a, c, g, or t
  misc_feature (983)..(983): n is a, c, g, or t
  misc_feature (985)..(992): n is a, c, g, or t
  misc_feature (995)..(999): n is a, c, g, or t
  misc_feature (1001)..(1006): n is a, c, g, or t
  misc_feature (1008)..(1012): n is a, c, g, or t
  misc_feature (1014)..(1015): n is a, c, g, or t
  misc_feature (1018)..(1026): n is a, c, g, or t
  misc_feature (1028)..(1047): n is a, c, g, or t
  misc_feature (1051)..(1052): n is a, c, g, or t
  misc_feature (1055)..(1060): n is a, c, g, or t
  misc_feature (1067)..(1072): n is a, c, g, or t
  misc_feature (1076)..(1078): n is a, c, g, or t
  misc_feature (1081)..(1088): n is a, c, g, or t
  misc_feature (1090)..(1098): n is a, c, g, or t
  misc_feature (1114)..(1115): n is a, c, g, or t
  misc_feature (1119)..(1131): n is a, c, g, or t
  misc_feature (1134)..(1139): n is a, c, g, or t
  misc_feature (1146)..(1149): n is a, c, g, or t
  misc_feature (1154)..(1163): n is a, c, g, or t
  misc_feature (1165)..(1168): n is a, c, g, or t
  misc_feature (1171)..(1172): n is a, c, g, or t
  misc_feature (1174)..(1174): n is a, c, g, or t
  misc_feature (1179)..(1179): n is a, c, g, or t
  misc_feature (1181)..(1181): n is a, c, g, or t
  misc_feature (1183)..(1185): n is a, c, g, or t
  misc_feature (1190)..(1197): n is a, c, g, or t
  misc_feature (1204)..(1215): n is a, c, g, or t
  misc_feature (1217)..(1223): n is a, c, g, or t
  misc_feature (1234)..(1240): n is a, c, g, or t
  misc_feature (1244)..(1248): n is a, c, g, or t
  misc_feature (1255)..(1260): n is a, c, g, or t
  misc_feature (1266)..(1268): n is a, c, g, or t
  misc_feature (1271)..(1274): n is a, c, g, or t
ggcatatgaacactgtgtcaagatccatccctactgttatgctcttccaaccaaggatgttgatttttctgaagagaagaggtttcagacaactgggtatctggaaatgatgtggaaaaggcttgatttcttgcggctagtgcttgaaaaaggttacagctttgttttctcggtaaatttataccttgatgtccctcctgttcgaatgcattaaaatacagcttatgaactattcagtatgagtttcttatttgtagttttatctgatataaactactgcttcccctctgtatttcaggatgctgatatcgtgtggttccgcaatccatttccccacttctatactgatggagtttttcagattgcatgtgatcactacgtagggaatgcaactgacttgaggaacatagccaatggagggttcaactatgtgaagtcaaacgaccaaagcatagagttctacaagttttggtattcttcccgatttagatatcctgggtnnnnnnnnnnnnnnnnnnnnnnnnnnnnnnnnnnnnnnnnnnnnnnnnnccccnncnnnnnnnnncnnnnnnncnnncnnnnnnnnnnnncnnnnnnnncccnnnnnnnnnnnnnnnnnnnnnnnnccnnnnnnnnnnnnnnncccnnnnnncnnnnnnnnnnnccnnnnnnnnnncnnnnnnnnnnnccccnnnnnnnnnnnnnnnncnnnnnnnnnnnnnnncccnnnnnnnnnnnnnnnnnnnnnnnnnnnnnnnnnnnnnnnnnnnnnnnnnnnnnnnnnnnnctnccttctnnnnntntnnnctcccnncnnctnnnnnnnnncnnnnncnccttnnnnntnnnnnnnnnnnnnnnnctcnnncccccctnnnnnnnnnttccccttctcnnnncnccnnnnnnnnntcctctcncnnncnnnnnnnncctcctcccnncccnnnnnnnnnnnnnnnncnnnnntcttnnccccctcncnnnnnnnntcnnnnncnnnnnntnnnnncnnctnnnnnnnnncnnnnnnnnnnnnnnnnnnnncccnnctnnnnnncccttcnnnnnncttnnnctnnnnnnnntnnnnnnnnnctccctcctctcttcnntccnnnnnnnnnnnnnctnnnnnnctccttnnnnctccnnnnnnnnnntnnnnttnntnttttncntnnntcctnnnnnnnnccctttnnnnnnnnnnnntnnnnnnnctccttttccnnnnnnntttnnnnntctcttnnnnnncctctnnnccnnnntat

SEQ ID NO: 3837 - DNA, 321 bp, Zea mays
gctgatttgcatcgtgtccaaaccacttaacccgtgggttcatcttcttcctgctgtcggtgcaccttcctatcttattgaagttgctgataccggtcctgccaattgagtaaagaaactgcagccgctaccttgacaatcctgccttcccatctcatctgtgccgcatcttcgtgccgtccgggtccggcgtccatgactggctgccactgatcatctacttccacggaggcggatatgtcctcttccgtgtggcctacgatctgttgtacgacacctgcatggcgctcactgccaccaccttggctgttgtcgtgtcaa

SEQ ID NO: 3838 - DNA, 391 bp, Zea mays
acgacttgccagaacagtggtcggactgggagcaaagaaggatcaggatcacgccgtgaccttgtggactacaggctcgtggccaccatgttgtccaagtactgcgcctacttggtgttctacaaaccgaagctgctccgcgtcgacagcaactccgtgaggtacatgtgcaaagaactcctcaaagaagccaaagcagcggacggcggcggcgagaaggcggccaacgggaagcaggggccggcacatgacagcgaagtagaagacggcggcatggtctcgagaggccgtgagctcgcccaagttcttctgaagagcgtgctggcgcacggtagcgacgacggcaacatgctgtggaaggcgctggccgaactgtggtgcgagctgctaa

SEQ ID NO: 3839 - DNA, 431 bp, Zea mays
acaattcatttgcgcccaagaagaaggaggggacggctgccgctgcctggccctggccctggcaatcgctgaggaagaacagctcccggttcctgccgctgatcttgaacggcgcggcgctcaggtcgtcggaggaggcgttgccgatgaggctgaggtcgcagaaggagccctcctcctgcaggttgacgttggtgacgacgaacgagctgttctcgtacgagatgtccaggacctggtacgtccagtacgagttcttcaggtacaccttcttccgctcctcgcaggtgacctggaacgccttgtagccgcagtgccgctggtgcgtgcccgtgagccagaacgggtagtagatgcttaggttcccgcactgcaccggcgcgcacggcaacgccgacgtgttcacggcggcggcggtggtaggaaggctg

SEQ ID NO: 3840 - DNA, 389 bp, Zea mays
tccgcgagatcgccctgcccgtccccgcgccaccgccaccgccaccagcggctgagcaaagcggcgacgatgaacgcgtccacggcgccaacacctctgatgtaagtcgcagcggtactgatacgcaaatcgcattcgcaatggtgttgtgtcgctgtttcagtctcgggattttgccgatgactaaacgtacggtgtctcctcctctgcacgcttgaaggtggaaatgctgaggatgaagatggaggggatgtcaaagggcatgcgcgagcggatggcggagtacagccggcgcctggaagccgtcgcctccggcgacaacgctggctggggctgccagtcaaggaaatgcggcaaccggcacagccgaaaggcgagcgcaggcagcc

SEQ ID NO: 3841 - DNA, 389 bp, Zea mays
  misc_feature (76)..(76): n is a, c, g, or t
  misc_feature (334)..(334): n is a, c, g, or t
  misc_feature (349)..(349): n is a, c, g, or t
  misc_feature (380)..(382): n is a, c, g, or t
  misc_feature (384)..(385): n is a, c, g, or t
ctgccggtctggcgaaccgccacgccgctgtcatcgagggtcggcaacgtggccaggatcgccgtcctcaggcctnggtcatcacagagcgccgtgatgtcctgggggagtatcagggattcagggacaaaagtctccccagtaatccccccaccaggagttccagctcgtctcaggacagatcggtacccagcccgcgctggatcctacagatgtcgttcgggccggtgaaccagcaggacaggcgtggcctcctctgcagcggcgtgatccggcgcttcaggagatcgccgaccacgtgcattgatgtcaggccgcccgtggccaagacctngatcctgtccaatangggcaggaactctggcgagagggatggcttnnncnnccat

SEQ ID NO: 3842 - DNA, 1157 bp, Zea mays
  misc_feature (1091)..(1091): n is a, c, g, or t
  misc_feature (1093)..(1094): n is a, c, g, or t
  misc_feature (1096)..(1100): n is a, c, g, or t
accctagacttgacatggaggtaaaaaaatgcatcagtttgtgtttgcactggtaataatgtactaatgtccaaggttgttctcactcctaatcaactttatacccatgccaggtatcaaagcacatgaatcatttactaaaagctcccttttgtatacatccaaagacaggtaaaactcaagatgtgttaaattcctgtattagtttgtaatgtgataataaggtggcaggctcttatgctcaggagcgggtggcatgtccttttgaacatctagattcaataacagatgcagtcccttaaaatccttgacattgttgatttagtttattctaacagctgcaggaataatgtttgtcacacaatgttccctattgctcacaactgactcttcttccaggccgtgtttgtgttccgattgaccccagtaactgtgatgattttgatcctgcggctgttccgactctatcacaggtatggtccatagagcctagcatgagaagcactaacatttcatatccttctcccaagcatcatggtgcaatgctgatatgctaaaacaagtgcactcatacagcttttaggagagctgaatgctactggttttcagacagatcctgaaaatagtaagtgattgtagccatgctccttttgtgattcgtgtaaaaacttattatttcataaattgcagaagtaaaggcgttctagtgccaagatgcagccttgcgtaacaggctaacatgctctccttttgacaatcctatcgagtttcagattgggaaagaacgtcccttgggaaatccatcagttttttcagaacttccttcctgcacccattgctgaaagcatgcaaggtatggattctttcctatttcatttctgtggcaatgccggcatccatatgcattatgtgaataattgaaacactgcaaaatatcttaagtagcagaaccttaggagcatatattatagttctcttcatcccgcagcaaccacctgaagagaaaaaaaagttcggatgcacacttactttcagttaaactcttatctcatggttctgacatttcctgaggcataactctgaatcttttntnncnnnnnaattttgcaggaggaactggaaagtgcatatagcgcgaagcttcagcagtccaagaa

SEQ ID NO: 3843 - DNA, 477 bp, Zea mays
gatttaataagtctggaccagtatgtagaaaacatgcctgaaaaccagaaggcgatctattatatcgctactgatagtctccagagcgcgaagactgctcctttcttggaaaagctggttcagaaagatattgaggtacgtggagagtggactacttgttattgggcagacaatcgttttcctcttaagctgtagttttgcttatagtgctcctctttgttctgtaggttctttacctcattgagccaattgatgaggttgccattcagaatttacagacatacaaagagaagaagtttgtagatattagcaaagaggatttggaattgggtaagcaaaaatcttagttgttatgtgattcagtataaaactctttgggtttggcaacgcccatgccacatgcttatacataatgggctggtacaggtgatgaagatgaggacaaggagaaagaaagcaagcaggagtatactcttc

SEQ ID NO: 3844 - DNA, 430 bp, Zea mays
ctctccgatacttgggcctgtccgacaaaagtggctttactgatgagaaatcgaacaaataataatccatacacatgaaaatggaaatatgtatgtaccttggaaggcatgatccttctcttaggtaaagcaagtcattggtgtattcatcgaaaattgctactgctgaaatcatgtatgcaagtcccatttggaaagaagcctcctgcacacatggcatgattgtacaagcatatgagcacagcttccttcttgttgcatcagaggaaacacactagacaggacagacagacctgataagcaaccagtcccgcgcgaaaaccgaagaagaagctgctgaaaaatgaagcaagtaaccccccaatcaccgcaagtggccataacacaatggccaaaccagcaaaaggcacgcagacagtttctaagaaca

SEQ ID NO: 3845 - DNA, 698 bp, Zea mays
  misc_feature (633)..(641): n is a, c, g, or t
  misc_feature (675)..(677): n is a, c, g, or t
acgggcagttgttggtgccttacgagcagcttgcaggaggctttctttagcatcagtgtactccaactgaattgtcctaattttgcccaagtagaacaagtatcggcagaactgcaacaaaagaaatttgtatcagttgtttagtaatttcctacgaagccaattttctgaaaaaagatataatacttcaatcaccaacatgacaaccaataacagtttcttaatagaaatagaaatagttgaatacatggcttgcaagtgctaaatctgaaacatggcaaatccaaaagctgcatcacaacaaatggaataagcaaatggattacttgttggttggaatgtgcttcaaaacgaggtgcctttgatctaagcttttctgcctgatcatacaagttgtagtggaggtaattgcggaggagaagattcagcagagtttcctgcaatcaagaaccaaatacatacaatcatcaggtacacaaaattccacggcataacaataggtcagtggcgaccagaaaatcagcattacctggccgagctcgtcacgatgcaaagttgccattctgtgtagagcaagcagattcctgaaagaaaaaacaaaagcaaatgtaggacagattgagtagacagaannnnnnnnnagaagaagctagggttggtcctgggagtgaacannngaaaaaaatgaaacattagac

SEQ ID NO: 3846 - DNA, 813 bp, Zea mays
  misc_feature (447)..(450): n is a, c, g, or t
  misc_feature (452)..(808): n is a, c, g, or t
ggctcggtatttcgtcgaacgggcaaggcacgacgtcgaccactagctgcgaaaacacataatttgttggcggcagttcatcgaacatcatacacattggaaaataaacatcgagaacagcgggggtttctcaccacgggtttcgacggcgtcacggatggggctgcgcaaaaacagcaaacacctgtcgagcgtcgatggcgtgctgctcactgcgcaacacaaaacagcaagccggcagcgcgcggagccatcggggctgctgttttggatcggcaccgctgcgcagagacttggacgccacggctgcactccgagcaggggctccttgctgccgcaccagggaaaaggaggaaggggcgagcagcagcaggggaggaaagtcggctgggaggaagatgaacagggaggcgctgaaaagaaaaaaaaattctgggcgtcatccannnnannnnnnnnnnnnnnnnnnnnnnnnnnnnnnnnnnnnnnnnnnnnnnnnnnnnnnnnnnnnnnnnnnnnnnnnnnnnnnnnnnnnnnnnnnnnnnnnnnnnnnnnnnnnnnnnnnnnnnnnnnnnnnnnnnnnnnnnnnnnnnnnnnnnnnnnnnnnnnnnnnnnnnnnnnnnnnnnnnnnnnnnnnnnnnnnnnnnnnnnnnnnnnnnnnnnnnnnnnnnnnnnnnnnnnnnnnnnnnnnnnnnnnnnnnnnnnnnnnnnnnnnnnnnnnnnnnnnnnnnnnnnnnnnnnnnnnnnnnnnnnnnnnnnnnnnnnnnnnnnnnnnnnnnnnnnnnnnnnnnnnnnnnnnnnnnnnnnncctcc

SEQ ID NO: 3847 - DNA, 418 bp, Zea mays
cggcccgaagacggtgcggattccaatagcggtccgaatgacagtttatgatttctatgcagatgttgcataaatatgttgaaatatacaggacgtatcgtttgggttattttcgtttctgaagggaataaagaagtgtttttagaaaatttcgagaatcgtctggtgcctctatatatattattatggatctttctgaagctgttgacttggcaatcggatcatcaatcatggactacctatagagttcattcacttgatcgaacaatgtggacagagctgattgtagtcctgatggcacacatgcagttttcggtgcgttgagcaagagcttaaatataggagataactaaaattccccatacactattttttgcaacttgtttctgtttgaactttgtcaagttggatgcattcg

SEQ ID NO: 3848 - DNA, 405 bp, Zea mays
tggttctgtgcaaacgagataacatctcttgattctcgcctgttacgatagtgatgcttgtatacctctgaggctattgtttcgttttgttagcattcttttgcttgtttatgggtatgtgatgcagagttatcttagttatatcctccaattttgcagggcgtgattgacaacatgtacaaaagtgctaagtgaactcactctacagtacacatcccgatgaagattcccaacgttgaatcttgtttgagcagccagaagttctgctttgtatatgctcgtagtttgtatgcgagaattctttcctgtatcagttttttcagaaacgatttgccttgggcatatatatatagcaaaaccggcaatgtggccagcagccaagtggagacaccgtttcaaattgat

SEQ ID NO: 3849 - DNA, 393 bp, Zea mays
ggtgatctgatgaagatttcacataggcataaccatgaggacatcgatattgaaataggatgtggggatgctaatgaggtggaatgctcagtttcagattccaaagttaaagacaatatggatgcacatatgtgatatgtagagttagaaataaggtaaatggagaacagtcgagttgggttccagcggtttaatgaatgtgtgtttgtttagttcataagtaggcaaaatgccgtctcctccggtggtttcagcattattctttttgtaaatggctagtgcaggatacttaggatgctaccctgcaggttctcttgtgcattccgaccagcgtgtgtgttgaattcttaccctcggatccttcagaagacgtttgtgtatagtgtcttggtt

SEQ ID NO: 3850 - DNA, 432 bp, Zea mays
cgattctcatacaaggacctgttccatgcgacgggtggatttgagaacaagaatcttcttggcattggaggatttgggagagtgtacaaaggggagctcccgagatcgagattgaagatagccgtgaagagggtgtcgcatgactccaagcaagggatgaaggagtttattgcggagatcgtcagcataggacgtcttcagaaccgcaatcttgtccagttgcttggctactgtcgtcgcaaaggtgagctcctactggtatatgagtacatgcccaatggaagcttggataaatacctgcataatgcaaaagagggcaactctgcgttgagttgggctcaaaggtttcggatcatcaagggaatcgcatccggcctactgtatctccatgaggagtgggagaaggtagttgttcacagagacatcaaggga

SEQ ID NO: 3851 - DNA, 492 bp, Zea mays
cgaccctgccagttgcacaacgacgcaactataagaatgctttccatgcactctaccgtatcagtggtgatgagggagtccttgcgctttggaagggtgcaggtccaactgtggtgagagctatggcactcaatatgggtatgcttgcttcctatgaccagagtgtcgagctatttagggacaaatttggcgcaggagaaatttctactgttgttggtaagattctagtgcctacaagcttttgaggatttctgctatgttgttgaaatcaaatgcttattttcttagcttctgcaactgacattgcccggatccttttgattctactcattgtgcttaattttgtcaatttctgtacgtagccatgttaggcctgctgatcagtttcctgatgcaatcgtccaatttgattgcaggagccagcgctgtttctggattctttgcctcagcatgcagtttgccctttgactatgtgaagacacagatcagaag

SEQ ID NO: 3852 - DNA, 366 bp, Zea mays
ctctctggctgatcagtctgaaatgctgctgcacactatgcttgaggccggcgtctccccggacactgtttcttatcgtcacattgtggatgcctttgccagtgccggcaacctctcccgtgcagccgagctattctccgaaatggcagccacggggcacacggcggatgcctctgcttatttgggactcatggaagcacacacgcgtgttggcgccactgctgatgcggtggctgtgctgcgacagatgcaggctgatggatgtgcgccaacagctgccacttaccgtgtcctgctcgatctttatggaaggcaggggcggtttgatggagtgcgccaactcttccgtgagatgagaactgctgt

SEQ ID NO: 3853 - DNA, 337 bp, Zea mays
taagttcttggtgaagaaaccaaacaagatcatgcgaaagctttggtggctgcttcacaattatattatttttgaagttagaaggtttgtaacactaactactgatgctgggaataggttagttagcagctctttgcgaaggtctggatggctgtcataggaagaggaagaatttcgttggaaaacgggtagatggggatcaattgttcactagacatgaggagagggtgttatttgacttctataatgtgctacttgggaccatcatgatcatcatcaacaaagccttttatcccaagcaaagtagggtagactatagttagaaacccaatagaat

SEQ ID NO: 3854 - DNA, 500 bp, Zea mays
ccgaagacaccggagtaacaggagagacaaagtttgtagacattggagccgactcactggacacggtaacagtactctgtttgtttgtctgatgatctcaaacaaacaaacaaacaaacaaagaatctggtgtgttgttactaggttgaaatcgtgatggggcttgaggaagcgttccaaatcagcgtggacgaatcgagcgctcaagagatccagacggtggaggacgctgctgctctcatcgacaagcttatcgcggagaaggacgcttgaaacgctgtccggaggagggatgacgatgggtggttttgatttgagaccatagtgctccttattgcaattattagtcagaaaaaaaaaattacccagtttcttttctttcttcttcttcttctatcataatatgaaatatgtatgcatatgcatgccttttggtggtttgggattattataataaataaaactgccgccgagagatgagagacggtacccaattctct

SEQ ID NO: 3855 - DNA, 430 bp, Zea mays
ctgaatgtcctgctggatctcagtttcgccgagtagactctcttttccatggctgatctcccgtttgcttctgtagaggagatactgcttcaccaatgtgtccgggcttccttctaacgacccgagttgcggcggcgatgacgctcgatcctgctggagctggcacaggatgtagtagaggatctcctggggccgcagcggctcgaaatccatgtgcacctgcggaatgtccaccaagacgctgcgatgcccctgggccaaggccctgcgtgcgagagcgatgacctcctggtctgcctccggcgccacgacggcggcggagtgcatgacgtcgcctctctccatcacttgctccgtccactcgactagcttcccctggaagtagtcgtccagagccctatgcttgaataggactgctcttcgatgactt

SEQ ID NO: 3856 - DNA, 571 bp, Zea mays
tcgctgctactaatgctcttgagctaggaattgatgttggacatattgatgcaacattgcatcttggatttcctggtagtattgccaggtcggtgaagaatgacatattcaatgaagctcaatgtttatcttgtcaccctgctaagatacaaattttttactgcagcttgtggcagcaagccggtaggtctggaagaagagctaaacaatcactagccatttatgttgcctttgagggtcctttagatcagtatttcatgaagttcccacataaactatttggcaggtcgattgagcattgccaagttgattcgcataatctaaaggtttatagatatgtgtttattttattaactaattggcaagtataaataccttgagaacctaacccttctcttttatctcaaaaattgaaatttattacaggttttagaacagcaccttccttgtgctgcttatgaacatcccttgtgcgtgcaatacgatgagtgctactttggctctagtctcgatagtgtaatgacaacccttaaagacaaaggttatatcatcaataatcgagctggacctt

SEQ ID NO: 3857 - DNA, 479 bp, Zea mays
ctgtgtgctaaaatgatttaattgcaaccatacataaggcgctgtcccctcctgttcctaaaaaagattggagtactataataagctaccatcaaggagtgaacatgttgcagtgttgcactcaccatccttttccaaacggcggaaaaggaacctcccagttgttccctctcagagcagcgcgtgtgaacctatagaacaagcacatccacagaccacattacacgtcaagacgtccatcagttgatccaattatgaaacagatgctagattgctagtgaagcaccaaaaacctgcctgaaattgactcgctggggcggctgcacctcgatgtcgccattgacgacgaacgcgcctgagggaggaaacgtgatgacattgttaagggcgccgccggcgacatcgatgacctggagcacgtcgccggcggcagtgcggaagaatggggcgttgcgcacaatgaagagctgctcctgctc

SEQ ID NO: 3858 - DNA, 353 bp, Zea mays
agattctcctgcttgatgaagccacaagtgcattggacacagagtcagagcgtgttgtgcaagaggcacttgacctggcttctgttggcaggacaaccattgtcattgcacatcggctctccacaatccggaatgctgacatgattgctgtgatgcaatacggtgaggtcaaggagctgggatcccacgatgacctcattgccaatgagaatgggctctacacatctcttgtccgccttcagcagaccagagattcaagggaggccaatcaggttggtggaactgtaagtacatctgctgtggggcaatctagcagccacagcatgagcaggaggttctctgcagctagcagg

SEQ ID NO: 3859 - DNA, 350 bp, Zea mays
cctacactccgacgccgccggtgtctcacacccccagcccgccgccaccatactactagaaagcgatgcctaccataccacactgctgtcagtctctggagcatttaggtacgtactaatactacgtacaacggtacaagaatggagcatgcaatatgcatgcacactacatacatttagtatgtgcttgtgtcaaatatatcgtcagtatcatactgatctcctggcatagtctggcactaaccataggctgtccttttcttttgtgttcggacaggtggtctcgatcgatggaagagttgtgtcctagccagccggcaaagatgacctgctgatggtaatgatgatga

SEQ ID NO: 3860 - DNA, 366 bp, Zea mays
acgtcctgctctcacgagcggtcccgcaacagcatctccagcacgggacgcggcaccggtaacagtagcggatctgaacggcaataatgctccagagtttcttgcggaggatgccagcttgtctagacgcaacaccacaccgtcgaggccaacgattaagatgctgtcatgcttgtttccttctcgcgtctgatgaatggtcgctggacgtcgggtgtccgaggcgcatgcgtggtagcccccggtcgatctgtccgcgaagcggtgtgcagtgcaggacggcggcagcatacctttccgaaaagaaaacggcatcagcattggcgttagtcatatacttgtccatattcacccgatttgcctata

SEQ ID NO: 3861 - DNA, 405 bp, Zea mays
ttgatgtcgtgaggaatgtgaaggccagtatgaggttgagggcagcctgtgagaaggccaagaaggttctgagcgcgaatgcagaggccgtggtgaacatcgagtgcctgatggaagagaaggatgtgaggggggtgatccgaagggaggactttgagaagctatgtgccagactgctggagagggttgttgaaccttgcaagagggcggtggaagattcagggattggattggagaggctgcattctgtggaactcgtcgggtcaggttctcgggttcctgccattaccaaggtgcttgcgggattctttagaagggaacctagtcgcacactcaatgctagtgagtgtgtggctcgggggtgcgcgttgcaatgtgcaatgcttagtcctacgttccgtgttc

SEQ ID NO: 3862 - DNA, 717 bp, Zea mays
gcaagcgcaatgcaatgcacaactaacgtcagcacgtactgcactggcactcgatcgcactgaatcaaagacatgaactgccagctgaatggcatcaccttgacttggagctgcaagaacctgacgtagtcgatgatctcgtccagcatcgacgccttgtccgtctgcaaaaccacaaacaacgacgatcgaccgccccacacaacgtcgccatttcagtgttgattgttgacgacgcgagcgagagagaagaggaaggagctagctagctagctagagggggatgccgaccttgttggcgttcgggaccagttcctgtagcgacttcatccgctccgcgatcctctccctccgaagctgcatgcgcgcgaaatggatttttttttaacaaaaaaagttgagaaaatctctgtgtcgtacaagtggtagggacccaacaaatttctatttggctaatgaaccatcaaccatgacatgcataactgtatgtaaatttataacatactaaaactcttctgacaaaaaaacaaattttgcatgccttgcaatgtgttttgtcacattgttgtgtcttaattgtgtgcttaatgaaaaaaatcagagaagttgtgacagttcagctttcagagaatgttgttgttttttgttaaaagagggaacagttcagcttgtagggaagaaaaatgaaaaggtggcatacatacacgttccgctatg

SEQ ID NO: 3863 - DNA, 481 bp, Zea mays
tgtcgtctggattgtagccgaacacacgttgagctaggagtcccacgatcggaggcgcgaaggacgccagcactgactcgaatgtcccgtccagggcatatatgctagttcttgatttctctgggacgatctccgccatgatagggctgtaagatttagcaagatcgagttgaaagtctcacatcatcattccgttaagaactcttggatgcgacgaatggcttacaagtttgtggcgggtccgttccaggagatgaggacgccagtgacgaacaggacgacgccgtaggcaactccggcagacgggtcctcggggagccccagcagcagcacggcggccaagggaactgccaagccggcgctgatctgagacaggacgatcctgccggcgtctgggtaccgtacggcgagggcgtcgcccatctttccgccgagcagtccgccgagggagcaggccacccagaagatggtcatgagcaca

SEQ ID NO: 3864 - DNA, 550 bp, Zea mays
gtgtgtccaatcagaacgaccccaatcaattttgctccaagaagaattggcgactacttagatgccaaaatggcaagatcactttttatttctccccttaattaggtcaataattcttcctcttaagattttttttgaagttgaagttgtcgctgttttgatattgccagggttgcgcatttttgaagaacttctggaagtagattaccctgtatgctccagtttctctagattttttttagtgatttgtatgatgtgtaaaacattatgtattttcttttatttgtactctattgtgttgtaggcacgaggctgcagcagagctatgagggctgttggtgtagttgaagccacatgtgaagccatttttggtcttataatgagcatggatgtaacaagatacgagtacgtatggttttataacattctattttccctaccactgatgttgatctctttatcttcattatgcattgtaggtgggactgtagcttccgtaacggtagtttagttgaagaggtcgatggtcacactgcaatactatatcata

SEQ ID NO: 3865 - DNA, 451 bp, Zea mays
tgaattgcaagctatgtgtgcttcttttggctcttttcctccggttgtggctttttgcttacatgaaactcttgagtagacaatctagcgctaattgatgcaggtgtagagccttcctcggatagctggctccttttggctttcatagaactgcaactgcaagtttatatcattgcatctcagtatgcggagtgaataagctgtatacacaaccataatgacttcaatatccaactgtttaatatgatatcagtattgatggaccccacacgcacatagaaacggccacttaagattggacattccctctgttttcacaactactctgtagatcaaaggttcttagcatgctgtatgcctgtatgtatagctcttgttctattttaataatgaaatgcatgtctagatcttttttgtagtagagattatgtaatgtgtggatgacctggaa

SEQ ID NO: 3866 - DNA, 527 bp, Zea mays
cttgcagtgatagacatgaacaagaagctggtaccggttatcatcttgacattgacgcccaggttgagcgccttcctgatggtttccgcactgtcgtgcctcggtgggtcgaaaaggggcagcagggcgacgaactgccatgggccgccggggctgtccttagacttctccggcacttcctgtaataatgcaagaagaagaatatgatggtatgtttatacattcagaagaaatttttcaaagaagaacatatatatatgtccaagaccaatgaacgagaaagaataacacctgtgtggcgacggcgagagaccttaggccgcgctcagcgtacttgtggatgatggcgtgcaccttgttcacgacatcctccttgcagttgcatagggtcatgatctgctcgggagcacccttgctgacacggtgccagctaccgtcggcgaggctgacgtaggtgagggccgtgcgcttgtcgacggggttgaaggggaggaaatgcacctccttgatgccttccctagcttcct

SEQ ID NO: 3867 - DNA, 353 bp, Zea mays
ctacgtgtttaaagaaaaaatgctctcccatctctaccacagaagtgtctttccctctggtaccccaattcatttttttacatctactaccactgttgtctgtttttgctaacttgggcattaactgtgacaggaaaagaccaatttaacccgtgtgctctagtttcctgctagatttgtttccctttgacgccacacactggcaaagcatcgctgctatttttctctgtagtacagtccaacatggttgaaagcaactgctacaaatcaagagtactagagattagcgctcctactttaccagaagctcacaatgtcataaagtttcttggaacaacattagcaggacaagc

SEQ ID NO: 3868 - DNA, 610 bp, Zea mays
agtaatttcactccactcttgaggtacaagaagcttgaagatatcgactaaatacaaagactagtcagttaaattggatagctgccaaggaaacaaggtttactggaaacaaatcacacctggtgttgcacaaacataagcatctccagttatctgagttccatcactaagtgcgaagtgttttacagttccatcaggattcagctctatctttttaatacgagaattcaggcggacctctccacccctagaccgaatgtgatcaacaataggcatgcatagcctttcaggcggattaccatccaagaatgccattttagaaccatgcttctcctgcacatttacataaagtaatcttttcaaaagatccacaaggcatcttaacgttgcaagtacatattagcattttctcaagtaaaaacaaagaatatagacaagaaaataaaaatcaatatttgtaagctatttcttcaaacaaaacaggcaactaatatattgcacaattaaatagaacagctatacctgaagaaatcggttcaaagcaatcaaaatgcactgcatagatagctcatcaggatttatgaaattgagtgccttggacattgcaata

SEQ ID NO: 3869 - DNA, 927 bp, Zea mays
tctattgtggtagatttccttacagaatgtacattgatcttaatttgtctatattttgaagatctatactttgatgaaattgcatttctatgtccattataattgaactgaaagttctgttctaaattgatggaatcatggaggtacaatctaaattccatacaatagaaatttgaaaaaatataaattgatatcattgtgctagaaacagtatgggaaattatggtgcttacataattgacaaattagtatccgagtacatgtgtttgatgccccacgccggccaagtccaagagtatccaccaaaacaaactgtgaaacacttgtgtgtccgagaaaagaaaaccaaactgtgatagttggtcacaggagcaccaacgttttgaccaccgtgctcaatattttgccaatcctttgactactgcatcactagacaaatattttcataatatgtttgagttcctgtcaaatatgtcagcaccaaattctagttgagctattgctgatgaaatcacgaagtttttcaatcttgtacactttgtaagcaatgttcacatatatataagggtgagatctttaacttaaatatatgacttcctatagctttatcttttatttctgttgcagatccgctcaccttcaggaacagcacgtacttacagatttgctacccagaatgtaactcttcctgctcaagaaggagaaagggttaccatttccttggcggccccagttaacgtttaccgtgacatgggacccctcaaggttgctgcgcgctcacaaggatttaaacctggagaacctatgtgtctcactaatcacatcaatgggcaagtctcgaagttgctaagagctccatcaaagaacaagggaacatttttccttagcccatatttattggtcggtgctcttgccttccttgcatct

SEQ ID NO: 3870 - DNA, 393 bp, Zea mays
gagacgattcatcttctgaagacacttctgatgagaaagtggcaaatgatttgtcttccgaaaatgcttcggagcagctaaagacagagaataaacaagacaagaatatgactgatgcagatttcttcaagagtaaagtcaagaaaaattggtcagattctgaatctgatgacgaaggttctgctcaccagtcaaataccaccactgatgatgaagactcgtcagatgaatcacaagattcagataaccagttggcagatactaagggcgatcctgacaagagaaacattgtggacaaggacactcttgtggagaatactgacttgcaagagccggaagatcttgacaacaaagagagtgaagatcttgatggcagacctagaggaactgaaa

SEQ ID NO: 3871 - DNA, 372 bp, Zea mays
aggagggcaatctgaatgcctactttgaattggcaacggcttgctgtaatccatcatcgtcattgagaccagatacaaagaaaatactaaaaaggcttgaagacatagcaagataacaatagatgcgcgcggcggtgaggctccagtctgtttagaaattagaaagtgtggtgtgttatagcagcggccagcaggaggatagctttgacgtcccttgtattatttgttacttcctgcatacagcagagattgtgttgggggcatttggaaaatgatcctaacataagctaggagccccaagcatgtatagaaaagtatatttcccacgtaccaacataggaactcatccgagaacataatgtgtgtgctttc

SEQ ID NO: 3872 - DNA, 849 bp, Zea mays
ttgacgtcctgcttgttgcattgctacttgtcagcattctattgccacatggaacacttggatgcaagcagaagtgagacactattgcatttgtttgtttttttgagtgcatcttctgtttatttcaaacttcagattagctgttatctgcaactagctaggaaggtactcgcgagaagaaaaaaaaataatgaagctaggaaggaagggtgtacgaataataccttccaggaaagggtacggtcaacttgaccagcaacgtaggaagcaaggccggaatcatttgtctgatacgtcaagagatgtttggttagaaaagtctgaagaaatagatgcatctttatgtatagcccaatgccaagctcggcttccagctaaccttgtccatcgtgccaagatccagcgcttggaagtttttcaacaccagatgtggaggtaaggcgaacctgcatggtttcatagtacatatgcagtgtgtataggactccttatagtgaaaaaaaaaagaaacgttcgtccgtgcagcattctgggttcagttcttagattagcacctgttcttaatgtcagcttccctgcggccaagtattggagtgtctacggtgagtgcaatagccttgaagccagccatctcagcccttttcacgagttgccgtacgatgttcctgtccttgtagacctgatggagacgacgatacatggtataaggtcagagtgtgatgaacagaagataagcaacgtttcttgtgagttcatgaaggaagataataatgcatacatagagctggaagaaacgtatgcccggcccaactgagttgacctcttcaacgctggaagtagaccatgagg

SEQ ID NO: 3873 - DNA, 296 bp, Zea mays
acctaattatctctttccccaagttaataatggtatttgccgttggataattccacgcttgaacacgactgtactgtcttgctcaactgcttcacttcaccggttgcagttggttcctggcccctacaacaaggaaaccttcaactttccaaaaccattttgccaagggacctttttttttaaaaaaaaatggtaccaacggacaaaaagaccaatatcattagctacctgtttgatttcatgtttctttggactgatgctagcatcatactctggtagctaaattagtactgcgg

SEQ ID NO: 3874 - DNA, 330 bp, Zea mays
gctgcgactaaggatgatgatgtttaccatttcatcagctatttaccttttgaaggtgtcctgtatgagctggatgagctgaaggaagggcctgtgaatcttgggcagtgcggtggtgctgatgaccttgattggctacggatggtaaatctatgcgcccataaaacaatggcacccccatgaaatttgctctagcttcgccactggacggtgggtgcagctagttattcaagaaaggatcgagcgatactcacagaatgagatcaggttcaatcttatgtccaccataaagaacaggaaagaggtgtactgtgctggagtaactgtaga

SEQ ID NO: 3875 - DNA, 355 bp, Zea mays
gtgatctgctcccctgctcgccgtggttgtggcactgaacaggaaggctggatcccatcctcacctaatgacatgtgctatggtggagatctgagacgaaccgcacttctgaggtcggttcaaatgaaggtgcagagcccccatccatgtgatgtgcatgaacgagaacaagggcgttctaatgtacatgctgacgagcttcaacaggatcagaaagaagctgtgggtgtacagctggaccaaaggcctctctcttgtccaaagtcaacccaggatgctaagtgccagagctctataaactgatgacgcggattttgttgaggatcagattacggtgtgaccagtcaaagtttgt

SEQ ID NO: 3876 - DNA, 564 bp, Zea mays
gcgcgtaggatcggcgaggcgacggcgctcgaggttcgcgccactggcatccactggacctttgcgccgtgcgtcgccgtgagtaaaattcaaaactcttctgattgatcgatgacgtttgtggggatctgcttgatggtgtgagtctggcctctcctgtatactaggtctgtcgggatcctaggtggggcagatgctacgaaagctacagcgaggacccagagatcgtgcgctcgttgaccaccatcgtcagcggtttgcaggggcagccgccagcagaccatcctcatggttaccccttcctcgcttcgcctaggtacttgagtggacatgtttagcgtgttcctcatatgcccacaacctgtttgtgaaaatgtgtccatgtggtttgtagggagaatgtacttgcttgtgctaaacatttcgtaggggatggtggcacggacaagggggtcaatgaggggaacgccatttgctcctatgaggatttggaagcaatccatatgacaccttacccggattgtatagctcaaggggtggcaacagtaatggcgtcctactcta

SEQ ID NO: 3877 - DNA, 387 bp, Zea mays
tctaataattagcaggtatatttggatccactagctagtactagttttagctgctaatttttggtgaagagtgaaaacggacccaaataggccctaagtgtagtatacatgttttgtgcctacaaacttcatttttttttcatattgtataaaatattatttggtgtacatgtgtatacacgtctttcactgggttcgtcacctggttgcagttatgttccaggcttcctgcaacaagccttgatctctggcccatttctacacatagaagtaggaaagagggcataggatgttggcatgctgcagcttatctgagaagtgagaaccatcgtgattagatactaaccgatgaacatcgagctgggaagcaagggacagttgctaaag

SEQ ID NO: 3878 - DNA, 394 bp, Zea mays
caggaaagccggaagcttatcgagcaccttgttgccgaggagagccgggcaagggctggccctgaggccaaagtctggcggtcgggcagacacgaacggcatccagcaggatctgttggctgcgtgggtgccctcgtacggggacgggttgcgcgcggtgaagagatcgtcgagcgctccggagttccaggattcggacagcgtcagcctcgcctcggcgtggctgaagagcaagtggaacctgaaaccggattatgccttcaccctggcgctgttcgacggcatctccaagcctctcctggacagcatccccaagcctctcctcgacaacatccccaactcgatcgttgcttggagaaacaaggcggccagagattagcagcttcgtttcgtc

SEQ ID NO: 3879 - DNA, 300 bp, Zea mays
ggtttcctgctcatagtaaaaaaatcgcgttttcaagctcaaaaagcgatttcttccgatgtttgctgttgagcgctattttggaaaccccattttctcaattgatttttagtttttaaagaaaaaatagttcattttttctcttgtgaaatggagtcccaaactaaccctaatattaaaaaaaaaatcgcgttttggagctcaaaacgctcgttgttatgaccaaccagctttataggtttaaaaaggttgaatcttgacaatgcttttaaaaaggttgaatcttgacaattcttttga

SEQ ID NO: 3880 - DNA, 209 bp, Zea mays
atgatgctctccgacggcgccggcgccggcgccgcagccacgggccaccaccaatgaacccatctccacctttcgtcagcctagcgcttcccaccacgtccgttgccgatggagtggcggatcactccattcgtctctgcttcctttttctttttcaccccctcaaaaaaaaagatcagcgtccgtctctctaatgtaacgtacgtaat

SEQ ID NO: 3881 - DNA, 947 bp, Zea mays
  misc_feature (886)..(886): n is a, c, g, or t
gaaagcagagcaagccaaagaagaaaacaaacctagcaattcagaaggtggcccacttgccagggtacgatggttcagagttgtgcttgatgaagctcaaacaataaaaaattaccggactcaagtgtctagagcttgttgtggactgagggcacaaaggagatggtgcttatcaggaacacctatacaaaacaaaattgatgatctgtatagctatttctgtttcttgaagtatgaaccttactcaaaatttagtaatttcaaatatatgatcaagcaccaaattactagagattcagttcgtggctataagaaacttcaagctatcttgaggataattctactgcggcgcacaaaaggtaagtagttccaccataaataaataaaaaaaactcgaccggcgaggaaaaaccgtcctcccggtattatattatatattaagaagagaccgaaacatggtcctagccaagaaaactcttgaactatgccccctcactaacgggacgagtcaactggctactctgcaatggtccagccgaagggtgacgtacaaaatatcgatccccgagagcaaacctgagacctggaggtgctactcggaagcgtttaaccactacgctagaggccctttcgcaattccatcataatcataaatacatatatgtgtgcatattgttctgagctacactatgaaacctgcactggtgcatgctttattgcgcttgccaacaaaacttactaatcccccactcaatttggtatgcattgcaacctcgaaaactttgttcgggatctggatcctgttagtgtttcagtatattttttagaagggttcattgtggttcttaaatcttcaagctttttcagtatatgccgctgttgtcgnttcgttggttgtgatattgtcattgatgtactgtttaaccgttatccatacagaaacacta

SEQ ID NO: 3882 - DNA, 355 bp, Zea mays
agttctttctatctgaggctaaatgcagcagatgctaaccacggtttacaagaaactcaatcataaataaattagctaacaaatcaaatgaggtgcaactggcaacaacaaccgatcaagcggacgaagggagctgcgcaggatttacaccgatggagggttcgactccttggatttttcatcagacgacgcgcggctctccgaggtggactggcggagcccctcaatcatcctgatcacctcctccatcgtcgggcgccggtctggcgacttggccgtgcacaccatggctatctgcagcatttgtaccagctcctcctcgatgttctggtgcttcatcagctccacgtcaaac

SEQ ID NO: 3883 - DNA, 406 bp, Zea mays
  misc_feature (392)..(401): n is a, c, g, or t
ggcgagctgcccgtcatcgatgcagtcgtcgcctagccactcgggtctgctcacctttggcggggctggcggcgtgggcttccccgacgtgccggccgttgccagcggcatcattggcgtcggtccggtgtcgttgtccacggcatcgtccatggaggagctccagagcgctatcgagggcgccattgcgcactgcaagaacacgatgggcggaaccgtgtcggtcaaggcggcggcggcggccgccgacgagatctgcacgttctgagcgcgaccacgctaggattccggggggagctaagtaaagcaggctgttttaatcggtagcagtacttatctgttattagcaaatttaatttcgtccgtctcctttttttttttgggaaaaaccnnnnnnnnnnggggg

SEQ ID NO: 3884 - DNA, 538 bp, Zea mays
agaacaccttttccgggaagctgcggctgcacgaggaggacgaggagatcctcggggtgctgtccctcgtcttctggagcctgacgctcataccgctgctcaaatacatcatccttgttcttggagcagatgacgatggagaaggtatagtacgcacacatactcatgtctgtgtccagttcttctagctcattgttgttccttcaaactgtcttgagttcactggcaatgtgttgtgttgtgttgtgttgtgtaatgcaggtggcacatttgcgttgtactcgttgatgtgcaggcgctcaaggatgggcctcctgatgaacagtataaacaacgggtgtttatcggtgtacagccaggaggaggaacctcgcgaggaggagctgaagagtagtctggcgataaagtctttcatcgagaggcattactcgctccgtgtcctgctgctgctcttcgtcctgatgggtactagcatggttattggggatggcgtcttcaccccaactatgtcaggtaaacaaccttgggttctcgtgtt

SEQ ID NO: 3885 - DNA, 903 bp, Zea mays
caatatgtaaaggttacaggggtatgtataatggcgacaaaattgtttgatctgttcttattttcttcaatctgttgtctttattcatcttgtatgtcagttttatttcactgtcataaattacactaccctgaaacatgattatttgactttccattttcacttgacatgtgttgcatgttgtctctgtcaaatagttaccttttgttctctttacaacactatgtcaccagactgttgcattttgatttatgtcaccagactgttgcattttgatttatttttccaggtcaaatgaacatggtatacgaaaagcttttaatagccacaattcaacaacattattctttctgatttaggagaatatattcacttacaaaagacactttctcctataatttagataccctcaaagcatgcttcacttccaagcaacactttctcctataatttagaattgcaatgataagtgtttgaattcacaggttgttacctgtggaaatttcccccttgaatcctcgttccaaagggtcccgagatgtgtatacacttctactagcttgtatgagtacagaggttgggattccaaagctgccaatacagagcatcggcgttttacctggggcttacgctcaatggaggtgagtattttcatgacatggaatagtgaatacctacttttaaccttcctgggaacccaaactgcagttgttgttgaactttagcagaccttgacatctgatgttccttctgcatctatggcagcgccatgcggttgatttctatatctcagattttcagtccgggcttcgagcattggtgaaaacaggatatggtgcacgtgtgaccccgtatgtcgatgaatctgttgtaattgacatcaatccagacaacaaggatatg

SEQ ID NO: 3886 - DNA, 375 bp, Zea mays
tccgctcgtccgccgcttcaagaacggctcttcgtccgtacaagccccagacccactccaccaggcgcgtcctgccctggtcttcctgctcgggcaccacgggcggccggccgcaggcgatctcgaggagcacgacgccgaagctgtacacgtccgactccgggcccgcgcggccggcgacgaggcactccgggtccatgtaacccatggtgcccgcgaggtttgtcgtgtgcgatccacggccgtggtcgacaagcctggcgaggccgaagtcgcctagctttgcggcgaaggacgcgtcgagcatgatgttgctcggcttcacgtccctgtgcaccacgcactgctcccactcctggtgaagggtagaggaga

SEQ ID NO: 3887 - DNA, 664 bp, Zea mays
  misc_feature (548)..(556): n is a, c, g, or t
  misc_feature (559)..(560): n is a, c, g, or t
  misc_feature (575)..(660): n is a, c, g, or t
ccgactgcgacgacaatgcacaggtcggtgccggagtgcagaggctgctgtctgcctgtcgatccgagtctgacgatctcgagatgcagctcaaaggtcagcttgtcccctgttctgctggaatttatttcactccatttcgacgtcttaggtgtttctcctactgttgatataggcttctctctggttgagacaagggaatttggacgagtaatttatttaggttgaattacatgaaagggcattagctgtgtaaatgaagcaagccatatcatcatttacccactgatgactgatgaaatcctttcatttgcataggtggttttcatgagtaaacaagttagaagctagaccctcaaccctgtccaaacctgcaaatgtaagtaaagattcagctccaggaatacctgtcacttgggaagctgacattagacataaagtgtaaaggtagaatgtcatacaagcattatcaagtttcttctcccataccggcactgacgcactgtggcatgctccttttccaatagccagctaacctcttctgaaannnnnnnnngcnnttgaaaatccaactnnnnnnnnnnnnnnnnnnnnnnnnnnnnnnnnnnnnnnnnnnnnnnnnnnnnnnnnnnnnnnnnnnnnnnnnnnnnnnnnnnnnnnaact

SEQ ID NO: 3888 - DNA, 385 bp, Zea mays
ttccgttaaaaagacgggaccccctcccacgggcatccatactatcttgacaaaaatgaaaactgctgcttggtgcaagatccgtgtggtgtcgaagaatcgcagttcggcatcttctctgcggggaccgcgacagaaacgaggtcatcagaagagagaaataagttacacctaattgcggcagggcagggcagtggtggctggcatatattaagtggtggacaatcaagaacatgctctgcatgcttagcttaattatatcatacgtatataataacgccgttgggactcgttttctttgtcgcccggaaacagcatctgtttggtccaagattcttggcacgccattgcgatccaaccctgtcgtgctcaaacatactctctc

SEQ ID NO: 3889 - DNA, 432 bp, Zea mays
ctaccagtaccagctggggctgcggcggtcacgctcgctagctcgcggtactaccctcctccaccgtcgtcggcggctccagtgcagatggagccggttgcggtgtacccgccgccgttgccagagacgtcgtcctgcaacgtgtacccatcggtattgccggccagcgcgatgtcgtaccccccggtagaccttgctccagtgagctgctatccgccggcttcaacatggaacgatcggtgtttgtacggctgaagtcatcgttcgtggttttggttttgtgtatgatagattgttagtttaattgatttaccgttcgttccttcatggctcgtgctgtccgcccgcccgcctcggcgttttaggggagccggcgcgcggcgtgtatagtttactgttcttaagcctggaggtttccatctatctttgcat

SEQ ID NO: 3890 - DNA, 658 bp, Zea mays
tcgccagctgctggtgtactgcctgttcggcgtcctggcaggactcgtgggcggcctgctaggcatgggcggtggcttcattatggggccactcttcctggagctcggaatccctccacaggtagctaggtttgtcgatctgcgttgggcatctttgccctgggattgattaattatcgagatcgatgcaggcgtcggttcggtcaccaacttattagcttggcagagcaatcctcgtgcgtgcaggtgtctagtgctacagccacgttcacgatgatgttctcgtcgtccatgtcggtcgtggagtactacctgctgcaccgcttcccagtgccttatggtactagtacctaccaccatatgcatccgctattaatttcttggttccctcgctctctcgatcgatcgcctgaccggcctcgtagccatcatacatactaacatacatccgtggccgtcttggttttgatgattctgcagctgcttacttcacgggcgtggcgttcgtggccgccatcacggggcagcactgcgtgaggaagctgatcgcgtggctgggccgcgcgtcgctcatcatcttcatcctggcgtccatgatcttcgtcagcgcgcttacgctcggtacgtacgcgtacgtacagcatcgatcgatcgatcg

SEQ ID NO: 3891 - DNA, 340 bp, Zea mays
gaaacctagtacacagcaacgcctacatccacaagagcaaggcagaagagtgataagagcttgagataggagaacaggtatttctctgcacaagaccagattttatatatatgaatatagatatcaaataatatccctttttacatttgcacagaggggctgtatcaccatcttcccttctccctatatggaaccttgctgtctattcgacgaatgtacggcggcgaggagggcagcgccggccccagacccatccactgtcaccttcagtgtcaccgtccgcgccacctcctcccccaagatctccaccagggcttcatctaggtactccctgaactcc

SEQ ID NO: 3892 - DNA, 341 bp, Zea mays
ggaggagaaggtacatccgcagatggaccaaatcgccaaaaaacttgaagagctgatcgaccagataaaagctatcggatatgttccaaactttgcagtggtcctacatgatattgatgatgaacgaaaagaggagcaccttatgtatcatagtgagaaattggctctagcctttggccttattcacacacctaagggagcaactatccatatcatgaaaaacctcaggatatgcgatgattgccatgttgctatcaaactcatatcagttgttactagcagaaaaatagttgtaagagatgctgttcgatttcattgtatagaaggtggcatttgctcat

SEQ ID NO: 3893 - DNA, 402 bp, Zea mays
cttcaatgactgggctcttcggttggcgactcttgccagcttggcctgcaccctagtcctcatgctcttggccgacacccgccggcacaacaagtaccccttgcttgtgttgttagtttgggcggcgtaccaggtgcagccacaggtcgggggctacgccctcacccacctcaccatcagcagcgcaacaacaacaacaaccacgacgacctcatcagcgcgcgagcagcagctagtggcgttctgggcgccactcctcctgctccatctggcaggaccggacaacatcgtcgccttcaccctggaggacggcaaactctcctggcgcaagctcctcgacgccatatggaaaataatacaggccctgtatgtcatgctcaagctcatatacctttgcgacag

SEQ ID NO: 3894 - DNA, 578 bp, Zea mays
ataattgggaactcatgttctactggtatttgtcattgaacagaagatgatgagctcataacaaacatgctggagacccttgtcaatttagcacctgtgctggacctgaggatcttcagctcatcgaagccttcgttcattaaaatgacgtaagatatgacgctagaatttcattattctctcccagttcattcctattttgaggtttactcattttctgctctttgccaagatagcgagaaaggtgcaattcatgccataatgggtatgctttcttcttccgtaaagccatggcactgtgctgctgctgaattgattggccgtctgataataaatccagacaacgagccatttcttcttcctatcattccacaagtaaatgtttttttttggaattcgatcactcgaataaaggtatctgtttctcagatcttttagtgtcatacttacgttggtttacttgatgcagatatacaaacgactcgttgacctattgagtgtaccagcatatgatgcacaggctgctgctgttagtgcactctacaatgtagccgaagtgaatatggattgcaggctca

SEQ ID NO: 3895 - DNA, 395 bp, Zea mays
tgatggattagtcagtctgttttcgcaatttggggatattgttatggctaaggtgatcaaggatcgaaacaccggacagagcaaaggatatggatttgtcaagtattcagacgtgtcagaggccaatgcagcgattgctgcaatgaacggtcaccatcttgaaggtagagttattgcagttagagttgctggaaagccaccacagccggcaccagcagtgtcagcacccccatcgtatcctcctacggatcctacttcaggtggatattcctcccaatcctacatgggggtaccaccaccacctcctccagggagttacgctccagttccttggggacagccaccaccgtatgcttcatatcctccgccaccaccaggctctagtgtctacaaaa

SEQ ID NO: 3896 - DNA, 588 bp, Zea mays
aatacaatgcagcaaatggacaaacacacccatggcaagggacgagacaagccgccgacctgcggcaagaaacaggtgaacatcgatgctgccaaatgctttcctactcgaattcaagtacgactgctcatgctgacctctgtgctttcaccatctatatgttcagaagaaacaaagcgcccagattgctgtaacggctcagcagctcggtgagcccaccaggccggccttcaacaacggcatccagcgcaaagctgtggaaccggagagagtttgtagtgctgcatcgtcaacacgaacaaccaaaccagcaaggtttgcaggacttctttgctgaactcctcacactggcggctaacactccgttgtaccgctggcagacctgacatacacatttctcttcactttccgtttgcgcagaggccttccggcaccaccaccaccttcccggactgggaaggagaggaaggccgccgtgaagctgtcgtcgaggttccaaacagcagccgcttgagctcgtgcagaactagggcgctccaactgttgttttgtcgtctgtctgctccaaccgcgagttctgtatttacg

SEQ ID NO: 3897 - DNA, 588 bp, Zea mays
  misc_feature (52)..(52): n is a, c, g, or t
  misc_feature (54)..(55): n is a, c, g, or t
  misc_feature (64)..(65): n is a, c, g, or t
  misc_feature (80)..(86): n is a, c, g, or t
  misc_feature (98)..(98): n is a, c, g, or t
  misc_feature (102)..(102): n is a, c, g, or t
  misc_feature (124)..(124): n is a, c, g, or t
  misc_feature (135)..(135): n is a, c, g, or t
  misc_feature (140)..(141): n is a, c, g, or t
  misc_feature (143)..(143): n is a, c, g, or t
  misc_feature (149)..(149): n is a, c, g, or t
  misc_feature (159)..(160): n is a, c, g, or t
  misc_feature (276)..(276): n is a, c, g, or t
  misc_feature (280)..(280): n is a, c, g, or t
  misc_feature (285)..(285): n is a, c, g, or t
  misc_feature (302)..(302): n is a, c, g, or t
  misc_feature (321)..(321): n is a, c, g, or t
  misc_feature (327)..(327): n is a, c, g, or t
  misc_feature (339)..(339): n is a, c, g, or t
  misc_feature (341)..(361): n is a, c, g, or t
  misc_feature (381)..(381): n is a, c, g, or t
  misc_feature (389)..(389): n is a, c, g, or t
  misc_feature (392)..(392): n is a, c, g, or t
  misc_feature (409)..(410): n is a, c, g, or t
  misc_feature (421)..(421): n is a, c, g, or t
  misc_feature (442)..(444): n is a, c, g, or t
  misc_feature (463)..(465): n is a, c, g, or t
  misc_feature (472)..(472): n is a, c, g, or t
  misc_feature (488)..(490): n is a, c, g, or t
  misc_feature (516)..(516): n is a, c, g, or t
  misc_feature (519)..(519): n is a, c, g, or t
  misc_feature (528)..(528): n is a, c, g, or t
  misc_feature (533)..(533): n is a, c, g, or t
  misc_feature (535)..(538): n is a, c, g, or t
  misc_feature (548)..(548): n is a, c, g, or t
aatacaatgcagcaaatggacaaacacacccatggcaagggacgagacaagncnncgacctgcnncaagaaacaggtgannnnnnntgctgccaaatncttncctactcgaattcaagtacgantgctcatgctnacctnngngctttnaccatctatnngttcagaagaaacaaagcgcccagattgctgtaacggctcagcagctcggtgagcccaccaggccggccttcaacaacggcatccagcgcaaagctgtggaaccggagagagtttntagngctgnatcgtcaacacgaacanccaaaccagcaaggtttgnaggacntctttgctgaantnnnnnnnnnnnnnnnnnnnnntccgttgtaccgctggcagncctgacanacncatttctcttcactttnngtttgcgcagnggccttccggcaccaccaccnnnttcccggactgggaaggannngaaggcngccgtgaagctgtcgnnnaggttccaaacagcagccgcttgagntcntgcagaacnagggngnnnnaactgttgtnttgtcgtctgtctgctccaaccgcgagttctgtatttacg

SEQ ID NO: 3898 - DNA, 404 bp, Zea mays
ttataggtggcgacacacttcgtccttcccgggccaccagccggctcagctcagatcagatcgagagagatcaaatatcttcgaccatggccgctgctctggccgaatcaaacgccggggatgatagtggctcctccggccgccggccggcgcgcgcggcgctgatataagcgagagctcgaagccgcacgcccgaattcgtccggctagctcagcccggagagcgagggagggctggggctcgatcgttatcagggggatggaataatggtgatgtggatcgacgaccggacggcgctggatcggtgctgcggtgtgagccctagaaagctgtagtgttagctggagaagggaagggaagatgagatgagagggagcaaagcaaagagaagaaaggaaaggga

SEQ ID NO: 3899 - DNA, 586 bp, Zea mays
ggtggtcgtactggacacttaagaatgacatgatccattgggacttcgagtggaatattaagaataagtacctattattcagtaagtacactggccatgctaaaccatgcctgtatttcgtctattacgtcattgatcttacaactcggaagccaaaagccatgactattgttaaattgtgttttctggtactaccctgtcataacaagtaactgatgattccatgtatgcataaaggagatattgtaaaataatcttttttttaattctgtggacatttttggacagatactgagcctgttttggatctcacaaattctcaccataatatgcatcttctgtctaggtggttcatccatgttgaagacaccaagcttcctgctggtgctagcgttaggatggggaattcacctgatcgtcatgccaagataacctggattctaggaactaagctgattggaagtgtggatgtacacatagactactcaaatccgaattatagttgaggcaaaattggtgcatatatctttcttatataaagtcatgtagttgctcttaggtttctccagtttttttatgaaaaaaa

SEQ ID NO: 3900 - DNA, 388 bp, Zea mays
ttgcttatatatatagcatgaactcgtgcatcccattcccagcaactaagcctaaccatctgctccaccacttctgttccttgtataccttagtcaacaatgcacacacttgccatagcagctctgcacctgttgcagcttctagcaacaataccaacactatcctcacaagacacagaggcaattctcggttgcacctccagatgccacaacataagcataccttaccccttcggtatcggcgatgagcgatgctacttacatgaggggttcaagctcgcgtgcaagacggaagaacagcctccggtgctgtacatgaacagcgctggatatcgagttgtgagcattaagctgaaccctagggtcgtgtacctcgacactcgtttcc

SEQ ID NO: 3901 - DNA, 399 bp, Zea mays
ggagtgaaggcaacgactactcctacgcctactacaccggctgcatgtgcttctgcaacaactctgcgagcgccgtggacggcgtctgctccggcgtcgggtgctgccatgtcgacttcccgtccggcctcaccaacaacaacatgaacttcagatcgtacacccataagaataggctggacttcagcccttgcgactacgccttcttcgtagacaagaactacacctttcacaccacagacctcaagatggatcgcaacaggacgatgccggtgtggctggactgggccatcagggacaaccagacccagacgtgcgaggaggccaagaaggggcaggggcacaactatgcctgcgtcagctccaacagtgactgttacaactctaccaatggacctg

SEQ ID NO: 3902 - DNA, 470 bp, Zea mays
ctgtaattctattaaacaaggttttccctctgtcttcaaattggatttgctaactgtttatttctgtacaatgaagatcgtgaggtgacgcaatcaacagtaaagaggaaggcaccaacaagtcaacctgcacgcttgtcaaatggatatggacctaagaacacaatgtcaactcaaaggcatgctgaaggtaaggtaaattccatgagaagggaggatttctcgaatacagaaagagttgtttcacgtgacaatgagaggatgtatgaaagggttgtttcacgtgataatgagaggatgcatagtattgcaagaaatggatccaaccaggcaagtactagcaaaaccacaatccaaaagcatccaagcaggggtcccattgttaataagcaaccttccaaggattcgaatgatgcaactctgaggaagagcagtgtagcctcaaagcaccatcccttagagattgacag

SEQ ID NO: 3903 - DNA, 352 bp, Zea mays
gaggcccagagggtcctctcggagatggtcgccgacggcatggccccctgcgccgtgacctaccacacgctcgtcgggggttactccagcctggagatgttcagcgaggccagggaggtcatcggctacatggtccagcacggcctcaagcctatggagctgacctacaggagagtcgtcgagagctactgcagagcgaagcggttcgaggaggctcgcggcttcctgtccgaggtctcggagaccgacctggattttgacaagaaggcgctcgaagcctatatagaggatgcgcagtttggaaggtagagagagggagagtggctgtgctaagaggtgggcttaggtacag

SEQ ID NO: 3904 - DNA, 800 bp, Zea mays
  misc_feature (65)..(65): n is a, c, g, or t
gaacaaaggaagttgtagaatgaacaaaaagaatcaggtgcccaatctcacgctggcggtgttgnagactgttgttttgcagtctgggagaatacttatggaccagggaggtagatcataatgcattccattgaatgataccctagcataagatactttatccttgttctcaaggaaggccacacaggcatcggtgcttgatctaaaaacagatgcctaaagaggaaattaccaagtcagtcatgtataaaacattattgtgttcaagagcagaagagtgaactttaatgctgtactaattaacaacctgctgagcattgccaagtgaagttacaattgggtctcctgcaaccaatgctggttcacaaagcttgatagctttatgcaactccttcaagtgaccccatttcggttctctcagcaaacctgaggaagtgaaggggaggaactcagtcaacttgatcaacataagggattatttaattatgaaaggattgaaatataaccagttcccattacgtaccaaatgccccaatgtattccgtcaaagtaatgaaattgtgctagatgcatttgcttttgattgcaaaaacatttttttttcatgaacatgccttggcatgtgtttcatttagaatagaattagcgcaggttacaaaccaccaaaacagtggtagacaacccaaagtaacctagaacactaagaaaaagttggggagggggtcatcaaccaagacgcccaaaaaatatgctaagcatgtgaaaaaaaaataaaaagacatgaagaatccaaccggaga

SEQ ID NO: 3905 - DNA, 991 bp, Zea mays
tcgtcatcgatcgtcgctcagctagtatatatgacgagcaggacgacaggcggcgcatggtcgatggaggcggtgacgctgccggcgagcatggtgctggtgcaggtcttcaccatggtcgccgtgctcctctccaagctggcgctgaacgtggggatggagcccttcgtcctcctcgcctaccgcaacctcatcggcgccatcatcgtcgctcccttggccttctactttgacaggtatatataatgcctccgctgatcaacccgtgcatggggattgtttaattggtttggaaaatcacgaatccattccacaaatttggtgaaatgaaattattactagttatatttagtttatgaggaatgaaatgctgatgaaagtcgatggatcgtggacgaccgacacaagcaaagcaaggggtcacgtagtgtttgcttgctttccagctgctgctgtcgtccttcctttgcctgcctgccttgtcttgacaagtcaagcatgcagagattgcaaaagaaatgcttgcttagaagaacacgcatgcatcatctatgcttgcttgcttgctagagactgctcgcgagtgccgtgtagctagcgtcatcgatcgatcagttagttagctaggcagctagtagttccttgctgggattagcacgacaagtgttagacagacatgagaggacatgtcttctttgctccaaataaatgcatgttgttaatatctcattattatatctcaggtgtcgtgttctgttacatgcagacaccaacactttcacctgcaatgcatgcttttgcttccaaactcctccctagctatgcatgtgtcttgtttatttgcatggtatatatataatatatggctctgttaattaatttcacatatacaacaaatggattaatgcatgcacgcatgcacatgcacgtacgtgcagggcgatggtgcgaaaggtgaccctcaaggcctttgggtggatgtccatcagcg

SEQ ID NO: 3906 - DNA, 410 bp, Zea mays
acaacccgcttcttcatgccttctgcaaacaaaagaagatacataaagcaatggaatttgtggaactaatggtgtccaggggttgttacccagacatcgtttcatacaacactctacttacagcactctgccgcaatggggaagttgatgttgctattgaattgcttcatcaactcaaggacaaaggctgtagcccggtcttgattagttataacacggtcattgatggccttactaaggctggcaaaacaaaggaagcgttagaactgttggatgagatgaccagtaaagggctccaaccagatatcattacttattcgacaatagcttctggtctttgtagagaagacaggattgaggaggcggttagaacattttgtaaagtgcaagatatgggtataaggcccact

SEQ ID NO: 3907 - DNA, 327 bp, Zea mays
  misc_feature (250)..(251): n is a, c, g, or t
  misc_feature (314)..(324): n is a, c, g, or t
tccatgcagtgaggcaggaacccggggagactctccgggctttcatctcccgcttcaccaaggtacgagggactatacctcgcgtctccgatgcttccatcatcactgctttccgacagggggtgcgtgatgagaagatgttggagaagttggccacgcatgacgtggaaactgtcaccacgctcttcgctctggccgacaaatgtgccagagctgccgagggccgtgcatggcactcggcaccatagannggagttacccagatgggtggctcaggtgccgtcacccagggcggcaacaacaacaacaagaannnnnnnnnnnact

SEQ ID NO: 3908 - DNA, 296 bp, Zea mays
agatgaatttcctaaaacgctagcgtttcatacccccgagggtgtctaacagaaacgctagcagattgaatgaaagtatacagtcaccacaacaatgacacgatggcaaggtctagccaccagtgtcacaaatattggtgactattatcaccaaacacaagctgaggactctctttcaatccctgctacatactgaaagacggatacaaaaagtgaaaaaaaaactaagagttggaatgaagctcaagagggattttcagccctactgcctggccaaccacggataaccatgccgg

SEQ ID NO: 3909 - DNA, 423 bp, Zea mays
  misc_feature (318)..(318): n is a, c, g, or t
  misc_feature (345)..(345): n is a, c, g, or t
  misc_feature (374)..(374): n is a, c, g, or t
  misc_feature (409)..(409): n is a, c, g, or t
ctactcgtgtccttggaaccttcggatatcatgctccagagtaattatttgacatacatatgcacttcgctcatactttgcataatgtatctaggattatgcccccacataattatcatttatttaattttatcctcatcacaatgaaacatgctaataatcttttcactattttgcacgagatgaatgttttggaattttatctttgttcctcatctgatcagtgacataagagatctattatacatttcaggtatgctatgactggccaactgactcaaaaaagtgatgtatatagttttggggttgtccttttanagcttcttactggaaggaaacctgtanatcatacaatgccaaggggccagcagagncttgttacttgggtatgatttaaaattttcatacnaccattctcaatga

SEQ ID NO: 3910 - DNA, 378 bp, Zea mays
gtgaagtttaacataacagatgtgaaactgttatttgaataatccaagacttgttcataattgctttccattgtcaacatgttcggaatcgggatttgaccctggattctgttggaactcaaatcaagaaattccaaatgactattagggagaatatatgaagtgagctgcaaatttgtgaatgcgttgtttgaaagattcaaattcctaaggctatggtcccatgtgtgccatatccaatttggaatagtcccaaatatcttgttgcaagaaaggtccaatatagtgatatgatcaaggtgtaccaagaaactaggaatttcagttaagccacatgatttcagatctaattcagtgagctttggtaataaccggaat

SEQ ID NO: 3911 - DNA, 379 bp, Zea mays
acgtcatccggcggtcggggaagaaggccctcatcatcgcggtggcggggatggcgctgccgttctgcatcggcaccgccacgtccttcatcttccggcaccaggtgtccaagaacgtgcaccaggcctccttcctcctcttcctgggcgtcgcgctctccgtgaccgcgttcccggtgctggcccgcatcctcgccgagatcaagctgctcaactccgacctcggccgcatcgccatgtccgccgccatcgtcaacgacatgtgcgcgtggatcctgctcgcgctcgccatcgccatctccgaggtcaacagctccgccttctcctccctgtgggtgctcctctccggggtcctcttcgtgctcgcctgcttctacgt

SEQ ID NO: 3912 - DNA, 359 bp, Zea mays
tgagcgacgcgtagaggctggcctctcgtgcggttgcttcagttccagcattgccacaaagcaggaggttcaaaactccggtatccggcaaggggcgtatggtgcggcgatagactctgtctacacgagggatgccttccatggcaaaacatttcttgactacatctcagcactaggaaagaagccactagccggtgctgatcttcttgacctagccaccgccaaagcacagttgagggcattcaatcgttcaaggggttcaagggaccttcctgagtttgtgatgtttgagggcattgcggagattacagagatgacacacacaaagggagaaaggatgcacaagagtgaggatgatg

SEQ ID NO: 3913 - DNA, 402 bp, Zea mays
gctccggcaggactcgctgtaccgcgacgcgacgaggccagcccacggcgcccaccaccacggagggcaggagagctgggtgcggacgctgcggctggcgttccagtgcgtggggatcatgtacgccgacctcggcacgtcgccgctctacgtgtacgccaacaccttcaagtacggcgtccaccacgaggacgacgtcctcggcgtcctgtccatcatcatctacagcttcgccctcttcaccatggtcaagatcgtcttcatcgcgctctacgccaacgacgagggtgacggtgcgcgcgacgacactgacctactagcaagctactagctactgcattcaccatgcatgcgtgatcttagcttgttgtcaagagactgacgacgacgcgggtattggtt

SEQ ID NO: 3914 - DNA, 389 bp, Zea mays
tcggatgcgtcttggcttggggaaagaggaaaggatgttggccacgggattcttgacggacgggcggattcgatgtggatgcgcgcgtccaccggcctgcattttttttgcattttgaccctttctcggaaaaaaatcacgtttagaccctaaaaaattttaatgtcatttttgtaccctttgctcggcgccataggctatggcgccgaggtaacacagctcggcgccataagctatgacgccgaggtacgtgctgcgctggcataactcggacgtcgtggcgccgacttggcaccaagctcggcgccatagattttggcgccgagctcaattataaccacaaaactcgtctagcttagttgatagatagtaagactcataacctgggg

SEQ ID NO: 3915 - DNA, 409 bp, Zea mays
tgtggaggcacagactcaggtgtccgacgaggtcaaggagttgtccgaggagctgatggcctacgagaactacatgaacttcctcggcatcccttacatggagggagggactacagctgcaagtgccaccacagctgccgcctccgccgccgccgccgccgccgtcgccgaagaatcgcaggtcccggctccggccgggctgtggagcttcgaagattactactacccgccgtctctgtcgctctttactgaatgatgaacgtgctttgaccgtgcctgttttggtaacacctttgtgaacagatttcctgctcgtcgtagtcggtgtgatgtgatggcatcaatcgagctcctgtcctgtaattttgttgaacccatccattgtttcgtgactactgtgtgtccctgt

SEQ ID NO: 3916 - DNA, 340 bp, Zea mays
gttcgatccggatgtttgtgcattgcgacgaacgcaaagccagcttacataaagtctttaccaaaatccaatatacacaggtaaaaaaaagcctgaaaagaaaaataagttctactgcttgcacacttcctcggccccacatggaagaaaagatttttcagcctttctctagtgccatcaatgctcgctcacggttcacacactcgtccaccagaccaccacgttgcgacttgcgagcctgtgcagctgcgtttgcgcatctggtttcttctgggtcatctatatacttctctcctagcaggaacaggaacagcaagccactcgctcctgccggcgagac

SEQ ID NO: 3917 - DNA, 340 bp, Zea mays
  misc_feature (90)..(90): n is a, c, g, or t
  misc_feature (97)..(97): n is a, c, g, or t
  misc_feature (143)..(143): n is a, c, g, or t
  misc_feature (152)..(152): n is a, c, g, or t
  misc_feature (214)..(221): n is a, c, g, or t
gttcgatccggatgtttgtgcattgcgacgaacgcaaagccagcttacataaagtctttaccaaaatccaatatacacaggtaaaaaaangcctganaagaaaaataagttctactgcttgcacacttcctcggccccacatngaagaaaanatttttcagcctttctctagtgccatcaatgctcgctcacggttcacacactcgtccaccannnnnnnncgttgcgacttgcgagcctgtgcagctgcgtttgcgcatctggtttcttctgggtcatctatatacttctctcctagcaggaacaggaacagcaagccactcgctcctgccggcgagac

SEQ ID NO: 3918 - DNA, 372 bp, Zea mays
tttgcgttttttggaacctcgtgtaacacgtttcacctttgatgtgttctccttgtcttcataatccaatggtgttgcaacatcaactatatccacatatttcacaggtgctgccatgtctgcacctagacacataggactatttccaacaatgtcatgtgaagaacaagaatccttgggggccataacaggcagctgatccaaattttcctcaataaccggagtagtacttgcttcaataatttctgttgtatcagttggtttattatcagcgtcaacagataatacttcctcttttcgtcgaacagatttcccaggaacctgttttggttttagaccaattttcctttttatggttgatgttggtgactt

SEQ ID NO: 3919 - DNA, 821 bp, Zea mays
ggttttatgtcatagacatgaactactttcctggtatgcaatctgacattcttgagcttgcacaagctatcttttgtttcggtaaagctgacccctacatgtacattttagaattattgatcaaagaatctcctgtttaatcctgttctactatagctaagtctttaaattaattcgcagtgcattgctgacactaatatgaaataccaaattggagagacactgcgaatagaggtagtttatctcccgtgtcatcatgactaatgatgatatcaggtatactgcttgatggatgtactgaacgaacgagatgcctgtgctgtgacacttgttccactctgtcggttttattgtttttaaaaacagtttgggagtccaaagagtggctagaacctggcacgccgaagttatcccagctcagcctgtattcttgtgggtagattctttgatttgacaatgctattagccataaacccataacttctcggcccccttttctacttatgctgccttttttcctgaccaaacttttgttggtcgcagggtacggcaaaatgcctggatacgagcacgtgttcaccgacttcctgctgagccttgccaagaaagagtacaagagacgacaaagctatagctcgctaagctcaggcgaatggtgataagcgaggagactactcggcggggcatgtatatgtctatcatccacgatgcgtgcgtacagatgtacttgtgcatgacgagagataatgggtcgtagaagcggagggctgttgtcaggctataactaactgttgctttacatgtgctaactgttgatgctt

SEQ ID NO: 3920 - DNA, 427 bp, Zea mays
  misc_feature (414)..(414): n is a, c, g, or t
ggacctcgccttcagggaggaaatgtttgaaaggcgggataagttgctggccgagcatgagctcgaggcggaggagaaggagaaaaagctggaagagcggatccggcagttccaggcggcgcaggctacaccgggcccccaggcggtggaggcgacgaagaaagcacttgaagatctccaggcggagcatcgcgccggggtccagcgcatcgctgcatgggccggcgaggcgagcacgacgctggtgccgctagggatgagtcccatcctggtgttagagctaccgacgtccatctccgacgtgctcccggtgttggactctaccgcggaccgcctccgacgcctagaccagattcttggtgcccgcctagaggctgaaggcggcaggctctgccaggcggtgatcgagtacancctgacgtgcttc

SEQ ID NO: 3921 - DNA, 364 bp, Zea mays
cctgctgctctagcactgactcggagcagaataatttcaaagccatcgtgttcgagttcatgccgaaccagagccttgacaagtggctacatgaccttgatcctgattcagatgcgtccggacgtgtaccaggcctgacgctactgcagagattgaacattgctgtcaatgtcgccgacgctatggactatttgcataacaactgcgagcccccaatagtccactgcgacctgaagccgggcaacgttcttcttaacgcggactttgttgcctgtgttggagacttcggcattgcaaagattctttcagattcagatggtgatcctgtgaccaattcgagtaccttcaccggaataagaggaac

SEQ ID NO: 3922 - DNA, 1171 bp, Zea mays
cagaatctcaggccttccacgatactgattctggaaatacagcgagaaaaaatgtcatataggcaaacaagtatttgtgagcccaatgaggaattatcaaatcaaaattcaaaataaatgttctttcagtagaaaagcatcagttatttggattatttggatgcccacaaacagaagcattgaacacaggaacattaacaattcacacaaaaccaagaacgaattcagaataaccttacacatgtttgatcaactccagtaaaaaaatgatattttgaacaaagttgacttgaaaactaaattgatacctcctttctttttatattgcttccatttatcacaaaaacctgcatgcactgactattctatcatatgtctccagtgtactggaattggggtagcttggtaattcttcttccctcattcacttgatttcataccattaactattgttcccgttcctactaatacaccctataattttaaccgagggagaaatattccagaacatcacttaaaattggctggatggagcatttgctattaataaatcagattaaatgaggaaggacagttggactatataaaaaggacagacccagtactggcagctcccatgagtggaatctggggaagaaataaccgaggtaaaccttacccccgcatttttttagagaggctgggtcaaacacaggaccttgggctcaccgggaaggcatctcaccaatacgccaggcagttgaactatataataaaataaattaactgaagagatacatacagtttcactttgattttgaaatgcagcagcagcttgaggtctccattgaaccccagaaacaactggaggagaaaatactcttccaccaagaatagggttttcatttgtgttagcagaatcagagccgattgcatcattagtcctgggaacctgctggggttgaactttactaccaagaggcataaccaactgctgagaaagaccaccactgttaatcttctcgtcagtgttcaatatatttattttggacaagtcatttattgcaggaagtgcactaaccgatacatttcctgagactggaccaatagttatgggagctgtacctaatgcctgactagttgttcctcgagttatgcccctgccaattccaatttcagtaatagcaggaga

SEQ ID NO: 3923 - DNA, 375 bp, Zea mays
gtttctcaacttcttccgagctctttcaggtggaatcttccattgagctgggtactgcagaagtgaaccctgtaccatctgaaaagttatctgctaactcacaagctgttagagatgatgctggagcagttgaaggtattgacatgaatggaaaacctgtccaaaaacctaagaggaaaaaacataggccaaaggtcattaaagaaggacaatcagcaaagttgcagaagcctaaaactccaaagcctcccaaagaaaatgggaatcagcctactggaaagagaaagtatgtcaggaagaagggactaagcacaccagccaaacaaattccatcagaaggtgctgatacacacactagagctaaaccaggaatag

SEQ ID NO: 3924 - DNA, 490 bp, Zea mays
ttcaattagcttctgagccttcgcaacatatctttccaaagtggttagtagttttttccaattcttgttcattacaaactcatcacaataacgtatcatagcttcattgtcctaaataagggaacaattggataaataagaatcaagacaattggagcgagggtggtctatgtcttagtgtagctaaaactcaagagtttcgaatgtgtggacttatcatgagctgaaatattagcatttcacgtttatctataagtaagcatatcattttttatttattagagaatcagccaagaagatatagcttcaaataaacagtaatcttggtcaaagaagtttagtgtaggatcacaatatgagaacaaagcagtagacacacctttgcagaaaaacttcgagaaaaaagatccttgaactccatataaagaggaaaacatatcgatcgagcatctgtaggcttaaatcccccaaggagatcagaaatgtcact

SEQ ID NO: 3925 - DNA, 424 bp, Zea mays
tgccgtgtcctgaactatcgttggcctctgccttatcacttccagcagcttgtagccggcaatcttccctttgctgaacgctccaaggttcgaaaacgactgccccaggctcctgcgatcaacgagttggtttacattggttcatgctgcgaaagcagaaaaggcagtttttttttgggtactgacaggccaccgacgattgctgagaaaatcgcagtgaaggccttcccaccgtctgtctggccgttccgtatgaacacgccggcgtaccagaacaccagcgcccatgacatacaggcgattccataggtgcagccgatgccaagccccttggccatcccggccttgtaacccagcttcagggtgttctgaatcgcctccgagtaggaattcagggccttggtctcacccacataggagtaga

SEQ ID NO: 3926 - DNA, 581 bp, Zea mays
atcctcgtgatgccattcgtgggggtcacttccacgacgctctcgacaccttgctgcgtcgggccttcgaccgacacacttggtctatcgagtaccgttgtgtagtctaccaacaccgtcgtgagttatacccggaccagtgtgaggctacttgcttggtgcgccgtttggacgatgatctccgaggtgcagaggccttctcaaagcactattctattattgagagggatactaccgaggcagccatgcaagttgcagcacgacggacactttctcagtattgctcgttgttcagcggggtagctgatggccttgacctgaagtactaccctcgtcgttcgaccgacaatggtggaggtgtgattgtcttgcctattggtgagggcaatcccaggctgaacaatatggtcaacctggtcaccgtgctcaacacagagttggaccacacccttgacgagttgggcaaggttcgggcggaggttgcggaattgcatgctgaatgcgcggcacaccactatcttgaaggtggttctcccgcccctatcgggattcagcacccttaccgttcaccgccccgtggt

SEQ ID NO: 3927 - DNA, 850 bp, Zea mays
aataacaaaagcaaatgaagagtccttaacgaggaaagatatcatggagagagtggataaatggctatcagcttgtgatgaagagacttggcttgaggaatataaccaagtaggattcttttctttgttaaaagattatatttcaaatatggtttcagccttttcctttattgccatgttagtattgagcattcatattgcctaacagcatataatgtgcttgtcggctataatttatattgttaatgacatattaaatgtttacttggatccttctgcaggatgataataggtatagtgctggcaggggtgcccacttgaatcttaagcgtgcagagaaggcaaggataactgtccaaaagattccaagtgagtcttcatttccccagacgctaacaatatcaacttcagttgagcatgctggtgctacttagtcagtgccaatgcgatccaaatctagcaaattgacgtataacattattggtgccaattagctgatgcacttctaactcaacctgcttgccttttgcgatataaacttttttttgcagctatgattgacagcttgatagccaaaacttttgcatgggaggatgaaagaaatgtgccatttttatatgatggggtaagtcgcagagcgaattggccatattaatcacaaatcaggctgaatatttctgttctatatataacgaggaatattgaatttgcatgtgaaggttcgtttggttgccattttggaagagcaaaaactcagaagggcacaaagggaggaagagaagagacgcagccgggtatagattaatacccatacttttttttgggtactgcagcctcaagaaaagagctc

SEQ ID NO: 3928 - DNA, 357 bp, Zea mays
  misc_feature (351)..(351): n is a, c, g, or t
gagcctgcggcagctgacatgcccgatgaccacagacgtagctggggagggagcctcggcaggtcatgaagggaagaaaaacaaggacaaggccgagtagaggagctggccatggcgcgactgccaggacaagcgcagaggaaactccgaccggccgccggaaagaagaggccgccggggcgaagctccatggtcaggagctgggggcgaactcgagcaggcaggggagagcgagcgcagcagcgagcgagtaccagggcacgcagagaagggaccagggagagggagagctcggctgggactagcatggaggcggggacgccatggagcccggggcacagacgaaatccnagcagg

SEQ ID NO: 3929 - DNA, 331 bp, Zea mays
  misc_feature (222)..(222): n is a, c, g, or t
gcattgcacacgtggatgcatatatggtagagccattggcagagaacaatgttttctctgaaacaaggtatgaaatggaggctccacaaaatggagctgaaactgctgttgttgatctttacagagatgcagaagagcaaccattgacagagaataatgattgctccgaagcagagaatgagatgaacaagagtgagtttgaaactggtgttggcaatcttnatagagatgaacaagagcaactattggcagagaataataatggctctgaagtaaggtatgacatggaggctccacaaagtgaggttgaaactggtgttggcagtcttaa

SEQ ID NO: 3930 - DNA, 350 bp, Zea mays
agtcgccaaaactgctgcagcataaataaaataaccaaaacatcatttaatctagtgtgatctctgttacgtaaagtacagcaattaaacagaccaacaagcaaaccatgcgatggcgcttctggtgctgctgatgacttccgtcattcacatcgcatgccataatgtgacatgatactcttctcactgtcaaattgctggacctttgcgaccagactataaatgctataagttaccacttgctaacatgtgtgtactttgggagtgtattcgtgaatctgtcgtactcctttggccctttcctccgtttgctgcttcccgcttcccgcttggatgatctatcctttctg

SEQ ID NO: 3931 - DNA, 238 bp, Zea mays
cacgacctcaagattgactaataaggtcttctggttaatttttttttggctgattcgttattaggttgttgtatacgaggtgttcttggatttgtgccctatgcagcattgcaccatctatcattagtcagacattcatcagagtacataagagagtagtcactggacggtggaactgtggtccaaaagttgtttacttcagaatgtttttttcccattgtgagatattctttcagtc

SEQ ID NO: 3932 - DNA, 362 bp, Zea mays
cagaaacctaaaatgattcaccagttaaaagacatggattgagaggaatgatataatataagagtagagttatgcattcacttatatcatgctgctctacaacaacctgtcacatcatttattcaagcgtagaacaccttatcaagcgtggctttatgaccagcagcatttatacaccatactactacaaatacactgatatggttggcatgcaaagtattatgtagaaactgataaaacattatcttatatcgtagaggcataagtgactactcgtatataccatagactcactagaacatattcttgaaatagaccatatcggtgggaagccttcaaggtgaatcccatgctgttacttg

SEQ ID NO: 3933 - DNA, 741 bp, Zea mays
  misc_feature (734)..(738): n is a, c, g, or t
cctgcatgatccgtaagaaagccaacaaccaacagaggctggctgctcttgcatgacatggcatggcatggcatggcattgcattgcattgcattgcattgcattgcattgcattgcatctgaatcaatgaatgcatatatatgcagcttgccctctgggtgcctactgtccacggtccagcctgaatacctccacaggcatctgtgacccgtaagtccactccactccgctccagccatatccgccggcccgcccaatgatatatgcatcgccattgcagctacaactaccagccgccgcccgggaaccctaaccacacctgcggagccgccgacatctgggccgatgtggtcacgacagatgacatcttctgccccgctggattctactgccccagcactatacagaagctcccttgtagtagtgggtaatcctgtctacctaatgtcgtttccctgcatatcttcttctttcttcttcttcttcttcacggtgatcgttcattcgtcttttggtttgcaggtattattgcaggaagggatcaacctcacagactagtaagcctgccctgcccagccttgttcattcacagtagtctctagctagtaaaaacctttctgaatactgcacgcgcaggatgctacaagaagagctcttgcccaccaaactctgctactcaggacatcacaatcttcggcgcgctgcttgtggtcgcgtcctgcttagtcctctnnnnnatc

SEQ ID NO: 3934 - DNA, 436 bp, Zea mays
attgctagctagtgaaatcctcactctagcatatcgtcgagtgaatcatatctgctattggtgagattaggctttgctcgtttcgcagctcgagagaaggccatggtaatcgatctagagttcataagagctattgtaactgcggacgaagtcctgctgctggaacctcttgctcaggaggttatccctttcatcgataaattgaggcggcattttccattgaagagcctggaggttgatgttggggccacacaagtgggtaatgtgaatggcaagcatgctaaaactgctgcagagtgtgagctccccctcccctttgagtttcaggtgttggagctcgccctagaagctgtatgcttgtcatttcattcaagcctatctgatctgaataggcacaccatctttgtgatggatgagttgactaagaatgtgagca

SEQ ID NO: 3935 - DNA, 392 bp, Zea mays
gcggcggcacggctggcctcgactacaccgcgtcatccaacctcctccacaacgctcagcaagaggtgctttacgcactctacaagaacaaacacgaagaagctgacatcgtacattccgacaacgaggtcgtccgccaccacggtggtggaggccacggccccaacaaggatgatcacggccggcaacagcatcaggtccttaactatttttattgcaacaacgcaaccgcaagcgacgatgtcaacctcgacaacatgcaacagttccattttaacgatagctgtgccgccgccgacaaagtggatctgactcctccggcgggggctgacgaaatgagacatcatcatcagcacctcgacgagaactgccagattgaccacaaggattat

SEQ ID NO: 3936 - DNA, 401 bp, Zea mays
ggagctgaggcagaggcaggcccagatggaggtggccgtgtctagcctcagcgtgcagttcagcaagggtctggccgtctactccaggctcagcaagggcaaggaggtggccgtcgtcgtcggagaagaggacagtgcccgcgtccgcagcgaccggtgggacgagagccgggccgaggagtgggtggcgagcctcgagtacctgccgagcctgtcggaggcgctggcaatcaagatggtcgaggatgacctgggccacgacagcaaggcgaagaagaagaagaagagcaagaacaaggcggccggtgccagcaggaccaagaaacacaagagcgggatctcactgcaattggtcgggggcatgttgtgcaccaagaaagccaagtccaggtgatggtctc

SEQ ID NO: 3937 - DNA, 507 bp, Zea mays
attcgtgtgtgtaagggagtgggtgacatcatgggcgcgatccctgtgttgccgatcaccattgagctatgcattcgacaaccggcgtcaacaattggtaccgaggctcagtgtatattctacgacagtttcgtgagcccacatcggacgtagtgacaagaaggatcctgtcgtcaaggtgatgtccaagggaacgccaagacggaaggtaagatgctgaaattatggtatctatggtcactagaagcaagaatgtaagtggcaacatgctgaaattatggtatctatggtcacatgcaggcggagctagaacatctggtgctcatgttgtccacaattaatgccatgcacatcgagacgaggtcgctcgacgtcatgacatccagggtgtgcatggctgatcaagttatgcatcttaatgagaagaagatgttccctactgatcacgacaaaggcaacaatgtatgggtccttgacacaggggctagcaatcacatgaaagggtgt

SEQ ID NO: 3938 - DNA, 393 bp, Zea mays
gatgcgcagctccaagaattgctacttggaattgaatctgaaagtggtagctttccatgtacggccaatggccctcagacagcagctatacagatggttgcaccgctccaggaatttgttgatctatcttctccatcaccacctatacgatcttgtaagattgccaggtccagaaagttgagtgattcagacacagtaacaatggatgggattcatctgcagcaccaaagtctgcagattggatcgatggagtcaaattcggcactgggtcttgagccaattgatctgtcatcaccctcgccttgtgctgctcataaaccccaggctgctccagaagcaccaccactgtgtatggaggcagaaagaagagccctttgggatataagcaatttg

SEQ ID NO: 3939 - DNA, 518 bp, Zea mays
atctacctgcagagcattagagtgattgactcaccaccatataatatattaaactaaatgaactctaggaaggaagcgcaaagagctgtgaacagccaaagaaaactaaatccttaccctttctagctgcagcttgttaggatgttccggaaatttttttgacatcgtgatgcaaattttggggaaatttggaaagacgccagctttccaaaatgcatccgagaatgtgtgcgtgtttggatctggatagtccaggatgctgttcagccggtacattttggccagcaagccttccgcaaccttggacagctgaaccaccggctccatctgaagatgtttgtggctaccagcagaagagccttgcggcgcatcagcgctcatgttcctccaggttgccattgcggaaggaattggctcttcaacacttaggtattcagaccaccgggacatgccgctgtccacatctttgcttttgaacgaaacatgggccatctcttccttgagtagagaacagctgc

SEQ ID NO: 3940 - DNA, 406 bp, Zea mays
aggggtgctcacctccgaccaggcgctctacagggacggccgcaccaggtggctcgtcgaccgctgcgcctccagccaggacgaattcttcaagcgcttcgtggaatccatgctcaagctcagcaggctcaggggggccgatccgggcccagtgcgcaacaactgcttcgtccgcgccagctttggcgctagtagcgctaccaaagacgaccttgtcattgacaccaccgccggagacggagacggagacggagacgaggaccttattcttgcagcagctgcatgatcgctgctgctacagtgtacttacatccgatccggccgctatcatatcgtcgtcgtcgtcgaataattaagcagatcaacatgtttgtttatttgcttattagtttctattccgcagtcc

SEQ ID NO: 3941 - DNA, 258 bp, Zea mays
ggttcctgccaggatgaacggcttggctcgagagatgtacaccggctcgctctcgcccgacaggctggactcgtcgatcaggagggagtatccgtggacgtagagcccgtcagcgggcacctggtctccgatcgacaggtgcacgacgtcaccgaccaccaggtcgtatattgacacctgctgccggcacccgtccctggtcacatgcacagacaccttcttcttctcgttgtccagctccttgaactggagcgactg

SEQ ID NO: 3942 - DNA, 300 bp, Zea mays
  misc_feature (254)..(254): n is a, c, g, or t
ctcgcacttgatggctttgctgggccatgtgcggggtgcctcgataccgctgcattggatttgaaaaatcaccttctctgtcctctgcggtggccccgaggaggcgcggtactggcgcaagcgacggttcgacttctctgcacccaggaaccggcacccaatgagggtgactcgtgggcccgggcccctatgttagagactgggttgttgctttcggcggaggtgaagaggcacactatcacaggcggtggcgngcttctcacgaggcggactggtctgctactttcagcggaggtgaag

SEQ ID NO: 3943 - DNA, 552 bp, Zea mays
agagtgaaatcagtgaacggtctgttatttctgtgcagtatgataggttgatagactctagcatcggacaaccctgcgcaatttgaataattccatcatcgctaaggcctccacacctgaaacagagaacataagttagttgactgacaaaagtcaactaaacaaagagaaccgcaaggcatgtctaataatgacctgtacaaatcaatctcgcggagttttgggcaagaccttccaatgtggctaagaccttcatcacttatcttcaagcaaatgccaatttttaggctcgaaagttcgctacatctggcaagagctttcaatcctgtacagaaaatattcagagtcagctttatgtccatctggcgaagaataatatagtagccagttcaatatgtaccttcatcatccaaatcactgtcagtaaggtccaactcttccaagtgagaacagtgcttcccaatcagttggagtgctccactggaaacatggctacaagactccatcctcagagagatgagggaagtgcatgaactagttatggccgctagt

SEQ ID NO: 3944 - DNA, 445 bp, Zea mays
tacctcgagtactggaaggagagcctggcgaggcctgagcgggtccttttcctcaggtacgaggagatggtggcggacccggtgcgtgccgtgaggacgctcgccggcttcttcgccgtcccgttcaccgacgaggaagaggggcgaggggtcccggaggagattgtgaggctgtgcagcttcgagatgctgagcggcttggaaagcaatcggaccggagatcttgattgcggagacaacacggtgatcggaaaatctaccttcttcaggaagggcaaggttggggactgggagaaccacttgacaaaagagatgggcaagaaggtcgacgccgttttcgaagacaagctccagggatctggtctcgtgttttgaattttgattactatccatgcatggcttttgtttgtgtgatgctgtttgtccagaataactaatcgtttgc

SEQ ID NO: 3945 - DNA, 374 bp, Zea mays
ggggcacgacatggacgttccggagatgatgttgtaatcggctctcctgccgtcttccgaatatcccgatacagttgcgtcgcccgaccaggccgcaagaatgttcactcccggcgcgacgacgtcgggcttgaggagctctagtgcgacaaggttggggccccgcgacgagaatcccgccaccaccggcgcccggttgttgcggccaatgaccgtctcacaggcgaagctgaaggacgccaccggatagggcaccgatgccatgtacgccctgagcttctcgccagcggtgtagctaagcgtgagacccggaagagtgaaggcataggccacggaaccatctcgagaccactcctgaggatccacatcaacta

SEQ ID NO: 3946 - DNA, 539 bp, Zea mays
  misc_feature (278)..(278): n is a, c, g, or t
  misc_feature (280)..(281): n is a, c, g, or t
  misc_feature (283)..(284): n is a, c, g, or t
  misc_feature (421)..(426): n is a, c, g, or t
  misc_feature (429)..(431): n is a, c, g, or t
  misc_feature (435)..(438): n is a, c, g, or t
  misc_feature (441)..(441): n is a, c, g, or t
  misc_feature (451)..(451): n is a, c, g, or t
  misc_feature (468)..(471): n is a, c, g, or t
  misc_feature (474)..(477): n is a, c, g, or t
  misc_feature (492)..(492): n is a, c, g, or t
  misc_feature (494)..(494): n is a, c, g, or t
caactcgttgctcccaccagcccagcagaaaccatcgctaccaacatctatccagcggctagctacaaccagctgcacttggcttccttccttgttgctgcattgtagtagcttgatcatcttgaaaagcctacgctatcaacctccaacctgcaagctaagctaccatggggcgaaggaccaagcagtcttcttcgttgtcgttgttccggtactcgcggagccgttcttcctccgcgcccaccacgccgaggccggaaccagcagcagagcctccnanntnntggagtcgtggtccgtgggagcgtgcaacctttggcctctgatggaggggtgttccgaccagggtctccgacttcgtgcgcaggacttgcagcagcttgctgcttggccgtctgcagtcaccgtctggaaggagagnnnnnngannnagtnnnntgngaacttttgnatatcatgcacctgatnnnnttnnnnaggactcttattcangntaattatcttctgccacattcattttcatttttttactcttgact

SEQ ID NO: 3947 - DNA, 464 bp, Zea mays
  misc_feature (395)..(395): n is a, c, g, or t
  misc_feature (400)..(402): n is a, c, g, or t
  misc_feature (408)..(410): n is a, c, g, or t
  misc_feature (417)..(448): n is a, c, g, or t
  misc_feature (452)..(458): n is a, c, g, or t
acactacagcgtacgctactgctaagtgcactacgagaggctgactgctgccctaattaacttgctgaccaatggcaagcctgatctgaaggtcaacacactatggctaacatttactgctaattacactgaaagactgacgcgttgccatcagacaaaattcctatgtgatcagggggactcagactcagacctgcacctgcacaaaatccagggaccataccagcacgcagaaggcatccttcaccaggcgccatggcctatgagtcgcttcctcctgaagctctccttgaagcacgcctgcctgagatccttggtcctctgatccagaatcgcatcgggcctctcctcgatcatcttctttgtcagctgcaggaattccaccacgctcctgntcagnnnctcgtnnncttgtannnnnnnnnnnnnnnnnnnnnnnnnnnnnnnncctnnnnnnnctctga

SEQ ID NO: 3948 - DNA, 396 bp, Zea mays
tgatgcatccagaaatagggtaactattttatgttagatacaagaaacttatttaacagatatgcagaagtgttaaaacatttttaaattcaaaattttcatcaggctttgatagccgttttaccactcaaaggttttctgagtggacatttttataattgcttttttatagccactttccccctcttgtgacaaaaatgcattttctggaccagtgtactttcaaaattggtccagcttgcaacagcatatggacatggaagtcaagagcaagaagagcgactaaccccgcaattgagaagcaacacttccatttggcatatatggataaacaagtaacctctcactctctgtagtgcagaatccaataagacgtaggagattccgatgaacaga

SEQ ID NO: 3949 - DNA, 352 bp, Zea mays
gcgttctacgaaagcgacgacaggctagcgctatcgcggggtctcgttgaaccaccaccagcagctgcaggcgaaggtccaagaacgcaggataacgacacgcatgcaggagaggtccgtgccatggatcacgaggaagaagaggagaccaacaagcttgcgatcgttctagccgacccccagccacagtcgcaaggcgacgtgtagtccgttctcctggcgctgcggcgggtgaaggagcagctgcgctacaccatgaaccaggaactcgccgcgccaaccaggagctctacgcccaccgagcgagcgtgccacactaggaaaccgtgtggctcacttctactacggtgtc

SEQ ID NO: 3950 - DNA, 373 bp, Zea mays
gtatgatggtagacaaatcggtggtgatcgaaacggttccaggagtatgatgactcgtgagtcgtgaagaggacgcaagctacgaggaacgtaatttcaagacgagatggggtcatagatcatcaggaggcgtggacacaaggcactgtcctaaacttggcagaccaagtgcagcaatatattgctggtcaccagtgctcacctattgatcttcttatactcgtaattgtatgtatgcccctgaaagcagaagaaagattgtcacaaagcagagggaactttcggttccctagcgaaatgtattgatattaaacattttttttgtattaatgctgagagtgttgccagctctctctataatgcgaaccctcca

SEQ ID NO: 3951 - DNA, 359 bp, Zea mays
tactatatacatacatacgttaacggtgtactatgtgtcttgttgtaaatgtcacccctgcgaggtgttgccgattttgtaagctacgcacgtactagtactactacgctcggcatgtcaccgtgtgcaagtgcaacacaagtttgtaaaaatgactagctagtagtagtagtagcaatgctgttgctgtacgagtaggcctccctctgctttgtacaggggtagtccaacaagtatatggtttgctggtgccatgtaaaaatgtatatagaatcctacgttcacgcccagcaaggatgcgtggttgagtgttctggactctggacaatactactatccaataacagccataccgtgtt

SEQ ID NO: 3952 - DNA, 400 bp, Zea mays
ttcagttcaagccctggttcgaccccaccaccggctaccacaattacaccatctcgtggagcccctgcatgatcgtgtaagagagctatagaaaagaactatagaacgaaacgaaatgaaatgaattgcctacccatattgacatatcccatttaggcatttactacgtcgtcggtgcatatatacaggtggtacgttgacagcgtccccatccgcgtgttccgcaactaccagcagagctacggcgtggcgtacccgacgagccgccccatgcacgcatactccagcatctgggcggcggaggactgggccacgcagggcggccgcgtcaagaccgactggtccaaggcgcccttcgtcgccaactaccggaacatccacctcgacatctgcgactgca

SEQ ID NO: 3953 - DNA, 325 bp, Zea mays
cgcgctggcctgattcggctttgccgacgagccggaaatagcattggggcccaagtgtttcgttgcctacccagtaccaacaagtccacaaccacaatgctcgggttactaaaaggtcgataaaataccaaaaaaaaacagtcaaagacagtgttcgtcgaaaaaaaactaaggaaaaacaattagtagtaaaactgaaaatacctttaatactacatggcgccttgaacggcatgttgttgtcctttatagatcacgatcactgtggtattggggctattcaattattcttccacgaaggtgtgtaagcgtagtgtgtctcttc

SEQ ID NO: 3954 - DNA, 461 bp, Zea mays
aggtcgctttccaggccaggccaccattcccaaacgacatcgccaccgacgacgatgaggatgaacacgggcgggctgggcgagcgtgtcttggatctgaatgcgaggggcagcctgcagcgggtcctagagagacaggaaatggagctcgtgggtggagcacacggtgacggacaaatgcctggtcgagtggacagtcccccgcaaggacgttggcagcggtgaggtggacacggttcttgaagccgagcagaaggtcaaggttgtggaggtcggcgtcgacagctaagaggccgaggcgcgcgagggagagggaggcggctaggctgctggttgtggtggtctttccgatggcacccttgtcggaggctcagttccttccgagcgatgtggcccctcgtcgaccgagttcgtcgggcgaaactggctggtgtgagcaagaggcagcaggtcgtcgaaga

SEQ ID NO: 3955 - DNA, 619 bp, Zea mays
cactgcagcttggggctcggaacgaacgagaagaaacaggcatggggaagggccgggcaccgtgctgcgccaaggtggggctcaacaagggctcctggacgccggaggaggacatgcgcctcatcgcctacattcagaagtacggccacgccaactggcgcgccctgcccaagcaagcaggtacgtacgggacgggacggcagccccggcggcgcgccgtcacggcatgcattattcgttctgaacatgtgtatgcatgtgacagggagttggttccagctctgacggttggttcttcgattccatccatccgtaggtctgctgcggtgcgggaagagctgccggctgcggtggatcaactacctgcgcccggacctcaagcgcggcaacttcaccgccgaggaggaggaggccatcatcaagctccacggcttgctcgggaacaagtacgtatacggtgcagcgtttccggcttggaggggttgagctgcacatgtcgatcgtccttttggataatccatgcatgacgccgccgagtctgatcgagttccgtttggcttttgtttctgctaccaggtggtccaagatcgcctcgtgcctgccgggccggacggacaac

SEQ ID NO: 3956 - DNA, 808 bp, Zea mays
ctctttttgatctttgactcgcatcgcgtctcctctcgcctccgctttggttggataagcccgtctggaagcctgaggcgctctcctactttcatttcgccggcccgcggagaacggctcggcgggttcccttccctggcagcgttcggagagctcttcctgctgctctgcgacggacggggacggagaggtacgccggcctacgtacctaccaactgcatgcggtccaagtgtttgtcgacatggctgtgtcctgtgtgtgtgtgattggccgttgttttgcttaggagttgggtggcggggacgcttacgcaccttgtcgttttgattggctcgtcacatcacgtcacgtcacctttgattccttagtctcatttgatccgggaattgaagttgctacttatttgatgcatgtatgctttgccctgatccacatttcggagcttctccttcactattttttcccttttgagggtgttacatcctgcaagggttagctatgatgcgattgggcaatgacaatgtttctctgctagcaatgggcataattgtcgttacacaatgttaacttacctcacagtttattaaaaataaaaatccatgtacgatctgtcggtggctacgttggcagtgtggatattatcccctgccctaccaatgtgttgatcttctcttgcgtcatatacacataaaagaatagtcggtggtctattatgcaggtaatttaaggagacagcatctcttatataacttacctcacagggctcttgatgtgttctttttttttgttcttttgttaggtcaaaaa

SEQ ID NO: 3957 - DNA, 399 bp, Zea mays
tccttgctgtttcagttgttgttaattctacggctataaactcgaggcaccctgacaaggttgtttttcacttagtgactgatgagttgaactatgctccgatgaaggcatggtttggcatgaatgactacagaggggtcaccgtggagatacaaaaggtggaggactttacctggctcaatgcatcgtatgttcccgttcttaaacagctacagaatgctgctacacagaagttctacttctctggcagtggtagtcgtggaacaccaattaaattcaggaacccaaagtacttatcaatgcttaaccacttgaggttttatattccagaaatatatcctgaattgcagaaggtggtatttcttgatgatgatatcgttgttcagagggacctatcag

SEQ ID NO: 3958 - DNA, 414 bp, Zea mays
agtccatgaaagatggtgctctgttccagctgaaggtgttgctggacaagttcgcaccggagaccacgccgaagttggtgccgcgcgcaccacgggttggctccggcatcagctgcctgtcgcaggcgcggcaccaagaggcaggagacagaatacccccggtgcaagaggaagggcagggcatcaacgtctgcggcggcggcgtctctcgcatatcgatccaggacatcgctgaggagtacggcgagctcgtgaatggcatcagagttcagctcctgtcgccgctccagcgcaagtacgtcgatctcgccgagcaaggcgggtacattgacatctgcggcgacgcctctcctgtcgtgttcccggccaagaccggcgatagcagcagcccaaacttgagcagcagcagtgact

SEQ ID NO: 3959 - DNA, 414 bp, Zea mays
  misc_feature (75)..(75): n is a, c, g, or t
  misc_feature (81)..(82): n is a, c, g, or t
  misc_feature (89)..(89): n is a, c, g, or t
  misc_feature (134)..(134): n is a, c, g, or t
  misc_feature (151)..(151): n is a, c, g, or t
agtccatgaaagatggtgctctgttccagctgaaggtgttgctggacaagttcgcaccggagaccacgccgaagntggtgnngcgcgcnccacgggttggctccggcatcagctgcctgtcgcaggcgcggcancaagaggcaggagacanaatacccccggtgcaagaggaagggcagggcatcaacgtctgcggcggcggcgtctctcgcatatcgatccaggacatcgctgaggagtacggcgagctcgtgaatggcatcagagttcagctcctgtcgccgctccagcgcaagtacgtcgatctcgccgagcaaggcgggtacattgacatctgcggcgacgcctctcctgtcgtgttcccggccaagaccggcgatagcagcagcccaaacttgagcagcagcagtgact

SEQ ID NO: 3960 - DNA, 663 bp, Zea mays
tcaactactcccctgtggagcatctggagtgccatatggaagttaacatggagctgaacgaaggagaacaaatgattgatcacacagaagctagccgatatgaattgtttagcaacggtgagatatacaaaggcggctgtagatgaaactgaattgttgttaactttttcattgctcactgaatagcaaatgtatatcttgtaatttacaaaaaatggttatggctttgcagatctgcagagccaatcaagaacttccaacttggacaatgaacattttccaagggatgcatcaaaccacgctaatgttgaagcaactggacctccatatgatctctcaaatggtatgtaccttcggaaaaaactatatactctggttggagacacaaatgaacactcgcatgctgttttcctcttcaggtgtatattttatgtgttagttccataaaggaaccattaattaattaataaatatatctggtatcctggtgcatatttctcaggtggtatatccacagagcactcagattggagtgaaattaaatgggggagtacagatgagatgcttggtaatactggtcaggatgatgaccatttcactccgatgggcatgttttgtcttaccaataacacagatattcttgatctttcttgcattgagtcc

SEQ ID NO: 3961 - DNA, 409 bp, Zea mays
cgaccttgacgagctccgcgagatgcactacgtgcacgcggccatcacggagtcgatgcggctgtacgcgccggtgccagtgaactcgctgcgggcggaggcggatgacttcctgcccgacggaacagccgtgcaggcagggtggttcgtgacgtacaattcatacgggatggggcgcatggagtcagtctggggcgacgacgcgcgggagtaccggccggagcggtggctcagccctattgacgggacgttccggccggacagcccgtaccggttcctggcgttccacgcggggcccaggctgtgcttggggaaggagatggcgtacatccagatgaagtccatcgtggcgtgcgtactggaggagctcgacgtggccgtggacggcgcgtaccggccccggcaggtc

SEQ ID NO: 3962 - DNA, 396 bp, Zea mays
aattatactggtcgcagagtaaaattgaaaatagaagataaacacaaaacacaattttatacagtaaactacgctgttaacatagtaaaatttaaaatagaagataaaaataaaatgagtaagcttgctagaggtagtctaaatagttgtgttccgttcgtttgtgggacaacagtttactgaataacattcgttcgttcttccggctgtccagtttcccgtgtctcttctcctctttgctgctatcggtgttaacaccagttgagcccaaaaatgatgtttcgctacatctatacatcgatgatggatgacgatcgtccagtctagagtacatatttataccaatcaattatcaatcactggagaagattcagatttcaggttgagagcagagca

SEQ ID NO: 3963 - DNA, 396 bp, Zea mays
  misc_feature (345)..(345): n is a, c, g, or t
aattatactggtcgcagagtaaaattgaaaatagaagataaacacaaaacacaattttatacagtaaactacgctgttaacatagtaaaatttaaaatagaagataaaaataaaatgagtaagcttgctagaggtagtctaaatagttgtgttccgttcgtttgtgggacaacagtttactgaataacattcgttcgttcttccggctgtccagtttcccgtgtctcttctcctctttgctgctatcggtgttaacaccagttgagcccaaaaatgatgtttcgctacatctatacatcgatgatggatgacgatcgtccagtctagagtacatatttataccantcaattatcaatcactggagaagattcagatttcaggttgagagcagagca

SEQ ID NO: 3964 - DNA, 372 bp, Zea mays
  misc_feature (334)..(335): n is a, c, g, or t
  misc_feature (343)..(343): n is a, c, g, or t
  misc_feature (345)..(345): n is a, c, g, or t
ctgcgcagcgtcgggctggcgctctacatcagcatctttggcatcggaagcttcgtcagcagcgcgctcgtgtcaggcatccaccgggtgacggcggcgaggggccagagctggttctcagataatatgaaccgcggccacctcgactacttctactggctgctcgcagggctcagcgccctccagttcttcgcctatgtcttctttgcgtggagatacaaatatataaacagaacgttggagccgagaacatgtgacacatagttttaggattttcttccctattttcgtcacgataccaccctttttttttacgaccccccccccccccccnntttttttnanaaaaaaaaaccatacgttccttacaaa

SEQ ID NO: 3965 - DNA, 283 bp, Zea mays
gctgctgctcggaccgtgaccaggacatggcggacctggagctggcgcttgaggcggttgttccggtgagcgtgcagcggcaggactcgctgtacagggacgcgacgagggcgggcggcggcgggcagcagcagcacgaagggtgggctcggactctgaggctggccttccagtgcgtgggcgtcctctacggcgacatcgggacgtcgccgctgtacgtctactcgagcaccttcgccggcggcatccgggacaccgacgacctcctgggcgtgctctccct

SEQ ID NO: 3966 - DNA, 831 bp, Zea mays
  misc_feature (817)..(826): n is a, c, g, or t
agaggcagtggtgtaccttttttcttcgttgttgtagtgtgaaaaccaagatacaaccacaccacttgtgtgctgtatttcacacacaaaaaaaacttgtattgtttaattttatgtaggaccgcataactttgctcctttgcgattaccgtcaactaccggcaggcgataagtttgacaggattataagctggtgagtactatactactgtgcccacatattgaagaggactgatcatatacaagatatatatagatgaattgttgatctgacaaataagtttttcttcgtgcatatggtcatttgttagtgaaatgattgaacatgttgggcatgagtacatggatgatttcttcgggtgctgcgagtatcatttggcagagcatggcctacttgtcctccaggtgcagcattattttattgtatgattacgattgtaacagtctgtcacaagaattaactatttcccatcatgttcgacacaaatttaattatatgcatgcatggacagtccatcgcgctcccagaggaattgtatgacaaaatgaggatgcggcccgagtttctcaagacatatatcttccccggtggctgcctgccttctctaggccggattgtgtctgccatgtctaatgcatcaaggctcaagtatgtgctttattttcaatatatatatcgatgatatgatgaacaaaagccatccatgcatgcatgcattcagcactttctgtattgatgtgagtactctcactcctgtgcagcattcagcaccttgagaatattggggaccactactacactaccctaatgaactgnnnnnnnnnnctttc

SEQ ID NO: 3967 - DNA, 213 bp, Zea mays
  misc_feature (101)..(104): n is a, c, g, or t
tactctgctttctttgaggggtctgtcaagttcagaccttggagattaatttggaagagttgggctcctctccgctgcaagttctttctttggcttgccannnntaaccgatgatggactgtggatcggcttgccaaacgaggccttcctcacccagattcctgccccttgtgtgaccaagccggtgagacccttcagcacattctaattggt

SEQ ID NO: 3968 - DNA, 566 bp, Zea mays
cgcccaccggaaatcaacgtcgaggggtccagggactcgggcctcgtgttcatgagcgccgtcgcgctcgtcgacgtcttcatggacacggtacttattaacgcattcctttctcctccttcgtcttccagcggcgtccatgacgatggttgatcgatgttgttgctggtgcagaataagtggatggaattcttccccggcatcgtgtccaaggcgcagaccgtcgatgttctcgtgaacggcttgtgtgggaggagcgagtccttgatcatggtaatgccgtcgagccttcgcattgcaaacagtgcttctcctcgtgccatgtgaccatcggagggaaagctaatggcgtcgtgcagatgtacgaggagctgcacatcatgacgccggtcgtcccgactcgcgagctgagcttcctgcgctactgcaagcagatcgaacaggggctgtgggccgtcgccgacgtctccctggacgggcagcgcgacgcccactacggggtgccgtcccgctcccgtcgcatgccgtcggggtgcctcatcgccgacatgtcgaatggctactcc

SEQ ID NO: 3969 - DNA, 500 bp, Zea mays
tcaggaagagcggtagaatttgcggacggtgagttggaggagttcgacgccattgtgcttgcgactggctacaagagcaatgtccccttctggttgaaggtactttagtttaactgtttgttttagaataacgtttaccatttatgtggtggaaacagattggtaagctacagttcttcttatgatgatgcatcctgatagctaaaatcgatcgtgttttgcttttgaatcgggtcaggaccgagtgttattttctgaaaaagatggattgccaagaaaagcatttccgaacgggtggaagggtgagaagggcctgtactcggttgggttcacccggcgtggactgatgggcacctcggtcgatgccaggagggttgcccacgacgtcgagcagcaatggcggaaggccaaagggacgcatcgggacggcgttcctctacctctggtcgctgttgtttaccatggtgatgggttgtgattgtgagttgccaaagggtgta

SEQ ID NO: 3970 - DNA, 1400 bp, Zea mays
  misc_feature (1198)..(1198): n is a, c, g, or t
ggcctccagtctcacacaggggcagtgaggtgtggcggcaggcttcccttcactgaccgcggaacagaatagatcagatcagtgttttcttgtggggaagagttggtaacagcgaacattgggtcccgtaccggttgctcttccccttttatatgcacggtgcgagcgggagccgcaaccaataggttgttacgccccctgatcacggcgcattatgataggataggatcgactcggtccataactgaatcgattgaaatcaacccaacaaagtttagtttatttgttgttaatgttattggcaattattagcgacatattatatgactgaaaagaataccattgacattatttctccacttgtaaatgcatcacgttattaccaccagtagctcgttgtagtgttaatttttcctcaactagctacggtgacatgcaaataacaaaaggatgaaacaatgtacaatgcacaatgtacttatggtgtaggtattgaacatatctgttctatattttggtaaaactgattaccatgtataagcttcatatcagtacaagataccactcaagatgcaagtgctgaccttgtttgttcctttgcagttattttacctctatctgccggaagctcaaaatcatgaggggctctgatgctgttggaataggtatgtacaatgtgtgacaatagatcttgacattctgcatgtattatgtgcatatgttacagccttgcaggacgaatttattatttcccaaacacttatatttgcagttaacttatactatgcagtagctatatttctctctctttttatttcctgcatgtattagctgcaactgtatcctggcaaccaacggattgtagcttgaatgcatagatcatttatcgtggctgataacagagcataaacttaagtgaacaataagatggttaaatattaatcggaagaaacggttgctgtttcggtgcctgaatgtgaaacttcagtttggaagatgccttttcttgtctgcaaccaagaccactggctctcgcatttggtccttcatttctgaatttaggtgcattgtttcattttgctacaatgtttcttgtatgattctgaactatgtccattgcatgcagctccacgaaccgtcgagcagacaggtcagaacaaataagctttggcctttgcctgcatccaaggaagacatntgagctagctgggagagtatgttgaaggctgaagcctgaaatagttgccgggaatcgtcaaaacccgtcaagtgtttagtgtagttttcacgtgtccttgagacatgtgcatttgtatgtttgtgacgtgatccgttagatcgtgcaatcgtaggttgctgttcttgtgccctttaaaggccagacagatcagggagctctc

SEQ ID NO: 3971 - DNA, 409 bp, Zea mays
gcctttttcggtgtcgagaagtttgtgctccctccagaaaacttcacggacatgccctttccatgtatcccatgctcgaaattcctcacgacctcaatgcccttgtctccaacaaggaaactgttgtccagcgcgccaagcgcaaggctcttgattccacttccttcctcgacgggctcctcaaactcccgcagatcctccagcacggccttcagtagcggtgtccgcgggggcatcgggctgcccttggtgcccggagagaagaagccgtcggtggcgtcctcccatatcgactcgtcgccgtcctccgggcgcgcccacgccgcgaagtccttcccgaataccttggcgcggccctcgtccgtggcggcgacgccgtagctgttctcaaacatacagctgtggtgca

SEQ ID NO: 3972 - DNA, 398 bp, Zea mays
acttgatctggaaatgcgggccggccctgtaggtgacgccctgcgtcgcgccgtacacgtacggcgtgtcgtcgtaccagtgccgggtgaggccggagtcgttggacggcgggatgtacgagccgccgacgttgagccggtacatggtctggagcgtggagctggcgatgtccacggtctggtccgcgaagccgaccatgatcgccgggtcgacgaagatgtcgggcatggatatcacctcgatgccgttgacgtaggcgtagctctcgttgcccatcggcgtcggtgtgaaggtgagggcgaggaaccccgcgggcgtcggcgggagggagaactcccggatgatgaacgcctgagtcagcgcctttgcgtaggtgtagactctgaagttgcggaac

SEQ ID NO: 3973 - DNA, 440 bp, Zea mays
acatcagtgggatatggaatgtgcatattagaattgttatagtttgttagttgcgtagttaatacatgtatgttttcagttatatatattagacctttataagaaacacaactctgtatatttgcaagtatggaacgtggccgacaatattattttacaccaggaggtgccttagcagcacaggtggcgccttagtctggttcctgttctagtaaggctgcatacaatgcattcttctttgtgtccatcaagtttgtgccttggaggagaatttggagatcctcggcaaccctggggtgtaaattttttttgtgtcttgctgtcaaaaagtggtctggatggctaatcaaaattgtacaaacaatattgtacaaacatagtttaacgcatcctgctgctagcttattgtgtgatcaagctgaagagaccatcctgcatat

SEQ ID NO: 3974 - DNA, 361 bp, Zea mays
tctcttcaatctgaaataaacacaagaacttctgaacatgaaggcacagacatcagaagtcgttaatgttaccactttaagggatcctgattgagtcagtaaacagcatattgatctgcatttctgcagtctgacaaatatcttaatccatgtcatgattacagatggtctcatttaacgcagtgaaccttagacacttgactagttgactctgaatgaatggtgcctgaaacaagtgttgcaggtaatggagttagtgacattcaggacaagacaaattataatggttaaacaaatgagttgcgacaataatgaaaaccacaaagataaaaaaaacctcaacttcatgcgacaggtatga

SEQ ID NO: 3975 - DNA, 613 bp, Zea mays
  misc_feature (357)..(610): n is a, c, g, or t
ttcacggttatgtgccctcctgtggttcggtggcacatgtcgctagctgaggtgggcaacgagctcgcgttgttgagctgcggccaccaggtcccgatgctcgagctctggattctgaaggattacgagaacaagagctgggtctgcacgcactggattcggctgccggagttgaagatgagcaccttcgcgttcgatgacttctcgcgaatgattttcgtgtcagaaaagggagttctgatagccaccccggagcagaagctgttgcgctatgacctgaatgggactctgctggaaagcttcccttgcaataatggcagccatctcaagattactccgtacaccttcaaggagagnnnnnnnnnnnnnnnnnnnnnnnnnnnnnnnnnnnnnnnnnnnnnnnnnnnnnnnnnnnnnnnnnnnnnnnnnnnnnnnnnnnnnnnnnnnnnnnnnnnnnnnnnnnnnnnnnnnnnnnnnnnnnnnnnnnnnnnnnnnnnnnnnnnnnnnnnnnnnnnnnnnnnnnnnnnnnnnnnnnnnnnnnnnnnnnnnnnnnnnnnnnnnnnnnnnnnnnnnnnnnnnnnnnnnnnnnnnnnnnnnnnnnnnnnnnnnnccc

SEQ ID NO: 3976 - DNA, 354 bp, Zea mays
gaccgtttgcataacccgaaggtaatcgagattgcgaacaagatgaaggaggagcgagacaggatgttgagggatagagcagcaggtcagcggtagtcgtagcagcaggtattgtttcgactggccgactgggtgttgtcgtttacgacatgggccaactggcgtcataaataatggttgttggagtttgatatggcaaatgtgaaactcgtgtttttgttattcgtatttctgggatttagatggcctctggaatgcaatgttaattgggatgtgtttttgccagcaagctggtaaattgagacatgttttgcttgctccagaaagttctgcttatagctggtacaaggctag

SEQ ID NO: 3977 - DNA, 369 bp, Zea mays
  misc_feature (362)..(366): n is a, c, g, or t
tacgggtcacttcggacaggggtctgggagaattattcaaaaacccgaaggcatccgccagaattgccaaatgggcagctgaactatccgggtaccacatcaccttcgagcccagaacagcgatcaaatcacaagtcctggcagacttcattgtcgactggacaggaccagcatggccacaagaaccctcgcgcatggtgccatgtggtggcaggcgccgcggcgattatcacatcacccgtaggcatcaagtacagatacgcagcgcgcctcagctttgccttagagtctgacaggtacactaacaacatcgcatagtacgaagctttcatcctgggacttcgcaaattatgagccctcgnnnnnact

SEQ ID NO: 3978 - DNA, 368 bp, Zea mays
atctgctgctggtggtaggtcaccatatatagctaggtacatatgtttagagctatagcttgttacataatagagatatatatagttgtatacatgcatacatacactacacaaataatgtaggcgaaagatatatgtacatgcatgccagtatattgacaagggttgtcagtatctgtatagacataatctaaaaaaaggagatagaaacgtaggtagggtttggatttcattattagcttggctagtagtagtagtggtcgagattgatatgtgaaaaggaacaagcatcatgtatttatctcagtttgtagtatttgcctgcttgcctccgccacccaatgcgtttattagcgttgtggtgcgaa

SEQ ID NO: 3979 - DNA, 395 bp, Zea mays
tcagtttggccctctgattcagttaggcggttttggcaggaagggagtgagtctaggaagaaacaaattagtctgctgatgtggtggttgttagcttgatgtcgtttaccctgttggtgttaggtattgcagtactgtgtgctatgtgatgcgtttggtagtagttagttgtaggctttgcagtaccagcagctgttcttgtgcttcggcttaagttgtgcaatggctagctgagtagaagtagtttgggtagtaggttgtgatgttttcggcaaactggtgatggtgagatcatgagtttcagtttaactagagaactgatttgatctttatgccctgtgctttatttaaaaactgtctgccggatgccggttgcccaaagtatcagtagcaaa

SEQ ID NO: 3980 - DNA, 494 bp, Zea mays
ttgctgggcagcagtgttagtgtttgaacgcgaagaccctttcattaagcttgcccttgatgttctcggggcctgcattgttgccgttaagttatcagttagtcaagccatcatgatggttatcattctctagcaggctcagaaatcgtgaatacctgaatgcataagccaagcaggggagatatctctttcttcagattatccctgatcattccatatatcttctccacgtacgctgtgagctgctgtttgaacagcaaagccgggtacttggcctcgacctgtctcagagtttcgaccccagtaaccatgcttccatttatgagagaaagatttacaccctgtggcgctcctcggaagctctggaataaaaaaaaaggcatattaaatatgaaggttaaataagaagaagaaaagaagacgagttcttaaaataagaacatgtacctgcgtcattcgtccgaagagtgtagcagaagacgaccgtcgacgct

SEQ ID NO: 3981 - DNA, 386 bp, Zea mays
  misc_feature (376)..(377): n is a, c, g, or t
gcgctcaagtgggtggtgccgagcgagatctaccccgtggagatcaggtcggcggcgcaggcgctgacggtgtccatcgcgctctgcctctcattcgcgcagacgcaggtgttcgtctccctgctctgcgccatgaagcacgccatcttcctgttctacgccggatgggtcctcgtcatgactgccttcatcgccgcgttcctgccggagaccaaaggcgtgccgctggaggccatgcgcgccgtctgggcggggcactggtactggaggaggttcgtcagggacgccaagcaggaggttcaggtgaactgcatgtagggaaaagtaaagagtggtaaaactcaagtgtttgctggtaaattatgatggttcagtnnggccgttag

SEQ ID NO: 3982 - DNA, 374 bp, Zea mays
ggtgggatagttgcattcaacacgactattgacgaggtattcagcctgctgcatcttactaaatcactagttactggcgtaacatcattgggcacttctatttatatatgccaatatatgtttaggatcttgcgaaggaaattcgtgagttcaggagtcctacagatggtgagacgcggatgttctatgagatagtggttgctcccggctatacggagaagggtcttgaggttctcagaggcaagtccaaggcactgaggatactcgaggcgaagagaagtggaaaagggatgctttcacttaggcaggtgagtggtgggtggttagctcaggagtctgatgatctaacccctgaagagatcacctttaccaca

SEQ ID NO: 3983 - DNA, 533 bp, Zea mays
ggatcctgttggtgtgttatctgtagaatttgatgatggagaaattttccaatggagtaaggtaaatatactttgctttattttcactgaactctttattatgcagtgtgttatctgtataatttttatttatttattaaaatctgtataccaggttacaacaacaattaataacgttatcattggtcaagtttattgtaatcactatggaacgatgagtataactgggaacaggggatattcatgcaagctgattttcaaacggcaatctttccttgagcgcaaccctcggcaggtaaaaagaaatgcagcatcccattttggaatcgatttgatggatgttactaagatgtagctgtatgtatgcaaggttgaaggattggttaaggacggtgatggttcgacggtggcaagcctaatgggaaagtgggatgagaggatgtactgcagcgcatcagggcagaatgtgattctgttgtgggagaaaaatgaagcttcgactaatcccactcgctataacctctcatcgttcg

SEQ ID NO: 3984 - DNA, 451 bp, Zea mays
  misc_feature (357)..(368): n is a, c, g, or t
  misc_feature (376)..(377): n is a, c, g, or t
  misc_feature (379)..(379): n is a, c, g, or t
  misc_feature (425)..(426): n is a, c, g, or t
  misc_feature (442)..(443): n is a, c, g, or t
atgttaccattcaagacaagtgcatgtcatttgatttaactttataacatgtctttcaattttcttgctatggtctcaaaactttacactgcaatcagcaaatggtacaattttcaagtccccgaaacctcagtatttgctctaaactgaagtataatatttggaagtatcgttcttttaggtagtctatataatatttcatttttttccataattgcatgatcatttctttaatcctatcaagaagcttaacaatatgtaagcctttaatgtctcgtctctgattattgaagatctttttctgtattcaatattgacctctaatgatattgaaccttagcaagaggtcttcaatannnnnnnnnnnnacattaanngnttacatattgttaagcttcttgataggattaaagaaatgatcatgnnttatggaaaaatgaannattatata

SEQ ID NO: 3985 - DNA, 446 bp, Zea mays
ttctgtttcgtctgacgaagcggcttcggattcttccgctcccattcgcgacgctcctcctcggtcatattcctgactttctcgatctcctccttctccttcaacctcgcatctctttcctccctgtccctcttaatccttgctatttctctgtttttccacgactcgtactcctctgcttcgttcaactcgtcgtctgtatcgacatcctcgatgttggcctcttcgttcagtgccttctcgatgtgctcctctttttctaatcttttcaaccacaatctgtctagtctcaatcttcctagcctccatcctcttcttgaccagctcctcaagctgccgttcctcctcctccagccgttcgcgctccgcgatggtgtctctctgtgactttggtatgaacacgggcttcaccatggccatgcccatctgctcatcctcagagtctg

SEQ ID NO: 3986 - DNA, 420 bp, Zea mays
caggtgctcacgcccgcagcggccatggagatgatggtcattcttgccaaggtcgcgtcggctatgctccagtgggcgccggcgattgcagcgcacattcaagtgcacttcgggggggatgctgcattcgtccaatgccatgctgctacactcgctactcactcctttgctccagttcccagatgcctttggaactgaggacgagcgcacaatggcacaccgcctggctttggctgcctgtgaggtgcaccgtccactcgcagtgcgattgctggctttgcattggctactcggctctggcaggttcagaaatctggtgcctggtctcacccattggttttaccctgccttgttcgatccccttgggctcaagggcaagaagctggattgtctaccttatgttgctactggtgttgatgg

SEQ ID NO: 3987 - DNA, 415 bp, Zea mays
tatgtttgtagtgagctgcatccggcgctgctactgctagtgctagagggctgaagggacgcagccaacaatgatttgcacagcagcagcagcaggctgtgggccggtcccggtcctccttcaatgacacctacactggtgggaccgggactcgtttgtttcttctaatcctgtgagatcttcacgctggaccagctggtctgtcacgtctgtctgcatccagtgtagtcccatgtgggtagcagcagcatcttcttgtgcatcacacacccctcctcccccctagtactgctgtgcatatcatggtcatggaggagcagctacctagatgggctggtaatagtaactactactaattagtgctaaatgcatcatgtaatgtaatgtaataggagagcaagcgctataatctgtt

SEQ ID NO: 3988 - DNA, 380 bp, Zea mays
gttgggtacaaggtccattcttactactggctggatgaattctcaggaaagaacagtttttcgcgttactggaggagtgagtggagtagtggcccaaacccatggtgccagggaatgcagattccagattccgatgtcgtcattgaaggcaattatgccagtgtggtcagccagaagaacaaggagaagtcccatgtcgtactgaatccaggttctgagtttgcgttgtgcgattgtagctggtcaatgaaggggaacctttgcaaacatgtaataaagtcggcaaaggtctgccgtgacaggggattggcactgccatcgttggccatgttccactattaccaggcattggcaaatcttgttcattgtccacccagtag

SEQ ID NO: 3989 - DNA, 270 bp, Zea mays
ccatgaacgccacctacgccgccgggctcaagacggtgtgcccgccgcctggcagcggcggcggcgacccggtcatcagcaacaaccgggtcacggaccccaacgcgctcagcaaccagttctacagcaacctgatgaccgggcaggtgctcttcgtctcggaccagcagctcatgaacaccacctacacggcggccaaggtggccaacaactccgccgattctgccgcctggatgacccagttccaaacggcgctgctcaagatgggca

SEQ ID NO: 3990 - DNA, 753 bp, Zea mays
  misc_feature (744)..(744): n is a, c, g, or t
tgcctcaatagtgcccatacatgccatgaaaatcggtttttaggactagcctggacagctttctgcagtagaaaattaaagttatacaccacacatttgaaaatttcagaggaatttcatatgtgacaaaccatcgcattcacatgttaatatagaacgtcaaaacaacagggcagaataacttgagcaaacgaatatcaagccttatattaataagggtagagactagacagatcttctatgaaaaatttagacaaacaaaaactgaacccacagtaatgccatgcacttcaactgacacatgaacatgaggagaccctcagatatattttggaatttacaaaatcattaatgccagcaataattatcctagaaagggaacacaatttattacctcaaagagctttcttgccatggtattgtttcctgcacgcatttctacctgagcccaagcctactagaaagttgtcgtacataaatgacagtttaatagaaaaggcaactctgcagtttctttttgtgcagataaaatgaataattatgaagcaaatacttactagccagcttgcacaactttttggattggattgactggcttgctcgaacaaagtccgtgcctgttcaaagcgctctgctttagcttcaagcaaagcaagagtttggtaaatatactcatttcctccacaatatttcagggctttcccaagtaggttccgtgccttttttatgtttccttgctttatntctaaaatg

SEQ ID NO: 3991 - DNA, 446 bp, Zea mays
ctgcatgatgtacagtttagacgggaggaggttcgaggtgccgctggcgtaccttggcacgctggtgtttgcggaactcctgtggatgtcctacgaggagtttggcttcgtgagccatgggcggatcacgctcccttgtgatgctgcagccgtagagtatgccatgtgtctcctcaggaaaggctcctcggcagatgtagagaaggcattcctgagcaccatggcagtctcatgccactatgcaagctgtattgctattgcaccatttgttggagttagccatcaagctgttatttgcagctcctggctgactgtaaagtagtttagtatatagtttgtaggaaaagaaaacttctccatggagccttttgatgcttcaagcaatcaaggaaaatgcaaactagcatgttaattagagctattattctcgttctttcgtggattga

SEQ ID NO: 3992 - DNA, 446 bp, Zea mays
  misc_feature (61)..(61): n is a, c, g, or t
  misc_feature (76)..(76): n is a, c, g, or t
  misc_feature (83)..(83): n is a, c, g, or t
  misc_feature (167)..(167): n is a, c, g, or t
  misc_feature (307)..(308): n is a, c, g, or t
  misc_feature (312)..(312): n is a, c, g, or t
  misc_feature (328)..(341): n is a, c, g, or t
  misc_feature (352)..(352): n is a, c, g, or t
ctgcatgatgtacagtttagacgggaggaggttcgaggtgccgctggcgtaccttggcacnctggtgtttgcgganctcctgnggatgtcctacgaggagtttggcttcgtgagccatgggcggatcacgctcccttgtgatgctgcagccgtagagtatgccatgngtctcctcaggaaaggctcctcggcagatgtagagaaggcattcctgagcaccatggcagtctcatgccactatgcaagctgtattgctattgcaccatttgttggagttagccatcaagctgttatttgcagctcctgnntgantgtaaagtagtttagnnnnnnnnnnnnnngaaaagaaaanttctccatggagccttttgatgcttcaagcaatcaaggaatatgcaaactagcatgttaattagagctattattctcgttctttcgtggattga

SEQ ID NO: 3993 - DNA, 1279 bp, Zea mays
  misc_feature (399)..(413): n is a, c, g, or t
  misc_feature (417)..(418): n is a, c, g, or t
  misc_feature (421)..(426): n is a, c, g, or t
  misc_feature (428)..(428): n is a, c, g, or t
  misc_feature (432)..(432): n is a, c, g, or t
  misc_feature (444)..(448): n is a, c, g, or t
  misc_feature (450)..(452): n is a, c, g, or t
  misc_feature (454)..(456): n is a, c, g, or t
  misc_feature (459)..(467): n is a, c, g, or t
  misc_feature (477)..(477): n is a, c, g, or t
  misc_feature (480)..(480): n is a, c, g, or t
  misc_feature (483)..(490): n is a, c, g, or t
  misc_feature (493)..(495): n is a, c, g, or t
  misc_feature (500)..(502): n is a, c, g, or t
  misc_feature (504)..(507): n is a, c, g, or t
  misc_feature (512)..(512): n is a, c, g, or t
  misc_feature (515)..(524): n is a, c, g, or t
  misc_feature (526)..(530): n is a, c, g, or t
  misc_feature (532)..(558): n is a, c, g, or t
  misc_feature (560)..(573): n is a, c, g, or t
  misc_feature (578)..(581): n is a, c, g, or t
  misc_feature (584)..(589): n is a, c, g, or t
  misc_feature (593)..(593): n is a, c, g, or t
  misc_feature (597)..(617): n is a, c, g, or t
  misc_feature (622)..(649): n is a, c, g, or t
  misc_feature (651)..(653): n is a, c, g, or t
  misc_feature (655)..(675): n is a, c, g, or t
  misc_feature (677)..(681): n is a, c, g, or t
  misc_feature (683)..(683): n is a, c, g, or t
  misc_feature (685)..(685): n is a, c, g, or t
  misc_feature (687)..(702): n is a, c, g, or t
  misc_feature (706)..(706): n is a, c, g, or t
  misc_feature (714)..(714): n is a, c, g, or t
  misc_feature (716)..(719): n is a, c, g, or t
  misc_feature (724)..(731): n is a, c, g, or t
  misc_feature (733)..(733): n is a, c, g, or t
  misc_feature (737)..(739): n is a, c, g, or t
  misc_feature (741)..(744): n is a, c, g, or t
  misc_feature (746)..(748): n is a, c, g, or t
  misc_feature (750)..(752): n is a, c, g, or t
  misc_feature (754)..(760): n is a, c, g, or t
  misc_feature (762)..(769): n is a, c, g, or t
  misc_feature (771)..(784): n is a, c, g, or t
  misc_feature (787)..(792): n is a, c, g, or t
  misc_feature (794)..(811): n is a, c, g, or t
  misc_feature (814)..(816): n is a, c, g, or t
  misc_feature (820)..(826): n is a, c, g, or t
  misc_feature (830)..(832): n is a, c, g, or t
  misc_feature (834)..(852): n is a, c, g, or t
  misc_feature (854)..(854): n is a, c, g, or t
  misc_feature (856)..(856): n is a, c, g, or t
  misc_feature (858)..(866): n is a, c, g, or t
  misc_feature (868)..(888): n is a, c, g, or t
  misc_feature (890)..(896): n is a, c, g, or t
  misc_feature (898)..(902): n is a, c, g, or t
  misc_feature (904)..(904): n is a, c, g, or t
  misc_feature (906)..(908): n is a, c, g, or t
  misc_feature (913)..(914): n is a, c, g, or t
  misc_feature (923)..(945): n is a, c, g, or t
  misc_feature (951)..(955): n is a, c, g, or t
  misc_feature (960)..(988): n is a, c, g, or t
  misc_feature (990)..(1003): n is a, c, g, or t
  misc_feature (1005)..(1005): n is a, c, g, or t
  misc_feature (1015)..(1020): n is a, c, g, or t
  misc_feature (1022)..(1027): n is a, c, g, or t
  misc_feature (1029)..(1047): n is a, c, g, or t
  misc_feature (1049)..(1055): n is a, c, g, or t
  misc_feature (1063)..(1071): n is a, c, g, or t
  misc_feature (1073)..(1079): n is a, c, g, or t
  misc_feature (1084)..(1084): n is a, c, g, or t
  misc_feature (1089)..(1094): n is a, c, g, or t
  misc_feature (1096)..(1097): n is a, c, g, or t
  misc_feature (1099)..(1117): n is a, c, g, or t
  misc_feature (1128)..(1133): n is a, c, g, or t
  misc_feature (1136)..(1150): n is a, c, g, or t
  misc_feature (1154)..(1154): n is a, c, g, or t
  misc_feature (1156)..(1157): n is a, c, g, or t
  misc_feature (1159)..(1166): n is a, c, g, or t
  misc_feature (1169)..(1173): n is a, c, g, or t
  misc_feature (1182)..(1183): n is a, c, g, or t
  misc_feature (1186)..(1199): n is a, c, g, or t
  misc_feature (1207)..(1209): n is a, c, g, or t
  misc_feature (1211)..(1225): n is a, c, g, or t
  misc_feature (1227)..(1251): n is a, c, g, or t
  misc_feature (1254)..(1274): n is a, c, g, or t
tggcggactgggggccggtgctgatcgggctggtgctcttcatcctgctctccccgggcctgctcttccagatccccggcaagggccggatcatcgagttcggcaacttccagaccagcggcctctccatcctcatccacgccgtcatctacttcgccctcctcgccatcttcctcctcgccgtcggcgtccacatttacctcggctagctagtcgcccgtcgtcgccggcgggcggccggctgagcgaggctagctgctggcgcgcggcggcccggcccggcccggctttatttgacatcatctgggtggctggattaggtactgcgtggtgcggaggcatatactactatatatatacatttacatgttcatctccatctgcttgctagctgtaacnnnnnnnnnnnnnnncgannatnnnnnnangcancaacaatggggnnnnntnnnannnacnnnnnnnnntctcaggggncangannnnnnnntannnaccgnnncnnnnagacncannnnnnnnnngnnnnncnnnnnnnnnnnnnnnnnnnnnnnnnnntnnnnnnnnnnnnnntcatnnnngannnnnngtanaatnnnnnnnnnnnnnnnnnnnnngcaannnnnnnnnnnnnnnnnnnnnnnnnnnnannntnnnnnnnnnnnnnnnnnnnnncnnnnntntntnnnnnnnnnnnnnnnncccnaccaaacnannnncctcnnnnnnnncntaannngnnnntnnntnnngnnnnnnncnnnnnnnnannnnnnnnnnnnnnctnnnnnnannnnnnnnnnnnnnnnnncannnagannnnnnnctcnnncnnnnnnnnnnnnnnnnnnncntncnnnnnnnnnannnnnnnnnnnnnnnnnnnnnannnnnnnannnnntncnnntcgannctaccaccnnnnnnnnnnnnnnnnnnnnnnncacaannnnnctccnnnnnnnnnnnnnnnnnnnnnnnnnnnnntnnnnnnnnnnnnnncntaccttaatnnnnnnannnnnntnnnnnnnnnnnnnnnnnnntnnnnnnncttctttnnnnnnnnnannnnnnngcagnttcannnnnnanntnnnnnnnnnnnnnnnnnnntcatgctagannnnnntgnnnnnnnnnnnnnnnctantnncnnnnnnnnccnnnnngccaccctnnccnnnnnnnnnnnnnnccccctgnnntnnnnnnnnnnnnnnncnnnnnnnnnnnnnnnnnnnnnnnnncgnnnnnnnnnnnnnnnnnnnnntcttc

SEQ ID NO: 3994 - DNA, 747 bp, Zea mays
gtgcatgctgttgtcgtcgccgctctgctcaatgccacgctagtagtcccacggttcctctacagcagcgtgtggaaggacacaaggtactgaaaacgcactggacctttttcgtctcttcttttttttctttttctttcctatgtagccatgttgtctcaaagagaacgttcaaagttttctcacagtcctaaatgacaaaaagaaagaaagaatgttgaaactttttttttgctagcaataaacagtccccagcatgacgtggtagcttttgtttgctgtgcttgacatgccttgcctttcaacccaaccagtcagtttggcgacatctaccaggaagactacttcgtgaagtacatgaagaacgatgtccgaatcgtgaaagaactgccagcccgccttcggtcgctggacctcgaagcaatcggcagccaggttggtgcctccccctgctgcctctgtttgttcaacacctcatgtttcacggactcagggttccctttgcctgcctcagatcactgacatggagatctcgaaagaggccgatccatctgagttcgtcaaatcgatcctcccaatccttgagcaaaacggcgtcgttcacttcctcgggttcggaaaccggctgggcttcgactcggtacctgttcatctgcaggtaagggcaccagcttaaaaaaccgaataaaatgccatttcacgtgggcatttgcacgcgctgtttccaactgttgccatcgcgcagag

SEQ ID NO: 3995 - DNA, 719 bp, Zea mays
acggcgacttcaacctcaccaaccagtcccccgactccgccacgcgcctgcactccaccaaggtgctcggcacgttcggctaccacgcgcccgagtaagcgtccacgcgcgcacaccacgtaccactagctccgatcgactccgatccgcgctcaacgtgcgtgatctgcattatatattatattattgtcgaccggtgtcaggtacgcgatgacggggcagctgacgcacaagagcgacgtgtacagcttcggcgtcgtgctgcttgagctcttgacggggaggaagcccgtggaccacaccatgcccaaggggcagcagagcctggtcacctgggtacgtaggatccccccctctccatatattcttcatcggttttcctccatggccggcggccgtacgtcgtctgaagctctgcatgaattcagtcgcctaattaattacgcaacaaaatcctggctgctcgtacgtccacaggccactccgaggctgagcgaggacaaagtgaagcagtgcgtggaccccaagctcaaggacgactacccgcccaaggccgtggccaaggtacgccgttgaagcttgtttggacacgggacacccttgacttgaccatcatcctgttgttcgtgttgggctgatgggctcgatctctgtttctgttctgagttgttgcagctcgcggcggtggcggcgctgtgcgtccagtacgaggccgattt

SEQ ID NO: 3996 - DNA, 367 bp, Zea mays
catgagcttgccgatggctgcgatggcgagacgggtgttgtccatggacaccccgatgggcgtgccctggaagttgccaccgtgaagagccttgcttcgggcgacatcgatgagcgggttgtcgttgacggagttgatctcgcgctcaatggacttggtggcggcgcggataacctcaatctgcgggccaagccactgcggcgacgtgcggagcgcgtaccggtcctgcttgggcttcatcaaggggtcgagctcgccgagcttcttggcaagcttcatgtaggagctgccctccaagatgtgctccatgatggcagcagcctcgatctgtcccgggtggtgcttgagcttgtgggtcaggtggtcg

SEQ ID NO: 3997 - DNA, 353 bp, Zea mays
  misc_feature (344)..(345): n is a, c, g, or t
tttgacaaattgatactaaagtctgagtttgaaccaggcccattttgacacaagatgagagcaacctgctttttacctattttttcctatttcaggttcttgattagttggaatgagggaagactgaactgaggttcttgatcacttggtatagttattgcacatcagcaccaagcctaatcttttacttgttccagctatagctgacatggtctctgaggttgctagccagggggctgacttgatatagttatttttttggtccacttgctctattccatctatcctagatgctacttaagaacaatgatgtatccctgagttctatgggtttccctgtttannaacagata

SEQ ID NO: 3998 - DNA, 462 bp, Zea mays
ctcggacacaaaagatcttggtggtaatggcactagcagtaccggtgcttcatcagacagagggtcaaagaagaaaagggggaaagggacagggtctaccaaaggtggatcacttgaaaaggatgatgacaatgaagaaagcattcctgttaagggcaagaaatctcacaggaaaaacaaggatgctggtgcatctggtgacataaaacatggtggtaaaaaaacgtcagagaaaatgatagaggagaatgcaaatatctttcctgatgaattgatagaagaaaaggttttggctgttgctccagagttagaagagttgggaggtcaggaattagatcaatatttcgacaactgtttctttttgagttgaagtgattctagaagttcactaattctttaaatgaatattaggctctgatgactcaaatgccccccttaaattgttgtcttctcacctgaggc

SEQ ID NO: 3999 - DNA, 486 bp, Zea mays
  misc_feature (284)..(287): n is a, c, g, or t
  misc_feature (318)..(318): n is a, c, g, or t
  misc_feature (322)..(327): n is a, c, g, or t
  misc_feature (332)..(338): n is a, c, g, or t
  misc_feature (343)..(344): n is a, c, g, or t
  misc_feature (352)..(353): n is a, c, g, or t
  misc_feature (362)..(371): n is a, c, g, or t
  misc_feature (373)..(373): n is a, c, g, or t
  misc_feature (381)..(386): n is a, c, g, or t
  misc_feature (388)..(389): n is a, c, g, or t
  misc_feature (391)..(392): n is a, c, g, or t
  misc_feature (394)..(394): n is a, c, g, or t
  misc_feature (396)..(401): n is a, c, g, or t
  misc_feature (408)..(408): n is a, c, g, or t
  misc_feature (410)..(411): n is a, c, g, or t
  misc_feature (417)..(418): n is a, c, g, or t
  misc_feature (434)..(435): n is a, c, g, or t
  misc_feature (437)..(442): n is a, c, g, or t
  misc_feature (462)..(466): n is a, c, g, or t
  misc_feature (468)..(477): n is a, c, g, or t
  misc_feature (479)..(482): n is a, c, g, or t
gccccacgacacgccgaacccggcagtgtacacgcacaccagcgccaccaccgcgaccgcgtacccacgcggcatggacttgccgccatcggtgcccagctgcgcgccaaagatccacgccatggccacctgggagaggatcagaacggcgcttcccagcatgaggagggagcggcggccgtagcggtcgacggccagaccggccaccgcgatggacgccaggctgaccacgtcggtgatgatggaccacacaagccacggtgcacgtcggtgatgatggaccnnnncggaatactttaattggcgaacctaggcganggtnnnnnnctacnnnnnnnatccnntggactannttacaaatnnnnnnnnnnangatggatnnnnnntnngnncncnnnnnnttcagtntnnaaaatnngtatttgccgaccggnngnnnnnnttcaaagttggcgctttttnnnnncnnnnnnnnnnannnnctta

SEQ ID NO: 4000 - DNA, 415 bp, Zea mays
  misc_feature (57)..(57): n is a, c, g, or t
  misc_feature (112)..(112): n is a, c, g, or t
  misc_feature (171)..(204): n is a, c, g, or t
  misc_feature (208)..(217): n is a, c, g, or t
  misc_feature (219)..(333): n is a, c, g, or t
  misc_feature (343)..(345): n is a, c, g, or t
  misc_feature (353)..(358): n is a, c, g, or t
  misc_feature (362)..(380): n is a, c, g, or t
  misc_feature (386)..(403): n is a, c, g, or t
acaccttgaaagtacgagttgttttacatttatgaatttctctgcatggcccttttngctagtatgtcggtttttacttttgtggaccgttgcaggaaagatgcatcgtgcntgccattggatctgcggtggactatcgtcaactgggttctgtatgttaccatctgctgnnnnnnnnnnnnnnnnnnnnnnnnnnnnnnnnnnttcnnnnnnnnnntnnnnnnnnnnnnnnnnnnnnnnnnnnnnnnnnnnnnnnnnnnnnnnnnnnnnnnnnnnnnnnnnnnnnnnnnnnnnnnnnnnnnnnnnnnnnnnnnnnnnnnnnnnnnnnnnnnnactgttgaannnattatggnnnnnnaatnnnnnnnnnnnnnnnnnnnctaaannnnnnnnnnnnnnnnnnacattattttta

SEQ ID NO: 4001 - DNA, 316 bp, Zea mays
ctagaggcgacaccttccttgttctggccgccctcctgatgtgggccgtcggcgtcgccaagtacggggagaaggtggcggcgatcaggggcggcaacaagagcagcatccgtagctctctcacgaaggaaccgcccgccgccaggcaccaccacatccaccactgggaccacggcctgccgagcaaggacgccgccgtcgacgaggaagaagcttacctgcgccaggcacatcacatgttccacatctccaagcgcgccgccgtggattcctggctggagaaagaccccgagcacaacaccctggagatgctcag

SEQ ID NO: 4002 - DNA, 1024 bp, Zea mays
ctctaggtctgttttcttttggcttcttgtacgcagttctatcacctaagttttattttcctatgttactggacatattttctttattttatgtcttattactaatctttacctttggttctccagcctagcagttatttttggtgctggacttgtaactagtttatctccttgtacactaagtgttctaccactaactctaggatatataggtaactatattgttttgtttgagatgattgttggcaaaaatgcccagaattgatcatcattaattactctgattcagtgctttcttcataaacatttaggtgcatttggctcagggaaaggccgatccgaggtaatttaagatgagtgaaaaattgtacttctttatgccatggaaaaacttgaagatattgctatttatctgttaggatatgtattaccacaaagttatcttcactgaaggatttacttgactaattaaggctatgaataatgttgaaacctgattattctagctgggggcttcccttgatacatgcattgacttggcttttctatcaattataggttgttgggaattcaattgcattttcactaggactagcaacaaccttagccattcttggtgttgctgcttcttttgctggaaaggcttatggtcaggtaggacaagggctcccagtggctgcttccggtttggccattatcatgggattgaaccttctggaggtaaatcacatgaaacagaaactacatatatagactgaagcatgccaatcagaatttcctcctaccttgtttccttaagttacaagatgattcaatccctgtatttcttggtttctcattataaatactactgtagaagtacaaaccaattttgtgatagtttgttactttgttcttatgattttcgtattcctgcttgctcctgtaaagtacatgtaactacgttatcaaatgttctgccctaagctgtttattatctgtccttaacaggtacttgaattgcaacttccctcattttcagcga

SEQ ID NO: 4003 - DNA, 369 bp, Zea mays
  misc_feature (354)..(354): n is a, c, g, or t
tcgctagtgccgactaggtataatgtataaatcactgttttagatttggcacagggcctcaaatttctcaggcccggccctggacatgctgcatagtttaagtttttttgtgcaaaaggatgcagatgcctagggcatatatcatgacgaggctaatattcatctggaaaaaagagagatagaaaaagagctgtagaagcacgtatgtgtattgcaaaaagtaactgtactagaattataagaggaatatatcagttgcaaaaaagtaagggaggcttacctgctcatccccatgctcatgtcccgctgtggcattccagcaggctgcatgattacgatggtgatggagaagcnaaaacgaaacgaaac

SEQ ID NO: 4004 - DNA, 361 bp, Zea mays
tcctggttgtggaaatccactgcagcaagcaatggggaattgttaacagtttttcatcttgtgtgcagtgtcagaatagcatatatatagctgagcacataacctcataatcaaatcaatgcacccaggaattcgtttctgcatgcctaggagctatataaacttataaatctatatagaataaaattctttcatatggttcggtgctttgtgtcgtttgtatcaaccgctgctgctagttcaacgctacagtgacatgtgaggaggcagatagccatagcagcagctagaactgcctgccgaattgggcccacgtgtgttcatgtagactaagattctggacttgtgccatttatgcaat

SEQ ID NO: 4005 - DNA, 398 bp, Zea mays
tccgcgcgcaggtgcagctcatgcagagcctcgtcgacctcttctctccgcccaacccaaccagtaattaatcaataccgcatggtcaattgattcttccctcttgcaccgccgtcgtcgccgcggtttgtgtctaaatcatcatcgcatatctcttgttcatgccacacatgcatgagatggatcgatgcatgattaagataggagattatatattgttgaggagagagatcgattattattattgctgctagtgcatatgtttagtgggtgtataggttgggaacacacattcatggaggatggaaccacacaccgatcaattggagggagggagaagagattgttcgggtaattaattgtaatatatatagagagagacaattgagccacataca

SEQ ID NO: 4006 - DNA, 375 bp, Zea mays
gcagtagagcatgaattgcctgctggggctgctccacaaccagttctcgatgtgccattggcagggaagggagagcttaaacatcatcagcccgttgaagaagctgccgaggtacacgaggatgtgcagtgcaagcaggaagctgagtgtgaggcccatacagttgatcaacaacaagaactggttcctgaagtggagtcggtcacaggaaaaaatgatgatgtgaatgttatccatgaatgtagcttcagtgataaagtggttaccgaattgcctgtgggggaagtgacatcgcaagggctgccgaaggatgaccctgaggcagacatggagtttgaggagtgggaagggatcgagaggagtgaagtggagaag

SEQ ID NO: 4007 - DNA, 416 bp, Zea mays
gaaacgttcttatctcaccaatggagattcaggcgtacaagttagacttacagccaccatcatcgcaggaagagtagtttgtggaatcagtacatgcatattgaacagttctacaagacagtgaagatggatcttcccgaaatactttaatagtggcagctagtaccggaacagcagtgttgcatgtatatatgtcattttcttggcatacagttagtgattggacctatggaagttgctggaagttgtcgttgaggcatttggttgcagccttgttatccacgaaggtgcatgcccttgttcttggtatcatgctcaacagattggaaagatctggagcacattgaagcagagctaatttgatttgggtagacctatgtgttcacacgaccagtgttgattcgtccaatgctaac

SEQ ID NO: 4008 - DNA, 212 bp, Zea mays
tccagtccagccatggtcggccccgagatgctcgtcgccgcgacggtgaaccaggtcgttcggaagatcaacgagatcatcggcgtcgcgcagggcgaggcgaagctgtgctgcagcttcagcgacgacctcgagggcatcaaggacaccctggtataccttgaaggcctcctcaagaacgcggagagcaactcctttgggagcgataggag

SEQ ID NO: 4009 - DNA, 416 bp, Zea mays
ctgccggtgccaggctgccgggtgccacagtgccctgccacccagcatcgctcaatcactcgttcgatccatgctgactcacccgaatggtgtggtccggccgtcgaccaaggagccgctcttctccttcggcgtcatcgccgacgtacagtacgccgacatcccggacggccggtccttccttggcgtgccgcgctactaccgtcacagtatcgccgtcctccggcgtgcggtcgagaggtggaacggcgagaggagcgtcaggttctgcatcaacttcggcgacatcgtcgacggcttctgccccaaggacaggtcgctggccgccgtgcaggccgtggtgcgcgagttcgacggcttccgcggcgggccgacgtaccacatgctcggcaaccactgcctttacaacctacaaa

SEQ ID NO: 4010 - DNA, 402 bp, Zea mays
agaaaagaagcaagaagtagaagagaaggggacgacgagtaactaacctgccgctgctgcagtgctgcctgcgtgcctgccggtggaactgacgaactctactctagactgaccgaggaagatgagaccagagtggcagatacgccttcgcccttgcctggcctgaactcgaaacgttccggtctcgttccgtcggcggcggcgtcaagtcgatgcaagcagaagcaggagcaggactacgggaggtgaaacaggaaagcagggccgcaggggacagtggccagtggtggtgctgtgaagactgaagacaaggcgacatggcattgggaaccacgaaagcaaaagcttgggtttctccctctgtcaagtttatgtatatgtatgtaaaggaggaacgaaggt

SEQ ID NO: 4011 - DNA, 468 bp, Zea mays
actattacatcacatcttaatggcgctagtgttaaggttgtcagctgtattatccaaagggatgaagggcgtccaccaatgcgacactccttccaatggtctgttgacaaactttattatgaggaggatccaatgcttcgccatgtggaacccccgttgtctacattccttgagctggtatgcagctatattcatacttttcatattcttttaatatcctctttgactataactgcacctctttaacattttctgtaaatacaggaaaaagtaaacttagaaggttacaatgaagtaaaatacactccatcacgtgatcgtcagtggcatatttatacgcttatcaagaacaagaaagatcagagattaaatgaccagaggatgttccttcgtaccatagtcagacaaccaagtgcaacaaatagtttcctgacaggtaatattgacaatgaagtagggcacacacaa

SEQ ID NO: 4012 - DNA, 1511 bp, Zea mays
  misc_feature (426)..(427): n is a, c, g, or t
  misc_feature (433)..(434): n is a, c, g, or t
  misc_feature (439)..(444): n is a, c, g, or t
  misc_feature (447)..(447): n is a, c, g, or t
  misc_feature (449)..(457): n is a, c, g, or t
  misc_feature (459)..(459): n is a, c, g, or t
  misc_feature (464)..(476): n is a, c, g, or t
  misc_feature (478)..(487): n is a, c, g, or t
  misc_feature (489)..(501): n is a, c, g, or t
  misc_feature (503)..(509): n is a, c, g, or t
  misc_feature (512)..(542): n is a, c, g, or t
  misc_feature (546)..(562): n is a, c, g, or t
  misc_feature (564)..(564): n is a, c, g, or t
  misc_feature (573)..(581): n is a, c, g, or t
  misc_feature (584)..(606): n is a, c, g, or t
  misc_feature (609)..(620): n is a, c, g, or t
  misc_feature (625)..(630): n is a, c, g, or t
  misc_feature (634)..(634): n is a, c, g, or t
  misc_feature (636)..(646): n is a, c, g, or t
  misc_feature (653)..(656): n is a, c, g, or t
  misc_feature (658)..(661): n is a, c, g, or t
  misc_feature (664)..(675): n is a, c, g, or t
  misc_feature (684)..(687): n is a, c, g, or t
  misc_feature (689)..(690): n is a, c, g, or t
  misc_feature (693)..(693): n is a, c, g, or t
  misc_feature (696)..(706): n is a, c, g, or t
  misc_feature (710)..(714): n is a, c, g, or t
  misc_feature (717)..(721): n is a, c, g, or t
  misc_feature (723)..(725): n is a, c, g, or t
  misc_feature (727)..(731): n is a, c, g, or t
  misc_feature (736)..(742): n is a, c, g, or t
  misc_feature (746)..(748): n is a, c, g, or t
  misc_feature (767)..(769): n is a, c, g, or t
  misc_feature (777)..(786): n is a, c, g, or t
  misc_feature (792)..(792): n is a, c, g, or t
  misc_feature (794)..(798): n is a, c, g, or t
  misc_feature (800)..(800): n is a, c, g, or t
  misc_feature (808)..(809): n is a, c, g, or t
  misc_feature (811)..(814): n is a, c, g, or t
  misc_feature (816)..(821): n is a, c, g, or t
  misc_feature (825)..(833): n is a, c, g, or t
  misc_feature (837)..(862): n is a, c, g, or t
  misc_feature (864)..(866): n is a, c, g, or t
  misc_feature (872)..(886): n is a, c, g, or t
  misc_feature (889)..(889): n is a, c, g, or t
  misc_feature (893)..(904): n is a, c, g, or t
  misc_feature (906)..(924): n is a, c, g, or t
  misc_feature (926)..(926): n is a, c, g, or t
  misc_feature (930)..(936): n is a, c, g, or t
  misc_feature (938)..(944): n is a, c, g, or t
  misc_feature (951)..(956): n is a, c, g, or t
  misc_feature (958)..(963): n is a, c, g, or t
  misc_feature (974)..(975): n is a, c, g, or t
  misc_feature (979)..(980): n is a, c, g, or t
  misc_feature (989)..(990): n is a, c, g, or t
  misc_feature (992)..(1000): n is a, c, g, or t
  misc_feature (1002)..(1009): n is a, c, g, or t
  misc_feature (1011)..(1019): n is a, c, g, or t
  misc_feature (1023)..(1029): n is a, c, g, or t
  misc_feature (1031)..(1052): n is a, c, g, or t
  misc_feature (1057)..(1076): n is a, c, g, or t
  misc_feature (1080)..(1082): n is a, c, g, or t
  misc_feature (1085)..(1092): n is a, c, g, or t
  misc_feature (1096)..(1104): n is a, c, g, or t
  misc_feature (1106)..(1107): n is a, c, g, or t
  misc_feature (1112)..(1113): n is a, c, g, or t
  misc_feature (1115)..(1117): n is a, c, g, or t
  misc_feature (1119)..(1133): n is a, c, g, or t
  misc_feature (1135)..(1139): n is a, c, g, or t
  misc_feature (1153)..(1160): n is a, c, g, or t
  misc_feature (1165)..(1179): n is a, c, g, or t
  misc_feature (1182)..(1195): n is a, c, g, or t
  misc_feature (1197)..(1200): n is a, c, g, or t
  misc_feature (1203)..(1204): n is a, c, g, or t
  misc_feature (1206)..(1206): n is a, c, g, or t
  misc_feature (1210)..(1216): n is a, c, g, or t
  misc_feature (1220)..(1220): n is a, c, g, or t
  misc_feature (1222)..(1230): n is a, c, g, or t
  misc_feature (1233)..(1233): n is a, c, g, or t
  misc_feature (1235)..(1247): n is a, c, g, or t
  misc_feature (1249)..(1251): n is a, c, g, or t
  misc_feature (1253)..(1258): n is a, c, g, or t
  misc_feature (1261)..(1271): n is a, c, g, or t
  misc_feature (1273)..(1282): n is a, c, g, or t
  misc_feature (1284)..(1287): n is a, c, g, or t
  misc_feature (1290)..(1294): n is a, c, g, or t
  misc_feature (1296)..(1298): n is a, c, g, or t
  misc_feature (1303)..(1305): n is a, c, g, or t
  misc_feature (1308)..(1326): n is a, c, g, or t
  misc_feature (1330)..(1332): n is a, c, g, or t
  misc_feature (1335)..(1355): n is a, c, g, or t
  misc_feature (1362)..(1363): n is a, c, g, or t
  misc_feature (1373)..(1375): n is a, c, g, or t
  misc_feature (1377)..(1407): n is a, c, g, or t
  misc_feature (1409)..(1412): n is a, c, g, or t
  misc_feature (1415)..(1426): n is a, c, g, or t
  misc_feature (1428)..(1430): n is a, c, g, or t
  misc_feature (1432)..(1438): n is a, c, g, or t
  misc_feature (1440)..(1453): n is a, c, g, or t
  misc_feature (1455)..(1461): n is a, c, g, or t
  misc_feature (1465)..(1487): n is a, c, g, or t
  misc_feature (1489)..(1502): n is a, c, g, or t
  misc_feature (1504)..(1508): n is a, c, g, or t
cagcttccatccgctccaaggagaatgctcgtctgcgtcaccgccggagcccataatggatcaagttgcggtcaccgtgcaccgtgcgccgcctcagcttctccctcaccgtcaccgcccgaggccctgcccgtacgcgccggtgatggcaacggtatcagcagcggaagctgcgccgcaattggcacacgcggcgactgcccacgcctccacgtattcgctcttcaacatggccgctgccgccgccgcgcctatggccgccagctcaaggtcgaccattgacgagctgacaacgctggttgttgctcccacccaggcctacgccaacctctcggccgcgacgacgggcggccatctcctcccatatctgacgccagaaaaaatatctgatctgaataggcacaccatctttgtgatggatgaccnnactaannatgtnnnnnnggnannnnnnnnncnctttnnnnnnnnnnnnnannnnnnnnnntnnnnnnnnnnnnncnnnnnnnagnnnnnnnnnnnnnnnnnnnnnnnnnnnnnnngtannnnnnnnnnnnnnnnngnaagaactannnnnnnnnccnnnnnnnnnnnnnnnnnnnnnnntcnnnnnnnnnnnncctcnnnnnnactncnnnnnnnnnnncataacnnnntnnnntcnnnnnnnnnnnngcgacttcnnnnannctnttnnnnnnnnnnncccnnnnntannnnncnnnannnnnctatnnnnnnnttcnnnttatttctattttcttccnnncttactannnnnnnnnncccccngnnnnntnggaccaanncnnnncnnnnnnctcnnnnnnnnnacannnnnnnnnnnnnnnnnnnnnnnnnncnnncactannnnnnnnnnnnnnnctnattnnnnnnnnnnnntnnnnnnnnnnnnnnnnnnnanaccnnnnnnnannnnnnnccccacnnnnnnannnnnncatccccttcnntccnncaccatacnnannnnnnnnncnnnnnnnncnnnnnnnnnacannnnnnncnnnnnnnnnnnnnnnnnnnnnnccctnnnnnnnnnnnnnnnnnnnntccnnnccnnnnnnnncccnnnnnnnnnanncttcnncnnncnnnnnnnnnnnnnnncnnnnnccttccatcctccnnnnnnnntcccnnnnnnnnnnnnnnnctnnnnnnnnnnnnnncnnnnctnntntctnnnnnnncccntnnnnnnnnntcntnnnnnnnnnnnnncnnntnnnnnntcnnnnnnnnnnntnnnnnnnnnnannnntcnnnnncnnntctcnnnttnnnnnnnnnnnnnnnnnnncccnnnttnnnnnnnnnnnnnnnnnnnnntcctctnncaccccttannncnnnnnnnnnnnnnnnnnnnnnnnnnnnnnnncnnnntcnnnnnnnnnnnncnnnannnnnnncnnnnnnnnnnnnnntnnnnnnncacnnnnnnnnnnnnnnnnnnnnnnntnnnnnnnnnnnnnntnnnnnttt

SEQ ID NO: 4013 - DNA, 552 bp, Zea mays
acgctctctggtgtatcttaccatgtttgctggcacaagcacaacagatcgatatgaactcttcatctctcgagcagtttgtatctctattgcttggcaggttcacacacattaaagatgatcttgaaagccacagagttgacaaaaaagaggagttgacagctgaggacgcttacttgaagcatggggtatccgcatctgtatccttcctttcccattgaaataacttgctttgttttttcgtgaaaaaaccataacggcttcatggagatgtggaagtatttattcactttctcaaatttaacacgtcaaacatggcgaaccattttggagcagcaccacattgcatttcctatcctaaaaataatcaacagctcagggcgatctgctgtgtcatggagaggtggatcgtggagaagtcctccctgggcgaagacgaagacgacgccccaccgactgaaagcaccgttgaagatgctagacatcttctgaactactgccagaattatgacctgtagcttgcttactgcaactttagtggacatagctgac

SEQ ID NO: 4014 - DNA, 364 bp, Zea mays
tcttgcttgatgatgaagaagatgggaagaaacttgacaagagccgctggtctgtcaatttggacccactttgctggatgattgttgatcgtgtgtacatgggctgctttccaaccccactcagggtactacaaacactagaattcttaatgtcaatgttacagcttgctagtaaagatggccgtgttgaagatgccgtgcctccagggaaaggtattttgtccattgctcgaggaagcaggcaacttgatccatacatccacgcgatattgaagaacacaaaccgaatgataatgtactgtttcctcccaatattccttaaaagtatgggggaagatgatctacttgcaaatcttgcattcct

SEQ ID NO: 4015 - DNA, 337 bp, Zea mays
tggaatataacaagaaggtggatcaagaagataccattaacagacaagggacagctaaggaagacagtggtgtggagccacaagaggagaacgttgtggatccagatcaaggtttggatgacttttctgtactagatgagggtaatgtggtggcacagtgcaccagtgatcaattgagaacaaccatggaagataatgctgcagagatgcaagaggtggtggagcaagaaggtgccatttttgaaaagggtgtgacctcagatggcattactgttgaagatcaagacaaggaaatggaacaatctgcaggcgatgaatcaagagtgaccaagggtga

SEQ ID NO: 4016 - DNA, 387 bp, Zea mays
  misc_feature (21)..(23): n is a, c, g, or t
  misc_feature (218)..(220): n is a, c, g, or t
  misc_feature (321)..(323): n is a, c, g, or t
  misc_feature (346)..(349): n is a, c, g, or t
  misc_feature (355)..(357): n is a, c, g, or t
cccgaagcagtttttgatgannnacgaagcaacagtatcttcgtatggtggcaatgctgcagtcatggcaaaatcttttgttatggctgtcaggagtgttgctcaaacctggtattcctcccttcgaccaggaacgatcacttcatggcagaagctgaaggatatgttgttaaccagctttcaaggatttcagacgaagccggtcactgctcaagctnnnttccagtgcacccaggatcacgaagaataccttcaggcgtatgtccgaaggttcttgcgtttgagggcacaggcaccaacggtgcccaatgaaattgtcannnaagccatgatcaaggggcttcgnnnnggaccnnnagctcaatactttgctaggaagcctcctca

SEQ ID NO: 4017 - DNA, 921 bp, Zea mays
gcatctattcttatagtttcagactttgggagatacacaaaggaactggcttccctgaggaaagatgttgtggcaccatatgtgcatgttgtgggttccttccttgatgacgatccacctgatccatttgaggctcgccatacactgcttttctttcgaggccgtactgtcaggaaagatgtatggaactgatttatgattgtaataactccctcttccccttctctatgatctatcttaatttgttagtctagttcactcttttttctaaagggcaggcttgatgcagtggtgagagagctatctcactgaatcatcgggtcacgagttggaggcagcctttctacatttgtggaagaaagacttgcctcaatttattcttttcctagaccctactcatgtggggtttgccctttttagttcactcttttttctccttggcggaatttgactaggcattaaacaactttaaggttaaatttatttatagcgttcatttaatttttttcaggaagggaaaatccggtcaaaacttgagaagatattaaaaggcaaggaaggggtgcgctttgaggatagcattgccacgggcgacggcattaacatagtaagtcatttttcccatttatactctttttcttagtgatattaacatttttctgttaagttttttttatagaagggtagacccgatgcagtggtgagaattatctcatggagtcattaggccatggtttgaagcagccagacctcactcatgtgggagcctccggcattgggtctgcccttttattaaggcttctttacaatagagcatgaaatttacaaatctggttgatcctaacagtctacagaaggtatgcggtcatcaaagttttgtctccaccctgctggggacactccttcctcatgccgcctgtt

SEQ ID NO: 4018 - DNA, 360 bp, Zea mays
ctcctcagcctctcaccgtctcacgcacaagcacaaaaggccctcaagtaccggagagggagcgtctggttcgtcgcagccctcagccacggtcacgggccgtctgtgcgtactgccaacctagcgcaacacgtcgctccctatgtcccaacccgtgacccccccggcccccgtagtctgtcccactctgctgctgcttcccgtgatcacgtccacgtgtcgctgcgacgaccgatcactgaccaccggccgccgcaacctagtactactgggatgagagggatcggggcatcgggccgtcggggcacgaacaaaagcagcgggaaagtgacgacgggcagggcgggaggagaagctgtg

SEQ ID NO: 4019 - DNA, 595 bp, Zea mays
  misc_feature (561)..(563): n is a, c, g, or t
gcgtgcgcatgttttagttatgtatatagacaactagcagctagatcgaccattcggctcttaatcaagagctagctgtccactacaacgtgtagcacgacgctatcagggcatgtacaacctagatacagctgcacggtactccaagtataagacacaactaaaacacaacataatacagtggtcatgtctaaaacatgtgtcttaccatattcattgtaccaatcagagcattcaataaattaaagtgaccaatcagatagtctcctgtctcgaatatagagctaagacactgtgtcttcgtcaagatacatgtcttgagattttttatattcacccccctagacacactctaagacacaacttaagatacccactgtacatgccctcacactgctaacactatacattaattactagctagcgacgacgaaggcgatagctgttgtcgtcttagcaagaacgaaatccagaacaatacaatactgctggtacacagtattactagctaacgactgacctggcagggcgatgaaagcgtcggcatgtttcgccatttcnnncttgcgctgatgcatgtccctgaccactttca

SEQ ID NO: 4020 - DNA, 1011 bp, Zea mays
  misc_feature (1001)..(1005): n is a, c, g, or t
gcatttgatgctggagaagatggacttggaaaaaatgctcattctcttaagaaggttattttattcagttcttgatgtgtatactttgacgttcaaaatttttctttgatttgactatgctctttaacctttttgtgcagggatgcgattgcttgggctacataaaatattttgatgcacatttcacaaacttcactggtggtgtggagacaattgagaactgtgtttgtttgcatgaggaggatcatgggatcctttggaaacatcaagactggagaactggtttagcagaagtaaggcggtcaaggaggctcactgtttcatttatctgtacagttgcaaactatgagtatggtttttactggcacttctatcaggtaatatttcatttcctcttataatgttagaaagtaagtaccatttacctacaatacccaatatatatattatctatataagttgattaccgctcactgatgggttttagtgattaaatgttcttaaaaatttctgaagctttttccgcgatcatgtctaagcacatttttcttaaaaatgttacttcatttcaaaggaattgaaatttactcaatagagtaggttatttggtttggaatttgacattccaccactttcccaacttatagatataagcctataacacactcataggatgatgtgtagaaattgattttatgtatatatttctattttctactctgcaacttataacacgctattcggctcactactctatagtagaaatttaacatataaatatcttccacatatggccaacatcaatatacgattaaattatgtataccatattagcttaattgttctatgcctaaattaagattattagaatggaattcaattctaaggatccaaacggggactaagaggaaataattttctgaagcttcaaagttttgtaattatttgttgatcctcttggttgcaggatgggaaaatagaggcagaagtaaagcttactnnnnnctcagt

SEQ ID NO: 4021 - DNA, 401 bp, Zea mays
aaactcgctgtccaaactttgctgcatgcacctgctgtaaccctgaagttggcagaacctaaaagcgttgaaaaatcttatgccttctgcagcacgatctcggcggcgtcgtatgcaggcctgatctacctcggtctacgcttcctgcgcaagtccatactgagcaggtaaaaaacgctgctaatctaatctcctcggaggaccaagcaaaaccatttcttgtgtcattgataaccatggtaaggtaaaaaaaaacgcaggggtgaaagtgtggagtgcgacgatgatggaggcgtcggcggcgataggtgctgctacctggtcggggaggaggatgccgtgtggctgctgaggctggtgctgccgtacgtcaacgaggtgctgctaaacctgaggtctct

SEQ ID NO: 4022 - DNA, 390 bp, Zea mays
taggtagtccggccggccgtacgtatttcctggtgcggctggtgccgtggacgacgaggttggtcatgttgccgatgaggtaggcggtgaggccgaggttgaagagcatgtagaacgtggtgaacaccatctcgcccgtgttcacggcgtgcatgtcgccgtacccgacggtggtgagcgtggtgatggaccagtacatggacgcggcgtaccgcttccacacgctctgctgcttgaagcccggcatggaggagctcagccacgtgtgcgccgggtccgggtacctgtccgccagcaggtagtagaagcaccccgcgcagtgcaccgcgaacagcgtcacctgcgcgcgcagacagaaagacagttccattatttgctgatcagtctgct

SEQ ID NO: 4023 - DNA, 341 bp, Zea mays
cagctacttcaatgccacatctttcgttggcaacccaggcctgtgtggaccataccgcggtccatgcagtgcaggcattgctggggcagaccatactgcccatggccatggtgagctgaccaattcggtcaagctgctcattgtgctcggcttgttgatttgctccattgcatttgctgctgcggcaattctgaaggctcggtcattgaagaaagctagtgaagcgcgagtatggaaactcactgcattccagcgcctggacttcaccagtgatgatgtgctggactgcttgaaagaggagaacattattggcaaaggtggtgctgggatagtgtataagg

SEQ ID NO: 4024 - DNA, 488 bp, Zea mays
tgcaccaatggctggaatgatatctgcaggcacagaaaaacttaaccagtctgatgtgaataaaatgaatgtattcagtttaacatatgaattatactggaaacaaggctgaatagcgtaagaacaaatggaaacaggaaacatacatcagcatggggaagccattcttttggaggagcttccgcagaaagaagacaattctcaatggcaaataagacacgattctttcctggtgtgggtaatgtcacatgtgacaccatatgagatattatgtcccacaaaggcttgctgaaacccgataacacaaaattaaatggtgaggtagttgaaacttgaaacaagcacacacaaagtacatgaatactaaatttacctgcaccctgaaggagaaaaacaaagaacaaatatttcctcaagggcatcacgaaggacttggaaactaggagaatgggacacaaggcagatgcatttatcagcaaaggagttcg

SEQ ID NO: 4025 - DNA, 384 bp, Zea mays
  misc_feature (372)..(378): n is a, c, g, or t
cgcatagtacgcaagggtggcgttcttcagcctgcacagcatcagcaggaagtaccgcatctgggcgaagcagacgcccaggttcagagccacggccagaacgtgtccggccgagtgaaccttcctgccaggtaaggtccagaagaacgagccccacgaccagctgaggccgcaggacacgacgcacgtcagggcgaacgtcgcggccgtgtaacccaccggcatgcgcgttcctccgccaaccccgatctggacttccatgatcagtggaatcgcgaccttgcagacaaaatttcgaccatgaacagtatcagttgcttgtttttcaagaacacgtttgagtgtcttagtttttttttttacaaaaaaatnnnnnnntttcgg

SEQ ID NO: 4026 - DNA, 532 bp, Zea mays
tttgccggttgtttatgtgttgtttgtcccgtcggttgcaggcacaggggaggtggtgacatgctcgcccacccagagcccggagcttttcttcgccgtacttggtgggcttggccagttcggtatcataacccgcgcaaggattccgctgcaagttgctccgcccaaggtacacagacacaattgcgcacgccctcgatctgcttcctctctagctggtagcagaaatagaaagaaaatcaggaaagctggtaactaaaagcagctttaatttggccgataattttctatgattattaggtgagatgggtgagggccttctacgacagcttcgagacgttcaccaaggaccaggagctgctggtctcaatgccagagctggtggactacgtggaggggttcatggtcctgaacgagcagtccctccgcagctcctccgtggccttccccgcccaggtcaacttcagaccggacttcggctccgacgacggcaccaacaagaaggtctgctactactactgcatcgagttcg

SEQ ID NO: 4027 - DNA, 338 bp, Zea mays
  misc_feature (9)..(11): n is a, c, g, or t
  misc_feature (157)..(158): n is a, c, g, or t
  misc_feature (255)..(258): n is a, c, g, or t
aatggcccnnnggcgcggagtaagtgccgatactccacacgtgtcctcctgtcgtcgatgatgatgtctgtcccggggaggggagtggttgtcgtggtgcctcgaccgtccccgggtggtgccaccagttgaagccgtggccgactcggtcctggtnncctgactccgagctgggatgccatgatcccggtcgtactcttcccggcgacggatctcgttctcatgtcgtcgttcacgcgaagcattgatggagcnnnncgcgtcccggcgactgttgatggcgtgtcgtagatcgttcggcgggtgagcgaggggtaggagatgattggctgcttgag

SEQ ID NO: 4028 - DNA, 373 bp, Zea mays
tacacggtaaccattctgcgcctttcctaaaagtcacacgccagtaaagtaatgatcactctgcttcattttccttggacttaatgcctctgctctttccccagccggtgcaatgcttcatttggactggacggattttggacttaacgagactgatgcatgaatcatgatggcatgagaccttcgtttagcacactgccagctataattctctagcttttgtgtagtagaatttggaaacatgcgttgctgttggattaggcgtctgtttgtaaataggtgtccctcgcattcaaatgttgcagcttaggccctaggatccattagctactaatagttagctagctaatagtctaaagggtgtttgaacgac

SEQ ID NO: 4029 - DNA, 387 bp, Zea mays
tccttgcagagcgcggcatatatggtcatccgtgggctcaaaacgatggcactccgcgtcgaggcacataacagcacggcgctgcgcatggcacgcatgctagagcgccacccgaagatcgagcgggtgcactatcctgggctggagagcagcccctggcatgagcttgcaaggactcggatgtccggctacggaggcgttgtcagcttcgagttgaaggcggacttgcgtggtaccatgcgttttgtcgatgcgctggaaatccccttcatcgcgacctcgctaggcggctgcgagagcctggtgcagcaaccggcggtcatgtcgttctggggccacagtgaggaggataaggccaagaacgggatcaaggacaaccttgtaagg

SEQ ID NO: 4030 - DNA, 228 bp, Zea mays
  misc_feature (182)..(184): n is a, c, g, or t
  misc_feature (194)..(197): n is a, c, g, or t
  misc_feature (216)..(220): n is a, c, g, or t
gtcccgaaacagcagcgatggtttagtgcctctgcctcttaatgcagatggtgctgttggttcaggaacaagaacaagggaccttgaaaattcactgcagaaggcacaagaaaactttattaagagccagattgaggtaagaaagaatcttgatcccgaaagtactctttttttttgaacgnnngattccaaannnnctcaacttacatccttccnnnnngctttatg

SEQ ID NO: 4031 - DNA, 378 bp, Zea mays
cgacggcggcggcgagctgatacgcaccggtagggcatccaagctcacagacgtgttcgccttcggtgctttccttcttgagatcacctgtgggcgaaggccagtcagcattgacgacgacgccgctcaagaaatgctagtggactgggtcctcgaccacttgcgcgaagaagggtcgctcgctcagaccgtcgacgtgaggttacggggtcaatatgatgtcgatgaggtgttcctagtgctgaagctaggtctgctgtgctcgcatccatacacaaacataaggccagatatgcagcaagtcatgcaatatctcgacggaagcacaccacttccagatttgcagcccacagatatgaccttcagtgcaatggctct

SEQ ID NO: 4032 - DNA, 366 bp, Zea mays
taaaaagaagtaaaaatcggacgatccatcaacaaaactagaacaaagccatgttgcagcgtagctatcatgtatacaagccgaagcaaatctatccccttcctattatttacatcggatgaccaaaaggaggcctgctcagtatctgttggtaagctggcggaggtgcaattgacgttgggaagtgtggtcgcgagaaaggctctacctttggctctcctggcatcataagccctgggtacccctgcatagctgatggatttccaatcatttttgtaggggcaagtgatcctagagagggcattgggatcgtcgcgcctggcggaaccatgccgaagcggaaattaccagttgttggtcccaact

SEQ ID NO: 4033 - DNA, 386 bp, Zea mays
tgtctgcggaacagatcgtctctcttcggtaacgacagcctagcgtaggccctgcatgcatgacatccaaagaggagggcaaagccagtgcgcctgtagcatcgttgtgccctctttctttctctccatcatttgaagagacggaggcatccagcttggttttggaacgtgcgctgcttaatcgacttgtttatctttttctgtcacctgcttggattcccctctctctcgttgtcgttgtatagaggagatgatggaaccaaagcagttgttgctcctttgactgagatatactatatacacgtagctgggcgtaaatcgtaatgcaagccccgttatcgtcgccttgtgatgtatctcttctgtcagtcgtcatgcatactctg

SEQ ID NO: 4034 - DNA, 376 bp, Zea mays
cgaggacggccttcatgaactcgaagaggctgagattgatgagtatgttgccgaaattgaagcagagaaagccgctgccgaggctgcaaagaagggtgcaccaaaggggaactgattccgcacaagcttagattgcgcctcttgttccagagcatgtcttatgattcacctcttagatgattgcccggatgtttggatacaggaatatttataaaaaaaaattaagatgaagccgcttggatgaaaacatgctatgtgatgcatagtattgcaataccatggtggtttgtggcttgtgtgacttgtcgcagtggtctcttgatctgtcagtattattttctggaacctgtcagtattattttctggaacctggatg

SEQ ID NO: 4035 - DNA, 364 bp, Zea mays
acagtcggcggcggtcggccccggcgtcgaggagaccctggtggcagcgctagagaggaccggcggtgcactcccctttctccaggcggccatcgatgtcgctcaccgcaggtctggcctgttccgcgacccttcggcggtgagcaaggttaccgcgatggcggcggccgtcagggcgcaggtggagaccgaggagagggcagccagagaggtcaagaggaaggcggaggaggccgagaggaaggctgcggtcgaggcgcagaagcctgacatggaggcggcgacggcgacggcggaggagaagctggagaaggaccgtatggatgcggataaggcggaggaaggcaacgttagacaaccaaat

SEQ ID NO: 4036 - DNA, 367 bp, Zea mays
cgtcttctgcgccaccgtccatactcccatgtagaccaaggccttgcccatggccactccaacggcgccgacattggcaaccaaaacaaacgctgtgggaaccagcatcggcgtccacctcatctcgtacaaatcggcgaacttgtcgtcggtgcccgcggtggtttgcttggaggtgaccctgaagtgtatgcccttcctggtgaggagtttctttgccatgtgccatagcgctatcgggtacgcgctcgtggatccgatcatgaagaactgctcattgcgccagtggtccagccatgccacccctgaccacttcatctcgagccatccaatcatgtggatcatcaggatggttatgagcaggtac

SEQ ID NO: 4037 - DNA, 363 bp, Zea mays
gacgtcattgatgatttcagtgacgcaatagggcccaaagaatctgggctgcagctttcccttctgtgccagggacatggacgccaccggccgattgcggagacgcaacaggacccagtcccccacgttgtaggccaccgcccggtgtttgttgtcgtagaaccgtttctgtacagcctgagcctgctccaggcgatgtcgtacatcctccaggaatgcttcccgctctgccattgtcttggccactgctgccacccgggtatcccccgcctcataggaccggatggatgggggatgtcgaccatacaccacatggaagggtgtgtcgcggagcgaagactggtacgccgtgttgtacgtgta

SEQ ID NO: 4038 - DNA, 389 bp, Zea mays
gtgtgtgtgtgtgtatggagggcatggcggttaaggaaggaagggagcgatttgcagcgcacctgcatgcatgattgctctttgctcctacgacagcctagctaacggcggcccgtgcgtgaggggagagggaccttgctatgctagcaccgagatctgagatctcggcgttactagctaggtgtggtgtaggtgatccatcgatgggtcgggggtcgctgtcgccgtcgtacgtcgttcgttcatcgcacgtacacgcgcacacagtgcaggattcctgctgcaactgttggttttccgtcaacgcgcgtgcactggatgtggtcgttcccccatcatcatccagatcgcatcacttgttttccacggcccgttctgattctgaccac

SEQ ID NO: 4039 - DNA, 964 bp, Zea mays
agcttttatagcctctgttatttgcagtgttccttttggtgtatatgctgctgtggtggtttatcaggtattgacgaatctttttggactggtaacagaaaaatatcatttgtagtataaagctagtattatgatgaaatattacctgatttagcatgatagatgtggaggcgtgaagcttataattgcaatcttgtttatgtggcaggaatcctcacttttcttgggactgtcttatgcaatatcatcagtatccatctttgatgaatatacaaatgacgtacttgacatggcaccaggatcttgctttcctaggtacaaatggtttattctgtaccagaatattgtccttgaattgtacaccaaataatacaagttactcaaaatttcactttccatgagtaggtttaaatataggacaaatgaagcttcctcacatggtggctctctctcgagacccgcttcattcaaggacaagcatgatggaaagaaagcccctcagcgtgtaacatcatttaaaagtagctttgatgagttcaatccattcaaggtgatctttttctggaaaattggcaaaagaaatttcactgtgttcccactacataaacattctctatactgacactggtccatgctccatttagattagtttcattgtattctatttcctccattctaaattataagacattttgacttttctagatatatagcttttgttaggcacttagatatacaccatgtctaaatacataacaaaagcaatgtatctaggaaaaggcaaaacgtcttataatatagaaccgagggagtattatggtggagctatactttttgtagagtttagagattatactatgaggttttataatcccatttaaaattcaaaaccatgatatgattctttggtgtttggaaatttgtgcagtataactgatttaaatgtgttgtttagttgctagat

SEQ ID NO: 4040 - DNA, 478 bp, Zea mays
agggggttgaacagggtaaaaggaacaaaaaaaagggcaacagtaatctacaatttacaagaaaataatgaacaaaacaatagtaagtcctgtgttaccctatttcgcgtgataaacctcctacatgatgcccgcctacatgacgacctgtgtggacctgatttggagatcatgaatgatgctcttcctcgtgagaagttgtgtttccatgtggtgcatgagttgggtggctgtatttcttgaagacccgctcttggttttccctccaccattcttcagcctgattctctgcgaatctcctcttgctgtccgaacaaacaaatttcagtcttcagtgaaggttaaggtaaaacaatagtaatttcaggttcagaatttatacttcaatgaagggggaaagggtacctgaatcggacccgcttgaatactttggtaccgtcctttagttggataagtgtcacatatacgccaggttcaa

SEQ ID NO: 4041 - DNA, 355 bp, Zea mays
ctgctgcaggtaaccatctcttgtaatggccggccgatcgatcgatcgagagctcaacaattcaagtgtcctgctatagctagctactacgacgtcgtgctacgatcgtatcggtttcggttcgttcctacaaatatagcctagagatagagtgtctctgtctgtgtgatcgatggtattgttatgatcatatagaaaagaccagtgtagcatgcatatgcacttgttgcaatgtttgctttcaagaagaaactctggagggaggagagaggctcggtttggatgctgatcatgcacaaatattactagtgtctacagctgctacttcattaaagctgctagcatggtcacttgt

SEQ ID NO: 4042 - DNA, 287 bp, Zea mays
  misc_feature (56)..(61): n is a, c, g, or t
  misc_feature (222)..(224): n is a, c, g, or t
  misc_feature (264)..(267): n is a, c, g, or t
gcctcggtcattccggcgtcaacatgaggcgtcggcgtcagtgcgctcaccctcgnnnnnngccgcaccgactgaggacctgcgggcggagctcaaccgcaggcgtgcgggagaggatgctccaatctctctggagaggcctgatgacctgcgggcagaactcaaccgcaggcgtgcgggcgaggacgcacgagtctctctggagagggcgcgtgagcgccnnntaaacttcgagggtcgcaacctcgaccaggacttcgctcnnnntgcgccacaaactccaaggg

SEQ ID NO: 4043 - DNA, 405 bp, Zea mays
taatttctgctcgctcctatttcacgcctagggcttggggggagcctccacgtgagggagtgttggaatacaattggattgctcatgtcttttcatcaacttaatcttttgtattgaactggtcggtgcatgcaactcaatgcatataaatatcttttaagtgtttcatcagggcgagaaagcatgtctgttagcatataagcatgaaaatgtgttctgtttacatgttgaggttgcttctaatgtttacctttgaaatacttgtttggcatcttatttgtataaactgtgtgctttgtgatgataaatgcttttgagtagtgtttgactaaccatttatgtggcttgcagaaattttttcttgatgctggtgaaggagatgaagatgaagatgctgcagaaaaa

SEQ ID NO: 4044 - DNA, 372 bp, Zea mays
aggcaaacagcaaactttccaggataagtctctgactttgttatactttcctgtgtgcaggaggtcttgaagatctggaactgcaggtgcagaatgctattgcagcagcagcagctgcagctccacccaaggaaagcaatagtgtcagcagcaacgatcctggcagctcgtcctctgtgatttttccgtctggtccagctgatcaagtccctgttcctgctacctctccagaaattgagccccgttttgcaaaccaaatccctgctgcttcttcgaaggttaaggcaccatgcctggcaggtctgttgtttgtaagcgacaggaacgagaggaactttaggttgcctagcccttctgataattgtccatgga

SEQ ID NO: 4045 - DNA, 374 bp, Zea mays
gctctgcttggccgtcgttttgttggtcaccgtcgtcgttctcgtggcactgcattgccatcgcaggaggaacagagagagccagcggccgttcagctcgagcgtgagggcgttcagctgcaaggagctctaccaggccgccaacggcttcgagaaactgctgggcaaagggagcttcggcgaggtgtacagagggacgatgaggtcgccgcacccgcatctcatcgcggtgaagaagctcatcagtcatcacctcgaacgagtacagcgagcaggagttcaccaacgaggtgcagtccatcgggcagatccaccaccggaacttggtccgcatgatcggctactgcaaggaaggcaagcaccggatgctcgtg

SEQ ID NO: 4046 - DNA, 878 bp, Zea mays
  misc_feature (466)..(468): n is a, c, g, or t
  misc_feature (475)..(478): n is a, c, g, or t
  misc_feature (600)..(600): n is a, c, g, or t
  misc_feature (739)..(741): n is a, c, g, or t
  misc_feature (748)..(752): n is a, c, g, or t
  misc_feature (764)..(766): n is a, c, g, or t
  misc_feature (844)..(844): n is a, c, g, or t
ctccttgttctgttatactcctagcgttctcccaatttcatacggcagggaagtgattaaggcgagtccagatctgtccgtgttctcaatcctgacacatccctgcggatccgtccctttttactaatctgtttgtatctggaactcgagatttcgccgcggatttcttctggaccacagcgagcggttctgcaccctgttgctggttggtcctgggccataatcacccagcctaatcaactgctctgctcaagcgcgtgttccccactgcagatgcagagagatctttgagtttttccatctgacacgcaccaacttatcctgcagcaaggaagcacatcattattaactgaaaaggcctgtgatacgcaactcaagctgttcccccctccgcgtttactttcctcctcctggaaccaagttgcattgttttgcatctgattccacccccgcaagaaattcacannnaacccannnnaaaggagcatcttttttttaaaaaaaaatcttttgaaacgcaaacacatcatcataggcgaaaagtttttccatcgggcaaggctttttgctggaaagctcctttccatgattccgatccanctcagacagcagagatgctgttggtgaagcggaaggcttgtgcggtcatggtggagtggagtttccttctttccagccctgccccagctgccttcctgcaacctgttccccgatacctgcatagtgcctgcacaccccnnnccccacnnnnnatgccactagtnnntgtgagtgtatgcactgtataaacagacaaacagaacgcaacaaagatgattaggaacggtctacgtgcaaatagatnctatagcgttgtccaactgctagcggtttgttta

SEQ ID NO: 4047 - DNA, 428 bp, Zea mays
actgtaggagcggaccgtgagacagctccacttgattggaattcacgtatgaagatagccctcggggcagcacgagcacttgcatatctacatgaagattctagtccttgtgtgattcatcgcgattttaaggcaagcaacattcttctggagcatgattacacaccaaaagtgtcagactttggacttgccaggactgcaaggggagaggggaaccatcacatctctacgcgtgtcatgggaacattcgggtatgaaatctcttgttaaatttcattctatagacaaaaccttgatcaccttcctttatctaaaaaaaacttgctttcttatcagctatgttgcgccagagtacgccatgacgggtcatcttcttgtaaagagtgatgtgtacagttacggagttgtattgcttgagctcctcactg

SEQ ID NO: 4048 - DNA, 626 bp, Zea mays
ccgccttgtcgactccgtcggcgcgctcgagccggcgcttcggaggctctctgaggaacaggtggcgtgcaggactagcactgcactccccatctcagctagtggttcatacattcagcttgtttgctaatggttctactttgtttggtgtggctgatgtggacaatgtgcgcgtttgcgtgcagttgaaggcgaagacggccgagttccgcagccgcctaacgcgcggggagacgctcgccgacgtccaggccggtacatctgctgctctaactagttactgccattgctgagctgcaccgtttctttcgggagttctggttgttggttgtctgatgtactgatgcgtttctgtgtccactccagatgcgtttgctgtggtacgtgaggcggctaggaggacgcttgggatgcggcatttcgacgtccaggtacccacagctttggctgcacggttgagatgtaaggcacgagtcggttctcgagactgagttttgggtgcagataattggcggtgctgtgctccatgacggctgcattgcagagatgaagacaggcgaggggaagacgcttgtttccacacttgcggcttatctaaatgcccttacagggaaaggggttcatgg

SEQ ID NO: 4049 - DNA, 775 bp, Zea mays
  misc_feature (566)..(566): n is a, c, g, or t
  misc_feature (568)..(568): n is a, c, g, or t
  misc_feature (570)..(572): n is a, c, g, or t
  misc_feature (597)..(599): n is a, c, g, or t
  misc_feature (746)..(748): n is a, c, g, or t
agggtttgatatatgatggtaaaactggagaaaaaataggagagctttccactgaaggcggacacacagggagcatatatgctgttagctggaatcctgacagtaaacaggtaattcgatattaagtattctctgtttttagttctcattcacagttctaaatgtcgtgtttatagtgtacctatattttctcagatttgatgtggaattatttgttaggcatgattgaggaacaacgcgcagattcagaaaatatgcttgataaaacctaacattgttgaacagataacatgatccacttataaggctactggacagtaaacaaagtatttgtttttcaacctagatcccataatgatctagcctgtatctaggatatgcgtgatatcattttttttatgaacatcttatctttttccttcaaatgtgttacttttttttgtagcattgcactcatgcattttagtttctttcaatggatgtttggtgctcatgacctatgtatgactatctaatcaatatcgtataatttcaagtgtttatccacttctaatggttttctcttntntnnncggtgcattcaggttctaacagttnnngctgataaatctgcgaaagtatgggatatctttgaagatgcaagtgggaaattgaatcgaactttggtttgccctggtataggaggtgtggatgatatgcttgttggttgtctctggcagaatgatcatctcgtgacagtctctctnnntgggacatttaatgtgttctctgcaag

SEQ ID NO: 4050 - DNA, 775 bp, Zea mays
  misc_feature (69)..(69): n is a, c, g, or t
  misc_feature (135)..(135): n is a, c, g, or t
  misc_feature (240)..(240): n is a, c, g, or t
  misc_feature (277)..(277): n is a, c, g, or t
  misc_feature (455)..(455): n is a, c, g, or t
  misc_feature (566)..(566): n is a, c, g, or t
  misc_feature (568)..(568): n is a, c, g, or t
  misc_feature (570)..(572): n is a, c, g, or t
  misc_feature (597)..(599): n is a, c, g, or t
  misc_feature (678)..(678): n is a, c, g, or t
  misc_feature (746)..(748): n is a, c, g, or t
agggtttgatatatgatggtaaaactggagaaaaaataggagagctttccactgaaggcggacacacanggagcatatatgctgttagctggaatcctgacagtaaacaggtaattcgatattaagtattctctntttttagttctcattcacagttctaaatgtcgtgtttatagtgtacctatattttctcagatttgatgtggaattatttgttaggcatgattgaggaacaacgcncagattcagaaaatatgcttgataaaacctaacattnttgaacagataacatgatccacttataaggctactggacagtaaacaaagtatttgtttttcaacctagatcccataatgatctagcctgtatctaggatatgcgtgatatcattttttttatgaacatcttatctttttccttcaaatgtgttacttttttttgtagcattgcactnatgcattttagtttctttcaatggatgtttggtgctcatgacctatgtatgactatctaatcaatatcgtataatttcaagtgtttatccacttctaatggttttctcttntntnnncggtgcattcaggttctaacagttnnngctgataaatctgcgaaagtatgggatatctttgaagatgcaagtgggaaattgaatcgaactttggtttgccctggtntaggaggtgtggatgatatgcttgttggttgtctctggcagaatgatcatctcgtgacagtctctctnnntgggacatttaatgtgttctctgcaag

SEQ ID NO: 4051 - DNA, 293 bp, Zea mays
gccgtcgccaactccaccaggctcatgcgcctcaacctcagccggaacgcgctctccgacgccgtacccgtcgaggtcgtcgcctccgcctcgctcatgttcctcgacctctcctacaacaacctctcgggccccatccccgacgccttcgccggctcctacagctcgccttcgaagctgcgcctcaacagggacgccatcaccgggagctaccagctcgtcttcctcagcctcgcgcacaactccctcgacgggcccatcccggagtccctcaccaagctcaccaagctaaa

SEQ ID NO: 4052 - DNA, 351 bp, Zea mays
ctcgcgtgcgcacctccgcgccatcagctggatgggcatgtcgctgtacaaggccgacttcgggtggggcgcgccggcgttcatggggccggcgatcatgtactacagtggcttcgtgtacgtcatgaacgcggcggggaaggagggtgccctcgcgctcgtgctgtcgctggagccggagagcatgccggagttcaggaaggtgttcgccgaggagctcgccagcctggacgtgatctagtgcatacatatagctcgaagtatgtaccggccggctaagccgccaggcgccagtggacagttgcatgcgtggaacgtactacgtgttaggctatccacactcatatcacc

SEQ ID NO: 4053 - DNA, 401 bp, Zea mays
tcgcaaacccctcagatagaatctgagaataaaactcagaataaaaataattacggtgatccaacaatcgatcttggttaggataattaaccgaattaattaaaaaattctgctgatacattcgaataattaaacgtttcacaagtagtgaactaaatttcttgttattacaaccaaaaatttccacgggttcggaaccatttaatccataatcatgagcaaatgcataaatatattcctgaaagagaagtgggtagacgaagtagtgttgacgagatttctgtttttctgaatacccttcgaatttttccatttgtatttctacttgaaatagagaaaaaaagcatttctcggtttatcaaatgatgatacatagtgcaatatggtcagaacaaggtgtt

SEQ ID NO: 4054 - DNA, 441 bp, Zea mays
cactcaagttccaagctcaatgtctaatttgcagtgcttggagacactcgagttgggggaggtcaatggcagggcggcagttctggtgcctatccaagtcttggaactgccatgcataaaacacctaatcggaaaatttgagcttattgacaacttcaacggactaccagtaccaataagggcttatccagatgcactagtaccaaaggcaatcaaggaaagcaacctggagacggtgtcggggttcttcacccacagaggccaaggatttccgccactcatgcgtcacatgaggcagctcaggaaggtgaagatatggttctacagggatgcagaacccaaatacctagcaagctatctcccgaaagcgattacaaaattcctcaggaatgacaacgttcctcgctccctgtcacttgacttccaggatggcccaagaca

SEQ ID NO: 4055 - DNA, 456 bp, Zea mays
actgctggattgaatgcaacaatgataggcgactatttgggtgagagggatgactttcccctcaaagtaatgcatgcttatgtggacgctttaaacttcgaaggcatggactttggtcaggcaattaggttcttcttgcaaggtttcaggttaccaggagaagctcaaaaaattgaccggatcatggaaaagtttgctcaaggctactgtaaatgcaatccaaatgcttttattagtgcagatacagcatatgttcttgcgtattctgtgatcttgctaaacactgatgctcataatccaatggtgaagaacaaggtatacttatgattttattatcatacgggaatgtctataaagaaatttagttttttaactctatcaaaggtaatctaagttttcttgtgcagatgtctaaggcagattttatgcgcaacaatcgaggaatagatgatggga

SEQ ID NO: 4056 - DNA, 378 bp, Zea mays
ttagattgaagttgtatgcacatatgtttgatttgaaaattttgtgggtgaattgatcgttttaacccgcaatatgatgatacattttaattttacaattgtagacacatcaatgtattttattttctatttaatgaattactgaacaaagtatatgtttgtgaagcatctttgagttcccaggcgccggtggaccctgtcctggtggcaagaccagtccaatatttgtttcttcacctagactaaatattagctctctcgacctttttctccaagtaagtcttctgtcgatacacactgaaatttttgcaactagttgaatttgttttttatatttgacattgtgtgaactgtactcccttctgaattaatgccaac

SEQ ID NO: 4057 - DNA, 376 bp, Zea mays
tttagatatccatgataccgctacccctagatcgacatttggccgttcaacaagcatcgttgtttctgaaggtgacttgttgcagcctgaaaagattgaaaatggtattttgtttaatgttgtaaggagggatactctgctggggtctagtagcggagttgagtctcaaggatctcctcaggaaccagatgttgaaacagtgcagacagagtgccttgatggcatttcagcttccgatgacgacgacaaggaactaaatgtcattgttgatgaagcaaccgatcccatgagcagcaataatctacaagatcaggggtcctcactggaagaaaattcatatagtcattttcccttaaattctgcagacgagacaagc

SEQ ID NO: 4058 - DNA, 516 bp, Zea mays
ctggatgctcgtctgtcctctctacccaccgaattgccgcctcctttcaaaatgcagaaggttggtgttccttttcttatgttccagtaacttctccacgataacaaatcatttctatcttcagccaaaggtttttgaggcgcctgtaccaccaacagagtttcaacagattcctggagacgtacgcctcttgacatgcgggtagtatatatggtttgttccatgagctggatccttttccccccattttgtctctttctttatgcatccgtttattgtgccattcttttttactgaagcgttagctttgtcgtttttcttttactaggtactcgatttgttggaataaatccggtttgcatgaagttgtcttaggtacaactggtaggaaacaaggaacctcatcaaaggcagcgcacttaccctccaccgagtcactgctctgcaagtaagcgggtcttttccttgtgtgaatttcttccatcgcgattctgacgcaaaactgttgagaggacc

SEQ ID NO: 4059 - DNA, 383 bp, Zea mays
aagcatcgaacacctcaggcgcgtgcgcggtaacgagacatccaagtccacagacccaaaatctccccgcttgaacattgaaaatccataggggaatggtctggtgggagaaaaactaggaaagagaacggaccacgaacccacctaggtcaggagatttgaagggacgggacgaacgttgttccggctcgtggaaatcccagatcaactgctgctggtggcaactttgtgccatcagttgttttttgcccgggacgagtcccatctcaggtgaactggagattgtcctccatgggtgcgcggaagaaggcgagccttgcctcacaaatcgcatcgaggagagcccaaggcgtgtcgtggcctgtcagtattccgtcgttacc

SEQ ID NO: 4060 - DNA, 480 bp, Zea mays
  misc_feature (310)..(312): n is a, c, g, or t
  misc_feature (346)..(476): n is a, c, g, or t
tagaagatattgttgatcgccttcctgatgaaggggcgatgcaccatgaacttgccgtatatcctgtgaaggatcgtcttcaggtactccctctccctaggatcctccgagtcaaagagatcaagaagcctgataatgaatccgtggtcaatgtatctcttggccagcttcgcgtctgtctcgggagactgaatgaacctcaagaacagctcatacacgatctgcaagtgcgaccacgcggggtccatgacgggctcctcctcctccatgtcgaacgacacgagcgccttgttctctctcggggcagggnnnggcaccctgaacagattcacagacaccatcctgnnnnnnnnnnnnnnnnnnnnnnnnnnnnnnnnnnnnnnnnnnnnnnnnnnnnnnnnnnnnnnnnnnnnnnnnnnnnnnnnnnnnnnnnnnnnnnnnnnnnnnnnnnnnnnnnnnnnnnnnnnnnnnnnnnnccct

SEQ ID NO: 4061 - DNA, 452 bp, Zea mays
  misc_feature (445)..(448): n is a, c, g, or t
aatgcaacggtccccgtgtgggccccggttttttacaagcttaggcccgtaacacaaaggcggccacgcggggcccgttgcaatgggccagatcacacgtgggcctcagagcaggacgaggccgtgctacggggagacgtcaccgcaggccttcgtctggtgctgaatgaagcgaagggtgtccctgcccgttttgtctttgtcaaaccagcgactgcagcgagagacgacgagcgaagggtggcgtctttgccttcgccccaacaaacggctcagagccgcaaggcatcccgtgaccctctgtacgcctttcaagtccttgatgggccccatgctggtgatggccacgatcttctccgggttggcctcgatgccccgctcggagacgatgaaccccaagagcatgcctcgggggaccccgaagacacacttctttgggattgannnnatgt

SEQ ID NO: 4062 - DNA, 396 bp, Zea mays
gcggaacggcgagttcccgaccacggcggcggtgcaagcgctggcatcgcagcacacggtgttgaagagcgtcgtgctgcgcgaaccgggccaactgaagtccgtgtcgccatcccctaccgcttccacgggaaagcgccgcgacggctatgacgacgacaatggcggcggcggcggcggcgagaacgacgggcaggtgatcctgtacgcgagacggctggacctgtcggtggagaaccagaacctgcggtcgctccttgacgggatgcactggcgggtggtggagctggagaaggtgtgcagccggatgaagacgcggatgagcaagatgaagcaggccaggagaggcggcggcggccgcaccgccaggtcgctccctaggatgtgttcttgatc

SEQ ID NO: 4063 - DNA, 625 bp, Zea mays
atgacaccatggtatccatcaagcaagcaatcctcggcggcaaactcgcctccacgaggacgttcaaacccaggtttgtgaagtcagtgtttgccatctgtggaagtacaatgttatatacttatatggatagaataaataaaatacggctgatgatgctgggggttttcaggtcgcactcctcgaatcgatggaaaggagttctttcgtcaggccaggtctgtacctatctggacgtctctcctgaaccatcagcgaatgagaggtggatgataccataattaacaaaaaaaaatccgttaccgtttacaggagtcgtctatcctacgagcaatttggagcattcttagccaacatcaaagagctcaatgcccataagcagtcacgtgaggttggtcatttcggctcatctgtttttgttttgttttatttttgaattgaaaggcctttctgagtcgtaacacaagtcaagtatataactgctcatttttccattttaaaccaggaaactctcaagaaagctgaagagatctttggtccagacaataaagatctgtacctgtctttccaaggcctgctgaaccgtagcatggtggcataaggcttcacaggtcgcttcgcaagt

SEQ ID NO: 4064 - DNA, 670 bp, Zea mays
gatggatggtggcgaccatctgagacaaggtaacttaaaacttctatgcacacaatttgatctcttcttcattatgtccctcatactggttatatatcattatattttttgctctgttcgcacaaactacttttgttattcatcaaagcctcaattatgttaggtgcaatgtttttattctttatactgtacttagtaactatgttaggtctccacaaaaacagctcattcactggttgcaggatcggttgatcttcctaaaactccagggcagagagatgagggctggggtccaccgccaaggcaacgtcactgcacctctggtccctttgatctgtccaccgggtctcctgcccatgccgtggctcctccggctgatatcaggcccagacagcagacacggtcagtcttcggagctacactgaacaatccatcaagcaccctgcgaaacctcataatctcacctgtcaagcgtccccagacgtcccgtaatcgccaacacatattcacgtaatgatctcccttttgctcatgcatacagcaagtagtatttgtttactgacgacggatcaaaccttggaactggcgtttcaggttgtagagagttggaatagctgacgctgacggggtgctccgcattggaaatcaaatggagatatggttggttata

SEQ ID NO: 4065 - DNA, 341 bp, Zea mays
gagcctgctcttgagcttacagagccgacttctgagtcaaagcctcagcttgagcctgcggcggcccctcctcagaccgatgcttatcctgcggtggcatcacataaagaggagcagaaagagcatggatctgtaccggtgcatactaagcctgaagctcaggagattcctgccaatgctggtgatactgccacagtgacagagggtgggtccccagggtcagagaaaggcatccataccgccgtcaagcaagtgcagtggaacgactttggtgccagcactggtggggcggatctatttggtgacctcctgcccgatggagctgaagatgacttctttga

SEQ ID NO: 4066 - DNA, 470 bp, Zea mays
gctcagctttgggctctgttgcagcagcagcaactagagcaaccgcatccgtatatagtaccggccgtcgcagaggtctatgccgccgatgaagctgacgacgtggcgttcgtcggtgcccggcgtggctgcgtcgagcgtgacggtcttctggtggtgcgtgaactcggcgctggtctcgacgtgctgcaccatggtcagcgacgcgtcggcgttgcgcgggcagaggaagcaccttacgttggtgccctcgaagaacctccgggtctcctcgtcgtgcgtcttcatcaggccggcgttgccgaggaacgacactgacgtgttgtcctgccacggcatcaccagcacggccaccccttcgtcggccttgcgcttcagcagctcgcccagagtgtcgccctcggcgccgggaaccgcccgacggcccgcgtcgcggaccagcgtgatctccgtgttcaccgaccacacaa

SEQ ID NO: 4067 - DNA, 657 bp, Zea mays
  misc_feature (645)..(649): n is a, c, g, or t
aagccaaagtcgacaagataattgaagcaggtaagtaattgtttgcttctgtttcagagcacactaccgcatttctatttgtatgaaaataaaatttgcgcgtaaatcataatgttcataaacatctggcagcttccaagttggttccactcggatttactagtgctagccaacttcatgcacagagacttgagatcatccagcttacaactggatctagagagcttgatcaaattttggacggtaatgtattggtgcctcttgtgtatctttaattttcttaatgccataattgtggtattgaaataatagcaaaacagtgtaacttgtgttttcaatcttaacagggggaatagaaacaggatctatcacagagatgtatggtgaatttcgctccgggaagactcagttgtgccacactctctgtgtcacatgtcaggtattggacttggactgaaagacaaattctaagatatggcaccacattgccatgaactgtgccaacaggatttctagaatgtcatacttaaataaatattttttgcatgtttgaactgtttacatatttccatctgtttggcaaatggaaaatatctttccagttcttatgtgattattttaaagcttacaaaatgtggtggtgtnnnnngtagctcc

SEQ ID NO: 4068 - DNA, 333 bp, Zea mays
ctctcggcccctgccagtgttgcgtcgtgtgggccggccgggtgcatgcacagcaccaggccatgcccgctgctatgtaagtgctcgagccagtagcatcgtaagggactgttcggttgttccggattggagccccggattaattcctaaccggattacttctctaatttatatagattttgatgagctggaatgaatcctggctcattccggtacaaccgaacaggccctaactcggtttgttaccgctagagctcgagccagttcgagagtagccattttaaaatgaagtctgcgcttgtgtgttatggatttaaatcgactcaataacgc

SEQ ID NO: 4069 - DNA, 354 bp, Zea mays
gaaatagctcacgatgtgcccgaccatactgtcacgcaattttcagcctcacaagacactgaaaccgccgccggcgatgctgccacccacgactccgctcagcctaaagcggagtcggcccattgtgcggttggcgagccggagcaaaccacgacagaggcagacggtcagccacatgtcgcaaccatgccacaggaagttgccgcattgccgtcgccagctgagacaccggtgcaagagagtgcggcgcagcccacactgccgccgcagaagcaagaaagccctgttccagaactagcctcctcagtccacgaggaggagaaggacgcgtcaaaggcaaggggggacgaagga

SEQ ID NO: 4070 - DNA, 361 bp, Zea mays
cggacgcatgcacagctcgcggacgcgtatcagcagcttggtgcgcggatcgctccctttgaagcgtccggtaaggaggcgagcctccgcttcctcggatggctgcaggaggagttggaggtgctcccaacgattgtgacgggccttatgtccttcgcctcgctcatcacttgtgaaggggctgtgaatgccttgtcccgcgagggatgtagacacttcaaagtctttgaccaatcagacgaagacttcgaacgtggaatcttccaggttgaggacctggtgctgaagcgatcggcccgggcactttatgataggatgtggggccctcacggccgtgatactgttcaagagagaaccgacc

SEQ ID NO: 4071 - DNA, 367 bp, Zea mays
tttgtttgattgtcttttcatttaagataacatttttatattattttattgttaactatggtttatagccaaattttatccactgtataaaatgaataactagctgcgctttttgcaggtaccattcagagtcaggttggcatacattggtagaagttattctcgagcattacggttttgaagctgatgaagcggcggtcacattttttgtttgtctggttccagttgctttggatgtgtacataaaattttgggtatgcctttttcatctaattaaacaatagcttctaaaagttaagtaacataacatagcttttttaaaaggaacctcttttttccccctgtcctacggtcctacctcaccatt

SEQ ID NO: 4072 - DNA, 359 bp, Zea mays
tgctggacccgagcccccagaacacggccaagaagtacgccatctcctgcctgctggcgctttcgacgagcaagcggtgcaagaagctgatgatctcccacggcgctatcgggtacctgaagaagctctcggagtcggagaaggacgtggccggcgcgaagaagctgctcgagaagctggaccgaggaaggctacgcagcctgttcggcaggaagtagccaccaggcgatcgatcgttcttcatgtacaaagatcccgtccgtcctgtttgtgtcatagcctctatgactatgatgaagtgaagtgcggcaggcagctgttcgttcatgtgaagtccctaacaatggccaaacgaattt

SEQ ID NO: 4073 - DNA, 344 bp, Zea mays
gtattctcaaaacccaatgctttgctgttttggtattgagttaacaacatcactccagtctatatttgtacctataacttttgttaggtcactttcatgagaacaagtattacctttttaatactaagcaccagaaaagtggcctcccgtacaagttttaccccctcattccggaccgagcccgagccgtgaggggctgtgcttacaagaacaaaactcttacagcaaatagaaatggtgagaccagaccaggaaatgccacctaaccgctcagggagcccaggcctaaactctgcagtccttgcactccggcgagacaccagagatgctgttcatcttcgaga

SEQ ID NO: 4074 - DNA, 344 bp, Zea mays; identical to SEQ ID NO: 4073

SEQ ID NO: 4075 - DNA, 344 bp, Zea mays
agacaacgtagagccacctagaaattaagagatcaattcgaggcatagatcttgagtgaagtagacaaagtagatcttgccccttagggggtaagatcctaggatcgtcttgaggccggcaggccatacaagacaaatctagacgacgtagagttgaataggggtggaggtggatatgtggaatgctacaactaaagctacgttacatctactcctacgacaggaaaggtaaataaaatagattagttcgattgaaacgtgtttgggggttctcaatcgatcgtaccccttcatatatataggggaaggtctggacccgttcttaggcaatagccaacagatct

SEQ ID NO: 4076 - DNA, 275 bp, Zea mays
tggcgagagcgctcaagtcgtctttgccaccggagagcacgagtgccgactggtggggcggagggggcgccggcagcgcgggcaacgccggtgagtggaccgagggcgggtcaacaacgacgaggtggtgatggtgggacccggggtctgctgtcgtgtacgcggggggcatggagttgcgcttgcgattgcggaattggtggtggtgttgatggcggcggcgaggcgaggagggcgcaattgaggagatggggacaggcgacgaagcgaagtta

SEQ ID NO: 4077 - DNA, 391 bp, Zea mays
ttgtcttttgggtacttgagctacccttcctgtacccccttaaagaaaaaggcataatatatggctaattccacatctatttgataatgaaatgaaacactattactgtcttttacctgatctcttttcctgctgctaatttgttattatgctattgatgcccttgtcagcatgtgtcggttgtcttatgttacaggttggcgttagtgaaagcacgtggcaggagctggaggaagaattgatcccatcatcatcaattgtcagaactaattggctggatactcagccaatgagaaaatacaaggattcctgtatttgtgtggctggaggtaatttgttttaaataaaaattcatagctatactcatcaatggtcaaaccactatctggaa

SEQ ID NO: 4078 - DNA, 356 bp, Zea mays
aggtcttccgttccctggaccggaagaacgtctccgcgtggaacgcgctcattgctgggctggcagcgaacggcgacgctcggcggtgcatcgatgtgttcgagcagatgaaggtgtcggacgagaagccggatagcgtaacgttcgtcagcgtgctggcagcctgtgcccgcgcggggctggttgatgagggtcggcggtgctttcggagcatgtcgtctggttttggtgtgcagccggagctcaagcactatggctgcatggttgacttgcttggccgagcagggctggttgatgaggcggaggagctggttcggggcatgcccatggccccagatgacaaggttctggctacg

SEQ ID NO: 4079 - DNA, 485 bp, Zea mays
agaacctgcaaagaacagttcgatgtacaaattcatggccagtctaatgatactgaggtcgcttgtgactcatcagttacaacttgtgaagctgttccagatcatgctacaacagaactggatgtgaaaagtgattctttagataattctcagtctctaccttcaagcattcaggaatgtgaaccaatataccaaggtgaagagcacatacttggcaccacaaatatggtgtatgaaaatcaagagccagtgtatgagggggaggtggttcttgctgagcaggctgacaagattggggaaagcagttcttctggggatgacaaggccacagaacatcaatgtgagaatttcgttttttcacagttattgacttaaatacatgtgtgaatgtctttgtacaatgtgacacttaaacaaattgatttattttcaggggaactgattgataattttctgctgaccactgctaaccagctgactgtcta

SEQ ID NO: 4080 - DNA, 329 bp, Zea mays
tcggggcgttgaggcccaagtctgcagtgagatcaccagctggaagagcatgggagactggacggaggatgagcttgtcgacaaggacatgagcagcgggctgggcacatgggtcgacttcctggtggaggagttcgaggctggtgtggaggtggagaaccacgtactgggctcgctgcttgacgaggtcgtcgccgacatggtcgtgggacgccacggcaggagtgtaaatttgtagtttgagatgaatcgtgtggttgttggtctgtaattttgctgttacatatcccctatttattctgtcaccccagacatgttgttcagaacaa

SEQ ID NO: 4081 - DNA, 557 bp, Zea mays
gacaagatggtcgtcaccgtgtctcagtgcctgctcagcacggcgcagtcgttcgtcgtcgcagtggtcgcagagcgggacttctccaaatggaagctccgcttcgacatcagcctgctcgccgtcctatactcggtagtttccactattcattcattcatttatttggtgaccattagagtagacgacggccggttttacatgcatgcatctgcatgcttcagggtgttatggtgacgggggtgtcctactacctgcaaacttggtgcctagagatgagaggccccatgttcttcgccacctggacgccactgtgcttcgtgttcacgatattctgctcgtcgttctttctcggagagattgttcacctcggcaggtaaatcatgcatacacatacactcactatcagctgctgatcactgttctaaaagcacgctgaaatgaactttccctggcagcatcttgggtgggattttgctggtcgcaagtctttataccatgctgtggggtaaaagcaaagaggacaagactgacgatgccaccgatgatattgagaa

SEQ ID NO: 4082 - DNA, 382 bp, Zea mays
tgcgcgcctctcgccgtcccgtcttgaccggccggcgatgcaggcaggctgcatttgcgggacgcagaggagctactgccgactgcatcatcagtggaaacgtcaaatgtgcatagacagaagaggcagacagattgtttgctgatgcttgccgacggcattgctggattttaatttgttttttattatggttctgcacatggcactagctggtgtaatgtaacatgttggtttattgtggaaagaaaggaggaacattcttttgctgtaaaaaataatgggggttggtttcggggtgttttggctcatgatcctttgcactctgtctcaagagcattattcacatgtacgtatcataagcattctgtctgaaaggaggaac

SEQ ID NO: 4083 - DNA, 388 bp, Zea mays
cgcgctcccgtggccctcgcctctgacgatctccggcgcgaggtactcgtgcgttccgacgaacgacgtggaccgcgcgtccgtcggctccgcgttgaactcgagctggagcgacccgtccttgatgctggagtccgacctgctggtcttgcggctcttcttggggagtactatgcgcgggaagaacgctgacggtgactgtatgcagccctggccctgctggctggcaccgtcggcatggaccacgccgttgttggcggcggcatggaccgatgaggatctgactagcatcgggctgaccgagcaccgcagcgacagatcgaagtcggagagcatgatgtgacctccatctctgaccaggacgttctctggtttcaggtccctgtag

SEQ ID NO: 4084 - DNA, 388 bp, Zea mays
tcatcgaagcgcttcgtacctgatggagtacgtcaagatctgtgctttgagatggagcggcgatgggagggggaactagatttgagagcagcatcgattgactgaatcaaggacgtcggatgtggcgatgaagaacacctgcggcagtgagggttgttattgcggtgcctgctcggagtacatcgacgggaatgcttcctgcgccgcaacgtcctgctgttgggcctggtcggcggcgagatcgagcggatccgagtcggccttcctccgcgctcgggtccaaacccaccgcaaaggagcgggaggtttctttgccaaggcgcgctcgctgccatcctccagaaggaaaggatgggggatgaatagtgctccgcttgatctagagtga

SEQ ID NO: 4085 - DNA, 521 bp, Zea mays
tttgaatttatatttactgattttataacctaatatatgactgttcagatctttgtcctgatatagaatgttggagtgcattatgagacgtggaacgctggtgttggtggtcctgttgtgcttcataggctggatgaaggttcacgagaccttacttggcagacttggtcctatcaggtatgtttaacaccacatgccttggtcaatgagttattgtaaaaaagagacaggctaaacttgcttttctccatgctaggtcgcccgagtgctacttgtgctaccgagtgctgctgtgcagcctatgctacctggtgtgtgactgcgtggtgactgcttggtgcttggctgcttgctgccgagtgtaagacgccaggaccaggaggcaggaccgccggagcagcgagtaggagccaggagcccaacctaggtccatgtggcgagcacagatgtgcagagaagataggcagacaacaaaatctaccgtgtagttcaagtatacccttacccaaacccaatacttt

SEQ ID NO: 4086 - DNA, 481 bp, Zea mays
tgcccgttcaattcctcaaaagaaaccagttgtggagacagatgccaaaactaaatccacgctttcaaaagacattttggctggcgtaagtttcacccctcatggaaatgcctcttaacttcttgtgtccaccagttattaacaaaccatggtattctaggttttcgggggttcatcatgaccacctcctaactttcggcatggattggtgcatgccaaactgaatggagtgctccaagatcatcgagttcatattctacttcgaatttttgtagatgaagtcagttttttttttcttgggggtaagtaggaacatttagaaacattttgttctgctgacattgccccggaagattttctgggacctgaccattttgatgtgaaaggcctgtgttgattgccagcgctgtttgaacaggaatctttgtaaaactgaaacacatgttctcttctagttgaacaaatatcacgaggaactgcc

SEQ ID NO: 4087 - DNA, 403 bp, Zea mays
gcgggaagctgcatggaagaacagaagagagccgcaggagctggaattcctggacattactattcagttccctctgtaaagcagcaacgctgttttgcaagcctcccatgctaatttcgcgctgccaaatattagcgtgatcgcgaagctagccagtcctggcgcgtctagtttgccgggttgtctgacaacaaaagttagtatgaatatgaaagggccttccttaatgttttttcccacttggtgctgtataaaggttcagtgtatattccattcaggagaatgagaaaaagttcaacactccagtgtgggtggattcaaaacaggcagacttttaattttgaaagtttcagtagatttgttagtttatagtttatattttgaaagtttcagtagtgtccaa

SEQ ID NO: 4088 - DNA, 438 bp, Zea mays
agtcgttggcttgcggaggagagggagggcgtggataaagcatgcgccgaggccagccattccctcaagcgcgccaccgacgcggagtcggggctgaagagcttgcgtggctacgttgacaagacgaaggcctccacccgcgtcggggtcgaccgagcgcatgcgttgcttgttgacgtgtgccgtcagctcggcgtgcgaactgccccttttgacaaattcggtgaagaggtgggcctccgcttcctcgggtggctgcaggaggagctggagacgctcccgtccatcgcaaccggtctcatgtcctacgcctcgctcgttacctgcgagggggctgcgaatgccttgtcccgtgagggatgtaggcatttcgaagtctttgatcgggtaaccgaggacttcgatcatgggatcttccaggtcagagacgagatgcta

SEQ ID NO: 4089 - DNA, 756 bp, Zea mays
gtcgtcgctaaccgtggtgacccacccctatcagctggggctcatcaattaaagacgtcatcgctgtaggtgttcgtgatctcggcataatagttatataaataaacatataaataggtgcttgaagctaacaactcttggcatcagtagcaggagcacaaagtgcagaagcagagccagtcctaactgcttagccaggaaaggtacgtgtactcatcgttttgtagagacctttgggtagacatggttaaaaaaatatatggccactatatatacaagttaagtctaactttaatttcgtgaaaataatctgtgtagcagaagcagagcgtgcttagccatgtactcatccagctgccatgtgatgtccgagaagccaaacggttccaaggcggtgacgctgctgctcaggctgtccacgctggttctgtcgctcatctcggcggtcgtcatggccaccgccaccagcgactgcaccatctacggtcacggcggcgccgccaaggtcactatcatgttcaagaactaccggcccttcgtgtaagtatattttcttttaatttcttcgtaagcagagcatgattagataactagatagatatgatcttacgtacgtcatcgtcgttgcatcatcaattattcaattctaacttctgatagtatatgctctactctacacacgtcgtcgtcgctgcagtttcctggtagttttgaacatcgcggcggcggtgctggaggcagcagccatctacctac

SEQ ID NO: 4090 - DNA, 391 bp, Zea mays
gcctcaccaaatcaatatgtccatattaattaatcaagctaaaccaactactacttcgccttcccaacaacacaaaccaaccaaagcacagctgcgacacccctactacaagcgtgagccaacacccaacctaactacgcgcctaatatctatctctcccacaaacagcaagcacaggcagagatgcccacccacacaagccagtaaatgctgcctagtataagcactctagactccactaataaggccatgcacatgcacctcttgggccaacaaaaccaactggggacgaagacgagcccagaggcaccagaaacgcaaaaaggccagtcgaactattagccgccactgtgcagtgcaggcgtcacaaccgcaaatggtcagcttagcc

SEQ ID NO: 4091 - DNA, 1059 bp, Zea mays
  misc_feature (1055)..(1055): n is a, c, g, or t
ggagcagcaaattcaggattgaagctgcttgttacgaaaggggctcatgtgcagaaggcggtcgggatatggctctttggttgtgctgcctgggtgttcagcttggtcatactgggaggtattactcggctcacacgttctgggctgtcaatgactgactggaagttcacaggggaaatacctccaatgacagacgaagcatggcagctggaatttgagaaatacaagcagtcacctgagtacaaaaggcaaggctgcaaccgctgacatttattcatacgttaccttacgtttgtctgctattttttatggtcaccagtgtaactaggtaatggccttatgttagtaaactttagctcccatgtgcaccaaaccagaaatccccatagttctcacatgtgtaaccttgacacacattatcagtacttttttttgaaagtttagaacattgtaataaacaacagtatgcaagatcaaaggaaaaaaaaggaagaatactgttttgtgctaccttatgttccaaattatagttcacgttagctttgtcctaagtcaaacttctctaattgttgaccaatttagtagaaaaatacaccaacatcaaactagtttcttttatattttccatgaaatgtgttttgacatagcatttaattgaatctgtagatgttatataattttttctaaaaaacccgttcaaagttagagaagtatgccttaggacaaaactaaagttaactatacttttgggggtggggggtagcaattgatatgaatttgatagcaacatagaatatgtagttcacatggactctcaacaactttgagtactttcctttaaacagataaatgtttatcccctggtgtttctctgtgtttgttcttataagttcccatccttaagagatactgctttgaatgccatatttctgctaatgcaattgcagcattctacaaacatatctagggtgaacaaaggaatgagccttgaagatttcaaatttatatactggatggagtatgcacacagaatgtggggaagagctttgggcttngtat

SEQ ID NO: 4092 - DNA, 373 bp, Zea mays
ctgcttccggtcgagtcttggcccgtcgctcggcagggcgaggcggtcgttggcctccacgctagcgatcacccagtcgccgcgccagttctcccaccttgcgccgccaagggaggggatgtaggcgccggctgaatccggccttgtctggaagtagtaggcgccaaggtggtccttcgccttccccgacttcaccagcacaaagaaatggcggaagagggaggtgcagggcgccacccccatgaacatctcgcacaggtgggcgaagatggccgcctggaggatggagtggggggtgaggtgctgaagctggaggccgaactcctccaacaacagcaggaagaaaggcgagatcggcaacgccaacccgtag

SEQ ID NO: 4093 - DNA, 348 bp, Zea mays
ccgtgccaagagtaaccaggacccctcttttttccaagaaccagtacaaaccgcctcttcggcctcttaggagtagttcagtagtaaggcgatcgttgcagcaggagcaagaggagagggtgggcccggcgtcctctgtctccgtggcctccggcgagcgacaggaggaggcgacggcgtcgcatcatattggaggggtggatgaggccaaggcgtcgggccatgttggagaggcagataaaggatgccaaggagaaggcgaaggagaaggcgacggcgaggagaagaggagcacagacgagcagcaggaggtggactggaagtcagacgaggagttcaagaagttca

SEQ ID NO: 4094 - DNA, 958 bp, Zea mays
  misc_feature (665)..(673): n is a, c, g, or t
  misc_feature (686)..(688): n is a, c, g, or t
  misc_feature (692)..(696): n is a, c, g, or t
  misc_feature (702)..(749): n is a, c, g, or t
  misc_feature (763)..(771): n is a, c, g, or t
  misc_feature (794)..(800): n is a, c, g, or t
  misc_feature (806)..(830): n is a, c, g, or t
  misc_feature (844)..(856): n is a, c, g, or t
  misc_feature (860)..(862): n is a, c, g, or t
  misc_feature (867)..(871): n is a, c, g, or t
  misc_feature (879)..(892): n is a, c, g, or t
  misc_feature (897)..(901): n is a, c, g, or t
  misc_feature (906)..(909): n is a, c, g, or t
  misc_feature (915)..(921): n is a, c, g, or t
  misc_feature (926)..(928): n is a, c, g, or t
  misc_feature (934)..(934): n is a, c, g, or t
  misc_feature (939)..(940): n is a, c, g, or t
ccaccagaatagtttgctcagttcaattggattatccatatttcattgaattattgttcaaaggagttctcggtgcttaatcgaacaaaccaccagaatagtgtgccagaaccctgattgatagtttcgcttttcctccttaatcgtttgaccttttcttgtgtccattttagatcttgctggtccttgtgggttttatctcttttatgtgtttccccgtttcgttgttttcggttctcctttgcctttgtttcccttttctgttctttgggggttgagctctgaggttttcatacggggtttcatctctagcctaccccaacgtgcttgggacaaaaaggctttgttgttgttgttgttgttgttgtattgttcaaaggagttctcgaagcttcactttgatctgtcttaagaaatcctttgaattttatgacaaacttgatgttgctgtattgtgtattcagaactccccagatccaagcagtcacaggttggcaagcacatcatttgtgtcccagcttatgattcaagaacgaggtagctgaaaactgcacactctggcaacttgccaggattggaagttgaaccatcgctttctgtcaagaattcgagataagtatagctgtgctggcgtttttacccccatccagtgcgcagttaaacannnnnnnnngattcttgacagnnngcgnnnnntcaacnnnnnnnnnnnnnnnnnnnnnnnnnnnnnnnnnnnnnnnnnnnnnnnntgaatcataagctnnnnnnnnnatgatgtgcttgcaacctgtgannnnnnngatctnnnnnnnnnnnnnnnnnnnnnnnnnagtttgtcataaannnnnnnnnnnnncttnnnacagnnnnnagtgaagnnnnnnnnnnnnnnttgannnnnaattnnnngaaatnnnnnnnaatcnnntgaacngagcnnactattctggtggtttgt

SEQ ID NO: 4095 - DNA, 349 bp, Zea mays
gagaggaagagagcgcaggtgaccaccgccgcaaagaagccataactgctgtcgctgcgtcgccgtcatcttcactttgctttgatctgaacatggacgttgagaaccacgacacggagagttgcttcacagatgctagtctgctcaaggcagtggatcgaacgttcttcttcagacgacctgatgagagtagcgattagcttagtgataaatgacctatctctcttttgttcttctctgtaactgttggtcagtttcttgtagtttgtttctaagatgtttgtgttggaggaatggagcgtgcatgtggtactcttctggattgaacctgcgtggaaattaattaaag

SEQ ID NO: 4096 - DNA, 574 bp, Zea mays
aagtagctggagtacggtggcggttctatcttcgacgggtcgaaatggagagagtcgtccttgacgcacttgatcctggcacgccgcgtgcccaggaacagcagacccctccggtgaggcaaagcactgaacactttctgtgcacgcaccgaacgacctccagtcaggcgcgtaaaccgaactggaactaggaaccaaagttataaactgtacgaggcgtttaggcacttaccgaggacttgcaggtgcgagaatgagccggcgccgtgacgggcccggcagggaccgccgtcgacatgcctgaacagtttcaacagagtggctgtgatatctgacgagacgaactgtgcgcagggaataacgaacgatgaaatggggtccaagctggaggttacctgggaataggcgccacgggttgtagcaggacgccatggtagcggctcccgctatggtgctgcttgcagcggtagggcgtaggcgtcagtcaattcgtagtgcgcgggcgagagtgaggtgcgaatccggcggcgaggttttggatgggaccttcggagattgccgcgttcaggataac

SEQ ID NO: 4097 - DNA, 679 bp, Zea mays
gcaatctcatatgggctgcatgggcgcctaatggaacagatgaatcaaattatgctggtaagctttgtatgtagatctctttttcctcaaggaagcacccatgtgattatcggcttatcgccagcattttagttctgcgcttttgccgtccttttgcatattttgtggactagtgattcttgaggatatctttctgtgcttgaaccaattcaaaattgttgtggtaatattttcgcaggtgaaggatttgcaatggtttctggaactagcatggctgcgccgcatattgccggcattgcagcactgataaagcagaagaacccaaagtggagcccctcagcaataaaatctgccctgatgacaacggccaatacactggacaaagggagccatcctcttagagcgcagcagtacaccgcatcagaaatgatgacactttcacgggccacaccgttcgattgtggcagtggcgctgttaacccaaaaggcgccctcgatcctggccttgttctagacgcaagtaagccaattactttttcatcgaaataagccggtcgaagttatcgaaatggcggtgtcttgttgaagttattcagatggcaatgtaacaatccctcatctagttttgctttatccatgcttggcaggccatgaagactacatcacgtttctgtgctcg

SEQ ID NO: 4098 - DNA, 795 bp, Zea mays
acccctgagttccgtggtcgaatggtatgttcttatattcctgattgcatgttccccatttggagagatcctatatgattaagatatctttagctctgtcatcatctaaaattttagtacatttattttagtatatataatacttttatctaaattcattgttttcctatgcatttatttgcattgcagtaatgcatcactttgtaatgtatctttgtttgattctttcctgtttttcttattattaatgcatataagttttcctccagaatattttaaatttgccctcatctgtaatgatctcctcagtgtgtatattttatggttttgcttatgcttgcatacagtttgccatgtacattttgtgttgtttatattttgagttccctcagattttagggtctgggaaatggaacttctagcagtcttacccttgcttagaaattcccttccctagacctctacaatttgtgggatccttcggcactataatccttttcccttttccatctcaacgtttagggctgatttggtgaccagagaattagaggggatccatgggggaggaatccccttgccgtttcccaccttccatgccgtgcggaatgagctcctcgaggagctcacgatgacacttgaggcacccgctccggccccgacactctatagtgccccgcctggtagtccggcgccctctaggggccatggctctcgcaccacgtcgatcggggcccctacccgccctcctgccaccacctcggctgcccctcgttcggcctccacctctgacggggg

SEQ ID NO: 4099 - DNA, 419 bp, Zea mays
  misc_feature (8)..(8): n is a, c, g, or t
cactttcncttaaattcgccaccgccgctgcgctggacaaagttcgccgtcacaattgtacgtggtcagccattgttgtgcttagattagtagtgttcttgattgatagctactggcatatagaagtttattattataaggtgcatatatcgtccttgcttttgcattggtcgttctctgtttttcgcgttgatcggggtttgcgtcacggtgatggtgaaatagatggtcagatggaggtgaaaaggattggaaggaacaatttgagtttggattgattgctaattggctgactgcttgagagagagatcaggatgacgaggaggattggttggtgacttggcgccaccttgggcctcggatgtatagggggaattgagcataagttcttcagttaagctactgctttcagttgggag

SEQ ID NO: 4100 - DNA, 423 bp, Zea mays
tgatcatcatcatcatacagcaacgattgcgcacacgtggttggcggcgatggcgatcgccgtgctccctatcgtctccgtcctgattctggctgccaccaagcacaagcagatgggaagaaccgtcttcgcccctcccaagcgccgagagccgccggtggcggaggagggcgctcctctcctcggcgtcctgcctgccatcctcaccaggagcttgcaaggcgtgatctgcgaccagtacttgaagctcggcagcgtgttcacgctgagctccttgggagtgaaggtgacgttcctggtgggccccgaggtgtccgcccacttcttccatgccgccgagtcggagatcagcatcggcgacgtctacaaggtcaccgtccccatctttggcaaaggggtcggctatgacgtcgacaacgacac

SEQ ID NO: 4101 - DNA, 1340 bp, Zea mays
  misc_feature (1262)..(1268): n is a, c, g, or t
  misc_feature (1301)..(1303): n is a, c, g, or t
  misc_feature (1317)..(1320): n is a, c, g, or t
  misc_feature (1322)..(1337): n is a, c, g, or t
aagagagagggagagaactggacggcggcggcggcggagacgacgatgcagtggtacttggtggccgcgctcctcaccatcctcaccagctcccaggcaatcccccaaaccctacatatttcgtcgattccccttccttgctttttggtttgcttcgattacaccatagtgtcttagatctgtcgccaagctgggattggttgtgaactttcggttgcttcccatttgggtctttgatgagatgcactgtggattaggcgtcctaggttgctggatcggcagtttatgttttcgagcggagtcgccataccctttgtgaagaaagacgcggttcagatgactcgtgattgttaccctggattccagggcagattgattgtcgtcgagaagcttggtattggttatctggtgagatacatgggatgatttggtggaattgtggaatgagaaatgacatgcttgtgatgctgtgctgtggaaatctctctcaagtgagggaacatgatcatgtgcaggactgcagactagagctaaggacttttggcagcatcaagccatggttaaacaggattggaaagttgcacaacaacaacaacaaagctttttatcccaaacaagttggggctggctaggattaaaaatccaatagaacccacaagtcaaagtttggagacatggataactgattttcatgcacttctattcaacactcttttttttgtatatcccatcctttcaagtcttcttttactgcctcttcctatgtcaacttggttctttctccccctcccttccagggacggagccagaaaaaaaccctctctgctctcttcttattgctattgtgccgtagaacccactgcacgctgatgtctctggaggtcttcgttggacatgtttaaaccatctcaaccaatgttggacaggcttggaaagctgcacatgatttgttttagatttttagttccaatgtgtctaatcagcttatctatatatgcagggaatattgaccaccctttcccagagcaatggcaaatacaattatgattatgccacaattccttttttagctgagctcttcaaggtaaataatttatatttaatctttgatagcctcatacccatttttaatcataatgatgaatacatgtgtagacggtgcagtggttcatcatttattgtgctaacattgcgctattcttggtgcagttatctgtctcaggcttcttcctctggaaggaatgccattcttcatctccacnnnnnnngacaaaggaatggaggagcgtgcgactatatgnnntccttcagttatannnncnnnnnnnnnnnnnnnnccc

SEQ ID NO: 4102 - DNA, 1205 bp, Zea mays
ctacttctattctctttgcattgtttaatagtaccacatcgttttgtccagagattgttttgctaaacatgcaaccttttcatcagaaactatcagttatctatagtgatttttttgtttaactagccacataatgtgttgacatgtatctggcatctttattacagctgttaaaatgtgtctgatgcagaaagttcacagtagttctagtatactgtattagttgttcttagtcaccttaagaatgctgtaacctaatctctcttgcagttacttcatcaagctatttctagacaagaaatatgctttgccataccgtgcacttgatgcagtgcttgcccatttcatgcgttttgttgatgatgagaggatcatgcctgttatatggcatcaatcactgcttgcatttgtggaaaggttagtgatggatgtgcagacttcaaagcatttttttctttgattcgaaacacgtaatccttttatttgtggcatgctgccaaaaacctttcatatttgaagcatgaaaggtcctatttgaattccctcttccatcatctgcacgtccttgtattctctggaacaaagtagtcacctcgaaatttttcctgttggaagtgtggttatatagtttgaacatgttctttattgtgtgaggcccaagcctcatagttgcagttatgagttcatgactgaattgattgctggtgttcattcaccaagtgtctttgctcactctttcactgctttagtcatgcatcttacactaataacttcgtgacagatacaagaacgagttagagaaaaaggataaggagaaacttgcacgtttgttggatcaccagaaacactatttagtatgccactttacatactcatgaatatcaaagcaccatttactggatttcttagttaactgacatgtgctaatgcttgaaacatgaaccctctctaaacaggttactccagaaattcgaagggagcttcgagggagctgcaacaggggtgaaaaagatacaaatttgcatacttatatcctttcagtggagcttgttatgatctttaccttgcatacatatactatattagctgaaccaaaaatgttgtaattaatgcaattagaattttgattcaagtctggttatttctttaacatgttttcttactgtcacctatctccgtcattaccaagcctatcgaggaagaca

SEQ ID NO: 4103 - DNA, 358 bp, Zea mays
gcgccggctagccagcatacttgtgaagaatgccacgattgagtggaatgaatttgaaagtagagtaaggaaactcatacagcaaactaagcaagttcatgagaggcctgttgcaagaagcatatttagacatccacgatgtccagaatgcatgtgcagaacagagcactaatattttgatagtttcttgtatctataccaacagttgttttttcagaagaaagactaccaattagatcgccaaaggtagttcttttgtgctcccgctgaaatctggatagatctcttgcccttgaactactttggaatcaaactgtacaaaagaaaatataatgattgagcccttgtttgtatcaga

SEQ ID NO: 4104 - DNA, 369 bp, Zea mays
attttcttcgatcgatctcttcatactattaatggtctcctgagatgcttttgctgctacatttgaggatctccagctcgacgaggccgagcaacatgagccccgttgtgagcctagacatgatccctgccaaaagcacgaggaaggagatgctcacacaatcactatcattcaaaccatacaatgagcaaatagtaatttttggacatcagatgaatacctctccaaaggcaagaacaaatgtcgctgacaataatacaaaaagaacatgatgaaacattctatcaaaaatataggaagtgcctgaaaaggttgcaacgaggtaaacataaaagtcaatggttaaaacagaatggagtgcgaaaggta

SEQ ID NO: 4105 - DNA, 384 bp, Zea mays
atcattcctttatctattggaaatctcaaagggttaaatgtctttgatgcacatcattgcaacttgggggggccaattccagcaagcataggcaacatgtcgaatctgttgacacttgatttatcaaagaactccctcgatggttcaatttccaatgagattttcaaactgtcatcccttgacccttatctatttaaagttttaaacttatcatacaattcgctatcgggacatcttccttctgagatgagtagtttggggaacctgaaccaactagttctgtctgggaaccgattgtctggcgagatacctgagagtattggggaatgcactgtgctgcaataccttatattggatatataactcaatcgatggaagcatacc

SEQ ID NO: 4106 - DNA, 718 bp, Zea mays
ctattactcagatcacgggggccctggtgttcttggtatgtggaagttgcatatgcttctatacactatccaatcgaattttgttgtcttatggattgacgtttgctatttgcaggtatgcccaatctaccatatctttatgctggtgacttcatgaaggtgttaagagaaaaacatgcttcaaatagctatgccaaaatggtaagattgttctcatttacttgttgccaggacacttgtcctatctgaacggaagcatgtggacaggttatatatattgaagcatgtgaaagtggcagtatatttgagggattaatgccagaagaccttaatatttatgtcacgactgcatccaatgcagaagaaagtagctggggtacatactgtccaggaatggaaccaccgcctccttctgagtacattacctgcctaggtgatctatatagtgtctcttggatggaagacaggtaaagttcatattttgtggatgcttattttgttggcaacaacttcatccttcctaaattataggtcttttggcttttctaggtacagacattttgctatatacctagatatttgctgtgtttagatacgtagtggagtaccttgtggtttagtgggggaatcataatctttctcaaaaattactcgcattttctctgtagagatactatggcatgttgttcttttccggttctgctgtacacaggaaact

SEQ ID NO: 4107 - DNA, 392 bp, Zea mays
atatgacttgccatttagtatttaagaagctactagggaaatttgttttcttgtcacgcttcaaaatgccatgttcaggcatgaactaggtttcatttaagcgattgcaaaattctactccctccgatcaaagacatttttacattttggacaaaagccaatgtccccaactctccattctgttgctttgatcactgtttactatttgtgatgcaatcaaattgatatattatgaaagttcttccaacccatgttttttctgtttccaattcaaatattcgattggaatcatgcctgattcattatgttctcatgactgggaattatatgtttatctgtactttccaagttttgtgatgatcatttgttgcttggcctttaagcatttactg

SEQ ID NO: 4108 - DNA, 410 bp, Zea mays
ggcatatacaacctcatttaatatgaagtctcttgaggggtctttagggggttagataaaaaaaatacaaaagacgggctcttcacgaatattgtttatattgtctcttaactgcatttatagtctagaggcttgtatcacagagtcttttaagtgtctcttatacttagaaaaccgaaccagagtctcaaagttgtacatgccaggttgtacatgcccttagagtgaacaagtgactgcaggtccttctaagggccgtcattcctggccttccttaaccagagccacctcatgttcagcgagacagcgaccaacccaaagcttctaaattatggattccaagaccgccttggttgagtgacctgcagactctttcccaaccaacaagacaatgccctccttgtacgttt

SEQ ID NO: 4109 - DNA, 421 bp, Zea mays
tcagatgaaatggttggtagcaagagaaatgaggtggatttactgcagaagattaatgcttttgctgaagagaagaaggctattgctgatgaacttgaggaagtgaaagctgctaggaatgcaatgaatgctgaggcaagcaaagcaaaggcagagtttgagcagatggagcaaaagttatcaacgactaaggagaagctcagcatggctgttacgaagggcaagtcactggtgcaacaccgtgactccttgaagcaggccttggctgaaaagacaggtgagcttcagagttgcatgacagaattgcaaaagaagtctgatgccctgcaagcagctgagagcagggttgatgagctacagatttttttagatgaaaagacaagtgagcatgaaaagtgcttggatgagcttcgagacacat

SEQ ID NO: 4110 - DNA, 1214 bp, Zea mays
  misc_feature (836)..(836): n is a, c, g, or t
  misc_feature (962)..(962): n is a, c, g, or t
tcaacattcgacatcatctgcccattgaagttcatcagagtatgttctgcagcagctcgagaggaaaactcaataaaaccatagccttctgagtgcccagtctgcttgttccttataattttcacaaaaagcaatctgcagttacttgaaagtattaggtcaacaaaaataacttaacaaaagtattaggattccaatcagacaacaaatatagtagatcaactaaaatatatcccgagacttatattactaaatcgttatattgaactccgaatatagaagcaaatatagtagatcaacaaatatagaagcaaaagcacctgacattcttggtatgagtttgttataaataaagagacaggttgctcatcaccggccaccctcagcagagatgtagtcattaaaagttgaaaacagaagaaaaaaacacattggcatctgtgcctacaacttacaatcagtcatatgcatggttctgggcctaaaacctaacatcttggtttggttgaaataagaagtaaatatggaaggaaggcgcccttagctcatcagggactacactgaactaaatgatctagtatcaaactctataactataatagaaaacacaataaataaacaagagcataacagcacctacagttgcgggcatatcaaaaccaaattagccaaagcaatcatacaagggagctcactctcagatttccaatgcttcggacaaaccatcaactgtctcaagtccgccatgcacaacacgaccgcctacccgatcaaggaccagacaaaagcttgttgataccaccaagcaagttacaaatcatagacaatataatttnagaacagaagcttgttgtaaaagaaaaaacactgacagtgcgactgctggggccgggtgcttggcggcagatggacaaccacaagttggcgagagcgtgcgagacggaacagggcgtgggtgcggntgctggcatgagacagtgagagggttaccccaaggttgttcatctcctagattttgtgaactccgtactccacagcctacaaatggcagacaattgattaggaatcaaagagaacccttgggggatctaaaaacagagggactttcctgccaggaaagttatccatgtgaaaaaaggaggatgaaactaccgtccacatggaataaataataaattacagaagataaagaggagcattacagaaaaacacct

SEQ ID NO: 4111 - DNA, 342 bp, Zea mays
tataacagtacgaggttaggaatgcttactgatagcggggtgcttgcctcgagcgacttcgctgatggtcaggcgcttgtggcctccgacgtggggccaggcgtcaagagaaggctaactcttgaccctgatggcaatctccgtctgtacagcctgaacgattcagatgggtcatggtcagtttcaatggtagcaatgacccagccttgcaatattcacggtttgtgtggtcctaatggcatctgccactactcacccacacctacatgttcgtgcccaccaggttatgcgacgaggaacccgggtaactggaccgaaggctgtatggctattgtcaacaca

SEQ ID NO: 4112 - DNA, 876 bp, Zea mays
ggaggtcgccgccgccacttgtacgctccttgctgccgtcgccctaccagtttcgtcgtccataccgtcgtcctcagcagcagcagcacgctctgcgacgaaacagagctactcgaggaggaagacgacggccgtgcgagccgtcatggcgaggccgcatcaggtgccgccgcctgccactgccaccgccaccgccaccacgtaccgcgacaactggttcgacaagctggccatcgggtacctgtcccggaaccttcaagaagcttctggtacgtacgcagtacgcacagcacacttgttgcgccctgcacacgctgcacacagcaccggctgctagcgatccaaatctttgtgctgcatgcatgtcaatggtcgatcggtcgacccttcttggtggatccgccatgtaactaataagcgactgcatgcacgcgatgcatgtagattatatcgcttgtagcagctgggtcgactaatataacaactagcgtacttgatgtctactttattgggtttttttaagctggtgtcatcggttttaatggtatcctcatttttattattagtcatgtttttttttcagttttacctttctgctctatatataacactagaaggttaaaactgagaagaagaaaaaaacacgactaagttttaaaaacgaggacaccaacaaaactaaggacaccagcttaaaaaatcctattttattttccatctctcttgtaaaattaattctgtgtcgacatagcagctagtagcatatctggttcatgcatatgttgtgtgttgtattgtgtgcatgcattgcagggatgaagaacggaaaggacggctacgagggcctgatagaggcggccctggccatctccgcgc

SEQ ID NO: 4113 - DNA, 676 bp, Zea mays
cgctgtgacaatgaaccagctccttggaccaggttggacaaaacacttcatgtcatcactgtcactgctagattagttcttgaccttagagaaaaaaaatgtgtgatcttcctgctgacatctgtactctgctttttagcgacgatcacggtgaccgtccaagaccattgccaaagataaaggagctgcaaggtgcaactgatataacagagaggaaagggcgcccttcatgggattatgatgtatgtacatctgtttcttctttcagttttaccataatatgttatggaatatggatgagttgtattcattgtgataggataaagatggctggaaatgggtggtgcctccgccagtcagcaggaagcctgttctatctggggatcctgagaccgacaagcaaatccgtagagcaacaaagcgtgttcatttgtctgttgctgaaaggctgcttaaaggttcatgctcttccgatttgatttattatttaactcttgggttcattttatgatatttttgtgaaagcatggtgttccctgttcctgcagaatttgcttgttcgatatgccgggcggtgattaaagaaccacttacgactccatgtgcccacaacttttgcaagacttgtttgcttggggcatatgatagccagtcttctgtaagggaaagaagctgt

SEQ ID NO: 4114 - DNA, 402 bp, Zea mays
aagatttcgacatcgggggaataccgatacggatcatacaacgttctgttccaagaaaagcttatgcaaagcgcaacaacacaaggaacactggccctagggttgtcaggatgaaaacagacaaacggacagcggtatctgacccagccctgtcatagagggtgagcaccagtatcagccgcctaacctgaagaagggaggtcatgtttcgcgtttgagctatatatatatatatatatatgcttctcatggggaaacgggaagtgaatgtttttctgactcgggaagttatacaaagctatgagctagccggtccggctgcctgcaccgcatgctcaagaagaagaatgactgtaagaaacaagcccagcaattcgaaggacagcatcacttctcaacatt

SEQ ID NO: 4115 - DNA, 1070 bp, Zea mays
atcttttctctttggtctgcaaattgttgttggcttgcagaaaattctgtttcctgttgtactttgttcattgatttttccacgtcatggtatagcagttccacttgagaaaaacatatcgattagtactattattttgtgttagcccggtacatctgttttctgatgtagttcaagtatgattggaactctttgctttgaatgactggcacaagtgttttcttttcttgttatgatgtggaggtcttttcaccttttcgtatcatatttgtagttctgtgctctttatttttttctcgaacaatgttctgtactcttcaatgttttcaagtcggacgatttgctagtagttttggctgaccgactagggcgattaatcgcgattaatcacgattagtcggacgacttggacgattaatcgcgactggtccaaaccgactttgacaattaatcgcgactaatcgcgattaatcggacgacttgaaaacaatgctctttctcgaaacaaagaatcccaggatgaaagtagaattgtactatttagttgcgagaagtctctggcaatgaaatacattcctatttatttttgctgaatcattgtcatgcagaacctgataattgaaaggtatcttattcaaattaatgattaaaatgtactgatggttttacataaagactccttcacgaaattcttacacctacaatctactctttaatttgtttttttaacattcctgaaattacaatttcaggctgtgacaggtttatgctggcaacggtcgaagcctgtcgttgttaatgagaacagttcttctgaagttgctcttcttgggggaactaatgaagagtctgttcttatgccagatcccttgccttcagcaacacctacaggccttggttctggggtggccactacaagtcttctctctttgacagcaaacacaagtggctatctttcggcctcaaattcttctactatggaggaaacaccatatagaactcgtccgctgactggtggaccgttatcaaagctacaggctcctcttagtaactataatctgaaggatgat

SEQ ID NO: 4116 - DNA, 402 bp, Zea mays
tcctcgaggaggtcaagagcaccggcacgggggagttcagggatgtcagggccggcacaatgtgctatcggctggtgactggggctccgcagggagggatgatggagggaattccttgtggggtttgccccaggattgatgagtgctcgccggaggggataatctcaccgagcacgtgcgtttactacaagaagtggctgcagatggacttctaggcggttagccgtcttctgctgtacctgtatatgtgtatatgatggagtgttggagtccattggagaactcagtttcatattgaccaattggggctgttggatcacactcatcacacgctaggctggattcaaatgttcaattggaacctctgaaaggatagtcatagaagcgcagtttcagattctg

SEQ ID NO: 4117 - DNA, 402 bp, Zea mays
  misc_feature (257)..(259): n is a, c, g, or t
  misc_feature (287)..(287): n is a, c, g, or t
tcctcgaggaggtcaagagcaccggcacgggggagttcagggatgtcagggccggcacaatgtgctatcggctggtgactggggctccgcagggagggatgatggagggaattccttgtggggtttgccccaggattgatgagtgctcgccggaggggataatctcaccgagcacgtgcgtttactacaagaagtggctgcagatggacttctaggcggttagccgtcttctgctgtacctgtatatgtgtatatgnnngagtgttggagtccattggagaactcantttcatattgaccaattggggctgttggatcacactcatcacacgctaggctggattcaaatgttcaattggaacctctgaaaggatagtcatagaagcgcagtttcagattctg

SEQ ID NO: 4118 - DNA, 721 bp, Zea mays
cgcagaggaggcttgcgcaaaaccgcgaggcggcccggaaaagccggatgaggaagaaggtgatcccccttcccctcacgggaagcttctgtacattatgctatgcttgcaagttgcattccatcctgtcttcttcttgctcagtacccccctgtttatttaccctgacgggaggcttactgagttttgtctacagttttactgtaccatgctgtcactgtttccacttgcaagatcgctgaagcactgtgcaaattcgctctgtaggcgtacattgtggagctggaaaacagccggtccaagctgtcccatcttgagcaggagcttcaaagggcaaggcagcaggtgaactcctgatctgttttcctctgaagaacgaaacgatccatactacttcgacgctgattgtctatgggctgtaaatacaggggatgttcattgcaagtggacgctccggagatcatggatgctccactggaggcagatgatctttttttcttctcttttacattgctcagctcttgttctctgaattctgatcctgtgcaatgtaaagcctaacctgtgtccttgcaggtgcgttggcgttcgacctggagtacgcgcggtggctggacgagcaccagcaccacatgaacgacctccgggtggccctgagcgcgcagatcggcgacgacgacctgggcgtgctggtggacggcgcgatgctgcactacgacca

SEQ ID NO: 4119 - DNA, 478 bp, Zea mays
tacttgaaggaaaatatccttcctaaagaccatgtgtccgctgagcgtataatgcggttagctaaacgctacacggtggtagaaggggatctctatcgccatggcgccaatggcattctcatgcgatgcatcacccaggaggagggccgcgagttgctcacggagatccatggaggcgagtgtggaagccattcttcatcccgcacactccaggatgcagctgagttggtaaagtcctgcaaagtatgccagttccatgcaaagcaaatacacacaccagctcaggctctacaaatgattccaccctcctggccattcgccgtatggggggtggatatcctgggaccattccccagggccatcggtgggtaccggttcctcttcgtcgccatcgacaaattcacaaagtggacggaggctacccctattgttagcatcacccagggtgcagatgttgcattcctcaaatcgattatgt

SEQ ID NO: 4120 - DNA, 422 bp, Zea mays
tgtcatctttcaaatgaccaaacacgagaggtagcccaagctgggtgccacgaaacgcaatttcaatttgtaatgaccagcgcgcacggcgtgttagggacagccggacgtccctctcggatgaacacgccggtgtgacgcgcgacgaagctcaggggggtgcaccgcacatgcgcagacctgcctgccaacgaatggcatccgtttccttctctctctctctcgccgattcgtccagccgtatatgtaacgctaacaatatatatctgcaagactacaagttgccattgcctagcacgggctttgattgacacactagctaggctccaaaagggcatcccatgtagtagcttcgcaaagtgttattggatcacggggaagtttagttatgtttttccagctacagctggataaagttagct

SEQ ID NO: 4121 - DNA, 400 bp, Zea mays
gtggagccacggcgtgatctccgacgaggtgtgggcgagcaccctccacaactgcagcttcctccacgacctgtgctcctccaacgcatcggagcacacgttcgagggagggaggatggactgcttcaacctctacgctccggtctgcctccagtcgcccaacggaacctactactccagcagccacgtacgttacgtacctagcgcccgccatatgccgtgtccatggaactccagccgctcttcttcttgtgagatgaaaaacgtgcacgtagtatcttgcagtcgctggtacacagatagatactgaagtgttgcaattaattccggtttgtcagttacctggctacgatccgtgcagcgaccattacgtcagatcttacctcaatagcgtcgaggt

SEQ ID NO: 4122 - DNA, 531 bp, Zea mays
ctctggagcttcattaaaaggcatctaaattcaaagacgatagtcttcttatctagtgtcaagcaggtagtcagttattatttttctgaaaagtacatttgtcttgcacacttacatatgtgaatttttctcatgtcttccaatattcaacttctgcaggtcaaatttgtttatgaaatttttaagaaacttcgtcctggtattcctttgaaatgtatgcatggacggatgaaacatgtggtacagcaggccatagttgcagatttcaatgaagctacctcagttcttttctcaactgatataacatctcgaggactagatataaagaatgtggattgggtggtgcaggtatgccattatgttacgcactaccattgttcttgtatttattctcatgctgtaaccattttatctcatctgcaggttgattgcccagaaaacattgataattacatccacagagttggccgtacagctcgttacaataagaaaggaaaatcacttatattcctttgtcctgaagaagaagca

SEQ ID NO: 4123 - DNA, 979 bp, Zea mays
  misc_feature (913)..(920): n is a, c, g, or t
catattgtatctgcacatgcattgtatctggaacttcatttaaccacacttccggcgatcatgattcatgaatattttgtctccctccatgtcccaattgacttgtactctagtaaagtgaacatcacagacatgtatgattccatattttgaagtatacatatgtgttttcagtaggcatgccgtaacaggttattttcttttgtgttttctccttcaggttggaatatatctgcctagttacgatttattgcgcaattggattgaagaatactcggaccgcaattgtcccaagcttcgaccatatgctcctcttatttctggctctattgcacgatcattggcatgcataacttgttgccctattgagttagcaagaacacgtatgcaggtcagcatcttggactttcttgcatggttgtgtattagcagtcaaattaaataacacctcatgctctgtttcttaatagtcaaggaaagaattctaaagttaagttgacaacatacttacttcagctaataatgcgaaaacttggttgtgtatcagtgtatctttgtattatgtgggtgcaacatgttgctacctcctattcagtgatcaaatgtttatttttttaaaattaggccttcaaagaatcgaatgttggagggaagccccctggaatgtggaagaccttgataggtgtgctttcatcaagacagagcatcaagagccctgaaaacggtaagtgccacgactattttttaaatgcaattggcaaaacatacagttattgtcatcgtatttaaaagatgcaaacataatgcatttaacttctaactcttgtggaccgcattgtttttgcacaaatgcatacatatgaaacttcaaatgaattgcagcatttgttttcatttatcgtgaatattgagnnnnnnnnatggagaggtactggtgcaagcggcggtgcagttcctcgcacgtagtaaccagcgcgcc

SEQ ID NO: 4124 - DNA, 442 bp, Zea mays
agggagagaaacagagcgagagaatccccgacctctcgcctccgccctagctaccaaggttcctcctgatcgattgattccaatccatccaaaaccccaacaaaatgtgagttctcatctcatcctctcctctcctctcctatcccgcgagagatttccacctgttatttttttttcctttccggtttcgtggatggggatctgttctgttctgcgtcgcgcgttttttgttctgatctgttccggcgaacggactggagctgctgtttgggatacattccgcccagaacccggttcctggcctgcgggagggagggaggagtaaatgagcggccgcgcgccgcctccccactgtcggtcgacacatgccgttccactgggtggaatttatggcgactcggacgcggcgctgcttttagtagtaaccaatgcagcttcctcc

SEQ ID NO: 4125 - DNA, 174 bp, Zea mays
gttcatctgggtcgatcggtacagctgtaacacctctaatcacagcttatgccgcctgagacgatcgtttctgtcgcgattccggtcggggtggcgttcagttgtgcgtgtttcttctgcagttgtctacccaatcccaatcgtaacgaaacttcatcggctactcaaagaatc

SEQ ID NO: 4126 - DNA, 430 bp, Zea mays
  misc_feature (6)..(8): n is a, c, g, or t
tggtcnnnatcaactgctcggacaagttcctgagcatccgcgagcggaggaaagcgaggtcgagggagaacgccatccagctggcccggcagcagctgaaggcgcaggaggggtggagggcggcgaaacagttcgcgaggaggcatgtgagcggcatgcagggccatctctcgcgcacgttctcgagacgggtgtcgtttcggcagccggtggacccgcacagctccagccgcagggtgcaggaggcgccgctgatgacgcaggagatgtcagactctgccgtgtttgcgtccgagagcaggagcgagatcacggaggtggtgatgccgtcggttgttgtcgacgtcagcgacggcggagaggtcgtcgtggtggacacgaaggaggacaagcctgcgcccaagggaaagcacaggtccacccatacaca

SEQ ID NO: 4127 - DNA, 369 bp, Zea mays
aggcgcagcaaccggcaagagcgtgaagcggggaccatcgaacgagacggcgcagatcgttcaccggagaaggaaagacaaggcggcggactccagcagcgacgcctcttcgcagatgtcggagagctctaaacccacctgccgcccgaccaagcaggccgtttctctgcccgttccagctctgcgccggtcctcgtctactacctccaggtccaggtcctgccagaccccgtcgcggatgaggccgtcagcagcagcttgccaatcgaaatgcgcgtcttcggctgctcgaacggttgtcgaacagcctgcttttagctatatcatcgctgatgcgcggaaagggaagaagaacgcatgccagagtga

SEQ ID NO: 4128 - DNA, 381 bp, Zea mays
agcggcatgatatcgatgccgagacgaattttttcatgcagccacagtatccttatcagcaatatccacaggctgctgatgttcattggatcaatagcaatcagtatggtgttatcaactcatcagacaagtatgcagctgcgcctcaccgtggagtgcctactgttcgtcatctgggacatggcagtcctgatatctacaggaatggtgctgtaattcctaatggaagtaaccgacggggtttgacacatgtgaataactgtccttttataagttatcctgactgcttttgtgaaacctgtgaatattgtcagattcgtctatctgaaaatctcaaacgttcatttgggcccagacatacacccaaatgttcatcagacg

SEQ ID NO: 4129 - DNA, 350 bp, Zea mays
  misc_feature (228)..(230): n is a, c, g, or t
  misc_feature (241)..(243): n is a, c, g, or t
gaaaaaaagacagaatagattaaaatctgaacggagtgattactgcatataacaggacctctcagatccctgaacttatctaagaagattgtctcgcagaaaaatatatatatacatgccagtctgtcaggctagaagaaaaacaactccagtctctcagatcactgaagaaaacataccactctatttctccaaagtcctaactgaactcctgcgcgtaatccatgnnntactgggcgannntagaagaaaaacaactccagtctctcagatcactgaagaaaacataccactctatttctccaaagtcctaactgaactcctgcgcgtaatccatgttatactgggcg

SEQ ID NO: 4130 - DNA, 1502 bp, Zea mays
aggaggtctttgaggacggatgcccatccctttcaaggaggtctgtacccttacctcatcttgattgtggatgcattatagctggcaaataattatactataaacttatgctttccaattaataaatgtattgtcatctatggagtactgcttcaatagtggttctaagatacctgtaattactactctaataaagaagtatgatgtttcctgctactaacttgatgccacttgagccggaagtattttacctacatgaggaagttgtatgtgctcaaatacaaaatacattagattgtttgatactgctggataccataccttggctacaaaagtttaattcctgatagagcataatgaatgctgttgtcaagtaagagtaaataacaccttcacaaaatgttgaaaaaaccagggtattgcaatcttgggctgaatttctaaagggaagtcaatagtattacaatttgtgactatgtgctatgcttctccttcattaagcgcttgctgtaaccatgtagttcctcacacagtaatcaattactctagtcataaataagtgatattttggacactgacctggtctccaaaacaatagttttcatagtgtcatttcttacagaagtatttacattcaatatagtaaaagtgatactttactaaaccacattttgagactatgctcatcatttttttcaaatatccaaactcaacacatagaaaataatattcgatcaaattttcaaatggttttcttaggacaaccccaaaacataactgctttcagcagtgttttcatttcatgtctcgaaatagatgtttgttggaaggaacagtatctcatcaagaactatcaaccatggcaaaattgtgcgaaagccatgacatcataaaatgttgaaaacaagcttgttttgtcaaaatggggtgttggattccagaagcatccaaaactttagatcatgatgccatgcctaacatttggtttccaatgaatgcaggcttaattctgagtatcctgtccgagacatgttcaaactttttgcatgtgcaatttgtcaaattgacttggaatctggccaaggcatatccatacacgagggtttgtcaaggccagggaagctgcgtccctgggatggccctttcctttgtcacagctgccaggaaaagaaagaggcgatggaggggaagcgccattcacgaggtataaactgtcctaattttattactacaaactgccctagttccttttcacacagcttaccgaatccagattgtgttagcgacaaatcaaacattatattcttacatctgcagattcctcgtccagaaatagcgggtcaagtgaatcgtgactgaagccgagaatcatcttgaggcaaacgcctagcggtgtgacgagctaattatcgttgctgctgttatcttgcagcactttctcatggattaccattgaattgagacatgttggaagtcgccatgcctatatatatgttggagct

SEQ ID NO: 4131 - DNA, 387 bp, Zea mays
ttattgctagcttgtagttttggggtcctataatatttttcttggttctcttaattaattgagctagtaaatcaacaaatctgccactacagccgtcacgggcaaacataaaaaaactgaacaacaccaaattgaggcgcctagtccacaaacctgaactgctgaacttaaatgtctggaagccacagtttctgatttctgatggtttgtttttatgctcatttactctttctttcttccaggtagaccaccttgtgttgattcctcgagtcttcacctggtgcttccgtttgcagcttcatttttaactaaggtacttagatcacatattcacatcactgccaagtattatggtatataggctcctctgtcatatgtgggtctagg

SEQ ID NO: 4132 - DNA, 405 bp, Zea mays
tcgttgatgatctgcctcttaatcggcatctcaaactcttgttgtgctctctacatcagtagagaaggtgtgttgttcacaagtcgtttcttcttaagactatgttttggttgatcttgatctatagaactattttattgtagaactactgaaccctttcgaagtgttgtactcaatttgtgtagaacaatgcatgattaatttctaccaatagtctacggtagccggtagttgttttatcctactagaaattgttgcatggttaattggttaatttgtgtaggatgtgccaaaagaagaggaagagaacaccatcaatatgaatggtgaattattcgtaagcttatcttccactaatggtgctggaagccagaaggagaaagaggaggatggagatcatgtgtc

SEQ ID NO: 4133 - DNA, 876 bp, Zea mays
gggtcggctcttgcagcggggacaggtgcgatctagatctgaggggcggtagcggcaggggcggtaggtgagcgttgctggaccaggtgttggggatcgtggcgagaggaggactcggactcgtcgtcgttgcagatgggagccagatctccagtgactccgtgagctgcctgctctgcttcacagcacacacccagcacaacactagctcagctcggcaaggtagcagtcattgctcgccatgcaatgtcattgccgctgctcccctcctctagctcaccgtcgccgtagcggggcttctgttggagctgtcagtttcttgttctctgttacaactatgtcattcaaatgcagtggtaatttagaagtaaatttttcactccacatttgagcataaagtaatggaatagatggtataaccttgcaggtggttgcatccatggactggccacaagtcacaacatataaagctctggtctcggcacaagcacacagggaagagattatacaaaatctcggcggaatgataaggtaatttatatcctctgtgttcatgaaagctgtgaatgaaactaaggtgccacgtaattatgctctgcagggagttgctgatttcgttcaataagagggctggcaaaaagcccaaaaggattatattttacaggtatgtgcttgacttaactatctagataactcttggatgaagccttcattttgtgacttcctttgcttttgttttgtttatttagggatggaataagtgaaggacaattcaaccatgttttgctccttgaaatggacgcgataaggaaggcttgtgcctctctggaagatgggtatctacccccagtgacatttgtcataatacagaaaagg

SEQ ID NO: 4134 - DNA, 405 bp, Zea mays
ggctgtgttgtctgatgaagctatctatcccgggaaggcaaaacgggggtgaatgaataaaaaaaaagggtcaacctaggcatcctgctttggctcctcaccggctaatcttctccgttgctggtgctcagcgaccttgtagtccacgacctcacggaacaggccaggggttagctcgcagtccttgctcccgtagacagccgcctggacgctggccatcatcttggctatctctcgtccggagaagccctgggtcttggccgccgcctcgcggatcaggtcgtcggtgacgcccttcaccacgatcttctggggctggcggcggaagaaacggagccagctcttctcgcgcttgtcgccggctctgatgacgtacttgtccaggtatagcttcaggagcttgaa

SEQ ID NO: 4135 - DNA, 354 bp, Zea mays
tctggcgggccagagaccggccttcccgccaccaacttgccctacgcagttcctcgcctgtcgaacctcactgtcctcaccctctgcagcattgctctccaggtttgctcaggcgtctgtgccatttcctttcagcccattttactgcctcaacgcttatacttgtttgccttgccttgtagtatgtttcttctttcacagccaaggccggctcggagggcaacctgcatggcttaagggagctccagttgctcacgttcgggatggccaactccaaccttgctgacatttatagcttcctcaagacctgcccgtgtcctcgcttggagcgtctctttgtgcaggtctctattt

SEQ ID NO: 4136 - DNA, 643 bp, Zea mays
cgttctctgccctcgggtacctcgtctgttcagtcttcagagctgggttcggtctattcctcatcctctcttgttgatccggagtgccttaagttttggtacgctctagcctgcttctcttagattatattcagattatgaaagagtgaagaactccttcagcttgcctttgttgtaaggttcattcatccgtcgcctcaaaattctaatttcaccccgaatctttatttttttcaggccgtcttgttactgtctgctgttccacagtcgacgaatcacgaatgctaatggtgtttgtgctgcttggaactcattttttcatctcttctgcgcgagactgtccggaagatgtttttttttgtgtgtttctctgtatgctgaattcgtccaattattacttggattgcaggaggaagaatgcgtagaggcaccgtcgtacatccacattgacagcaacgctttctcctacagaaagtgagcagttctgcgttagttctttctcaatctgtccaatgtgggttgaactttgatgggactggttcgcaacatttcctctcgttttctgttgttatgggaatgttatacttcctgactacctgtgttatcttttggaggcataagagtcagacagaggaggacatag

SEQ ID NO: 4137 - DNA, 249 bp, Zea mays
gaccacgacaactgcgacaagatcgggaggaccaggggtcttctcgacaggatcatctcctacgcgggcatagtggcaaacgggccggcgacggggccgccgacagacatgcgcctcaaggcggtcaagcagtcgctccgcgttgtgaagaggctggcgagcacgacggggaccaccggaaagctgcttcgcagggagctctctgacattgtgttcacggtgagcaacatcagggaggtgctgcagctg

SEQ ID NO: 4138 - DNA, 432 bp, Zea mays
gtcggttgagccaagaattgaatgtgtcatcgagagtcagcacattcaattcgttacaagctgcaccgttttttccggtcctctcatggcgatcgcgcgcgtctagctattatatcctgtcgatggtaggaagaatatatggatatggaccagcagtcccagttggaccgttccctacgacactggtgtaccgcattgcctgctccgtttggtaagtaacctcgtcgtgaggcggcagacgaacggccaggagtccggaccgggaccgggaccgggacggcagcagatgtgcagtgcagttcattcagcttcgtcgatctcgatcatgccaaccacttttgccggcctgcatttagtactgatgttcttctggaagcaggtcgcagtcgcagcccacgacgcttgcattgacaagctagagattccacgcta

SEQ ID NO: 4139 - DNA, 822 bp, Zea mays
tggagagtcgagcctcgaggtcgaggaggagggaagggaaaaggggggcgcatgggcggccagtggctgggggaggggatgccgtcgtccaacctgcagtgcttcttggactgcaccacccccaccgtcgagacgcacattctccccaaggtgacgcaattgccccccacctcccaagttctcgccttcgatgttcttcctggtttctggccggggcttgccacggtcgtcgcgtcgtcgatctgcggcgtcctggcctcctgggagtctcggatttgtcatttactccttttctccgcaccgcttagtgtggtggggtgaaaaagatgggctttcttctactctttccggctcatcttttttttactgatgcatcgttctgctttttctgaccgtaaattctcatgtcgaattgctggtaacagtacgctagtactgttcctttctccccccttaattatttggaggattgtttgcacggaaccaagtcttactagccggagaaagttgcgattcacgctgcggtgattcctgccatcttgaattcggctttccttcaactgttccattaatgctcttgggtgacggatcatatgtagggccgcttgttagtactactctcttcctatctgaaagttactcgccgttggttttggtccagacgaatggacgattgccgaccgacgcctggcaccacgctgagatggacagcgtcgagtacttcaatcttgccgacctctgggaacagtactatgaatggagcgcgtacggcgccggagctacggtgcagctcccaggaggggacagagtagttcagtacta

SEQ ID NO: 4140 - DNA, 388 bp, Zea mays
tactccagccatggcgtgtctctgctccatctccctcgcggcgccctttccagccgtgctctctgctgcatctcgccatcgacgctggtcgagtcctcgtctccaacttcctcacgctcggctcccaggttttccacttcaccggctactgctcttcctggtgcgcgcgctcctccggccaccggtctacccatctggcgcatgctctccacctacaggtcgtttccatgctgcactccttcatcacgtcgctcctcaagctcgtcctggtcactgtctttagctacaccgtcgccttcattcttctcgcaagctcctcccaatctgtcgtccctgtctctgattcctggcgtcattttccaaaccccgctgctccgcttccctctct

SEQ ID NO: 4141 - DNA, 398 bp, Zea mays
gtgcatcaatgtggggcttatgtcacagtcagggcaggttgacttcgaccaggacatgacagagagggagaaaatggattacctccgcaagcaggaacgcgattaccagcagcgtgtaaggggtgccaagccctgcatcttgccagaaaatgtacgtggagaggtgctgggaatgatgaagaagcaggagaaggtgagcgccaggatgctgcagaagatcagggaccatgtccagaaatggtaccacaacgagggtttcgtatgcgcacaggttgttaactttggaaaccttaacaccaatgaggttgtctgtgaggtggttgagggtgacatcaccaaggtggagtaccagttccaggataagcttggaaatattgttgagggaaatacacagcttg

SEQ ID NO: 4142 - DNA, 433 bp, Zea mays
tgagatttgccgattaaaaaacccataacattcagcattttcaggtgagagtgttgattttgcagacaccatcaaacagactaggattgatgtctccgtcaagtactagcacattggccattaacaatttgagttgttgaatgcataccttccagagcaacgcacaccaagcgggtcgtcgttgttgcctgtgatcctccactgtgatcggcaggtccaccgccacacggtcactgccactcaccatctccaggtcagctgccgcggcgctgaccgccttcttcccgtccgcgctccccaaatccatgtagaagactagccccacgaagaaggcatagaagagcacgaacccgacggcctgccagaggaagatctcggcgctgaggtagacgtagaacagcgcggacgcggcgaggaggtagaagaagacgtc

SEQ ID NO: 4143 - DNA, 429 bp, Zea mays
tgattgactgaaggctgtgatgaccaaaaacacctacctattttctgactcctgacgatagaaaccaatggatccttctgagcctttattaagatctcgcttttctgtttgattaatcttcgctttttctctggttcggttgtcatctgatatttttttacccctaaaaatgatgcgcgagggtaggatttgctttgttgatgggatgataagccttgacagaaacttcagtgttgacccaaatatcagactacaattatctgatcgactccaaattcttgcctttttgaacttgttcgtagtatttattttgctcttgaagtcgaacgttgccgtttgttttttgtttcaacctggtatgtgtttgtgtgttgtccgtgcacaataagccgatgctctggatgatgaacacaggaaggaagcatggta

SEQ ID NO: 4144 - DNA, 341 bp, Zea mays
tagtgcatcacagcgagaagattgccatcgcattcagtctcatcactactgaaccaggagagaccattagggtcaccaaaaacctccgagtttgtactgactgccactctgccatcaagctcatatcgagcataacctgtcgtgaaattgttgtacgagataacaatagattccattgctttagagatggtcattgttcttgcaacgactactggtagtagacctacatgttgcagttgcgagcggcatggagagctggaagcatgtccagtccatttttgtttgatgtaaaacttttatcggctagaattttgaccgggcatagaagaggcagagtatta

SEQ ID NO: 4145 - DNA, 474 bp, Zea mays
cgattcctgtggccagcgatccacattccgattacaagcggaacccaacagagccttactttattacagttggcactttggtgttctcttaagtcactccttttcgtcttgcaccacagtttgtgaacaagcgtacacgatggcccagaatctggatcccagcagtgaaggtagaggggttcttcagttcaagacaggtttggcatctgtaattaaggtatgcttactttcactgtaaacatgactgggtacacttgttactttagtttctgctcattcttcttctcagtgattatttctaaatttcccatgttctaatcatggtattccgcagcaaaaacttgctaaaaaggatggggctccgatagaccggcagaatgacgttcaagtcctgtggaacttttatcttgaatacaagagtcgttgtcgggttgatgatatgcaacgtgagcaggagagactgagagagtcagg

SEQ ID NO: 4146 - DNA, 399 bp, Zea mays
  misc_feature (6)..(9): n is a, c, g, or t
gaacannnngctgccttcattgatgctcttggtcggaatcaccagctggaagaagcgactgagttcatcaaagatttgccatccaggattggtcctggtacagctgggtcctggggagctctcctaggtgcatgtcgccttcatggaaatatcgagcttgcagaagaagtggcagagtttctcttcaggttagagcctgggaacagtggtcggtatgtcatgatgtcaaacatctatgcagctgcaggacagtgggatgatgcacgtcgagtcagggggctcatgaaggagaagggccttaagaaggatcaggcttacagttggattgaggtgcggagtgcaaagcatgtattcgttgctgatgacatctctcattgcgaggcagacaagatatatgag

SEQ ID NO: 4147 - DNA, 331 bp, Zea mays
  misc_feature (239)..(239): n is a, c, g, or t
  misc_feature (272)..(274): n is a, c, g, or t
  misc_feature (280)..(281): n is a, c, g, or t
  misc_feature (299)..(307): n is a, c, g, or t
  misc_feature (312)..(312): n is a, c, g, or t
  misc_feature (314)..(318): n is a, c, g, or t
  misc_feature (320)..(324): n is a, c, g, or t
  misc_feature (326)..(328): n is a, c, g, or t
atgtggtggggtgccactagcaattaaagtaattgcaggtgtcctccgtgacaagaaacggatacaagagtggcaggccattagagacagtaatctattcgatgctgagggcaaagagcgtagagtatctgcatgtttgaggttgagctatctgaacttgccctctcatttgaagcagtgcttcacgatttgttcactgtttcctaaaggaccctcctctaggactcgtacagagggtntttggccgacgtgctgttcagcagggagagatnnngagagnncaaaatcgtattcccgannnnnnnnnctaanannnnnannnnntnnncat

SEQ ID NO: 4148 - DNA, 566 bp, Zea mays
tcacctgacagcacatgtcgctaattatacccaggtactacacatttccattgtcaaactagcattcggcatgtctgttatctctctgtaatgacgacttgtagcccataccatatgtctcaggccatgataatgcttggaggaaggagatttatttttgttggactgcccccgatgggttgcttgccgattgcccggactttagtgggcacaggatcggacagatgcgacgagacgttaaatcagcttgccaattcgttcaactcaaagctgattcagctgttgaatttcataaattttcagcaccagatacggacttcatacatagacacatatactaccatacatgatgcaacggtggatcctagtacctttggtatatatgcagcatttctctttcttgtataggcaacagcaagtgcatagttttatgtcctggctaatcgattgcttgtgttttgggaatggtaggcctaactgaagtgtcaagagggtgctgcggatcgggggtgatcgaagttgggcaaacatgccgagggcgaagaacatgtggagaccctagcaag

SEQ ID NO: 4149 - DNA, 387 bp, Zea mays
gttttcctcgcctgatcttgaaaagttagcaagcttttggagagtcctactacttctatgctcatgcatggttggaaactgctcgtccttgaattattgacgcgtctgaaaggtccagcttagactgccgtcctgagctaccaagagtgttggaaacaacgttctggcattgagatattcacccctcaaactatatctcaatcttttttttcattaagttgacgagttgaacgtgtttcttgtttttttttctctttttttaaacagagtagctttccactgtagctgaaaaacacaaatatataagctacagtacactaattcctgcatggtccactctatcacccttgaattcagtagttgattggtgaaagcaaactgaaacgg

SEQ ID NO: 4150 - DNA, 644 bp, Zea mays
  misc_feature (631)..(636): n is a, c, g, or t
atacgcttactgaaactccatctgctgataaggtgataccagcagctccttcaatggacaatgctgggtgggccacatttgatacacctccagaacaaaagcagcctgcactcactgggctttcttatgtttctgctacaagcatcgataaacaagctcttaatcatgatttgttttcatctgaatcaaatgatgagctaacatggttccggagctctaaggatgatgcttcggttaccaatcataatcagtctactgctacatctcttgatacatgcagttctgaggtgaggaacattttcgttttttatgtcaacatgtgtttgcaataaaatgaagtttgctccttgtaaagtatgacacacttttttggaatagttgaaatcattctctcttctgaaaacgttaatggcattataaagttccgaataggcttaggccttgttactgttagggagggcctcataaaactgctctgcctgctagggtatattctgcactatagcaaggagctgcttctctctctttcagaaatgaactagaagccggcaaagccagagccaagagaaaccatgccaaacaaggccttagtcttatgcttcatatcttctgtttgaattctttactttcnnnnnntctccagc

SEQ ID NO: 4151 - DNA, 372 bp, Zea mays
tcaccaccgaagcaatatatatgtgtgctgcgcagtacctgtgtgccggcagcttcctcaagggttggacgagctgcgacagctggagagcctccccaagcacccctatctccagatccttgtcgccgacgagtgcccgtgtccacgtccttggccgccccggccttctccacagcgctgtctgtggtgtccgcggcctcccacgccttgccggccgccgcgtccttgtactccctcgccttcttcgaccgctcgtgtgcctcggcggccttcttcgaccgtcgctgatctccttctcggtggtcttctccgtcgaggccgaagacactcctcaccgctacactctaccacgtctactgttgtaccatctgt

SEQ ID NO: 4152 - DNA, 501 bp, Zea mays
atcgacgcggttatcttcccctccaacaaaaaagcacaacgtgtagagtgcaacctcaaactcaggactgacgccaatcaacgtgctggatactgatttcagcacgccatgccactcaaactgaacagtcagcagctgtatctctgaatcaggctgccaagaccagggtagaacattttagctaacattattcgtatgcacagcagcgttgcatcaattcttagctacatagtaatatactcaccgattcaccacgacgccttggaaatatataaccttggtaatccacatttcccttggcttcttccaggtaaaactgcaaattagtcacggaatacctgttagaaatgtccaaatgaggaaattagatttcattaacaacacgagaacttgcctgaatccagttatggaagcctgatacctcactctccccttgtccccgtcctttgatctcaccaacaaacacatgctcaaaggcagaagagcagctagagttgccac

SEQ ID NO: 4153 - DNA, 346 bp, Zea mays
ccacaacgaactagtcaaaaaactgctaccattactattccagatactatatgcaacaggactggcagcatacatgtgcacgatagcttgtacatcactcggatgccagacccagcaccttctggtgcagtctgggattatcttttttggtgccgagtggagcgttgccctaaaatggattgtgtattcacaagttcgtccatggtaggtgctgagaacagggacgacaggatcttttggagactggcaacgctatgggtgtcccagcttcccaaggcacggttcatatggagctcgaggaaacacgagatcagcggttattcgtttctggacctagacttcgtgc

SEQ ID NO: 4154 - DNA, 374 bp, Zea mays
atgtatcttgttttttgttgaaaagtttagtacttgagtgtcaatcatacgtgttcgcttgctaaaaactattgacaatgtatcttgttctttgttgaaaagtttagtacttgagtgtcaatcatatttcagagtcattgtgatgtactgagcttggaggttttggaccattgatctgcagaagttcaatacaataggaagaataagttaaaaaaaacgtggtccaaagtaatcttcagcagtaatgtttgtgtgctaaatgctcttccggagaattgtggtgatgcaaaccttgtaccaatgaatatacactgtcaatctgctatcttttccgtggcctctaactcttagagtgtgtttggtttgagttgagg

SEQ ID NO: 4155 - DNA, 377 bp, Zea mays
ccctgccctctgacgtgttctaccacatcatcagcacaccagccatctgtaaccccgaaagcttgcaaataactcaagacgccgagggccaccgaatcatcaacctcataatggctgaagactggtgggccccaataacactatacctccagggccattaccatccaaccgatcgcaacgaggccaatcgactgaaacacaggagcagtgatttcgcaatagtcaagggtcagctttacaaaaagggaatcagccagcctatgctgaaatgcataaccgaaaccgaaggcctagagatccttcgcaaagtccacggcggaacctacgagtcacactcagggcccagggtcctcgcagccaaagtgattcatcaagga

SEQ ID NO: 4156 - DNA, 426 bp, Zea mays
cgtatgtgggttgagaaatactgtcctccccccctttcttcggaatgaaattacctgaattcttatgtctagcatactgaccattatctcgagatcttgtactttgcagttgtcttgcaggttagtggttcgtggactgcacctcatagcccatgtacagcgatggagattcagcaaggtgcaatcaaacttattcacccgttgctgaatttgtgaatgccatccgctgattcctgttgatcaaatctgcgttgtcaaacaaacagtctttttctgttattgattctcatcaagagattatctccatttctgtctgttctgccaatttacagggctctggagtcacaaactcactgtcaagaagtgcaggatatctggttagcgttgcttaagcatagcttatgatgtttcactgttcccaagtga

SEQ ID NO: 4157 - DNA, 439 bp, Zea mays
caggaatgtgacaagaagggtgttgaggtccgacgccatgaagctgcgtgctgaggctgaggcaccatgtggagcgggtgtggaggttagcaaaactgatagtttggagaggaaacactgtgacactactgtggaggctgaggcttgcaaaagtagtgtgctgatggaagttgcctgcaatggtggggaagccaacggattagttaacttggatgcgagcgatgtttcggaagaatcaactaggtgttctgataataatatgggaatgcctggtgttcctgcaacagatttttctcaagatggtggcttagctcaaggtagcattgcagaatcagatgataagacagtcaagtcagatgaggtgtccgctgtaactcattcagagcagaatgactcccaagctggaataaacagttataatgctgatgaggcccaagat

SEQ ID NO: 4158 - DNA, 591 bp, Zea mays
gagtggtgtacgtgcgctagactgccagtggcagctgctctgcaagctagctaaggtgaaggatggatatcgagtcgaggcaagtttccaaaggggacgccatagctgctgctgtctctgttgactggaagggaaggccctgcgaccccctcaagcacggcggcatgaaagccgcggtcttcgtcctaggttcgtgccagagctttttctcctctctctcggttccaaagttttatttggctgaacaagtgttggttttccacccttcgttcttgcagctctcgctgtgttaatttgtgttccttgtgctctatatgattttgctcttcataatttggtcgatgaacctgcatgcgtcgtcgtgcacatgttgccagggatccaggcgttcgaaatgatggcggttgcggcggtggggaacaacctgatcacgtacgtgttcggggagatgcatttcccgctgtcgcaggcggcgaacatcgtgaccaacttcatcggcaccgtcttcctcatctccctccttggtggcttcctctccgactcctacctgggcagcttctggaccatgctcatctttggattcgtcgagct

SEQ ID NO: 4159 - DNA, 226 bp, Zea mays
  misc_feature (178)..(178): n is a, c, g, or t
  misc_feature (180)..(180): n is a, c, g, or t
  misc_feature (195)..(195): n is a, c, g, or t
ctcgagccgagagcgacgaccttcgcacccgacgaaggcttgctggggccagggacgacaggcttcacagctggcggtggtttgctactgccgatggcggtagacctcgagatcccccacgccttcttgacctcgcgactagggtcctcgaccctagtgaacgcccggcgcttccacntngcatcttggcgatcnttatccatcactgccgatacaacagcagcaa

SEQ ID NO: 4160 - DNA, 358 bp, Zea mays
atatgtatcttaattttaaagaaaaaactactaattttatgtacatgcttttttgttgaagaaaaaaaatgaatacaacacgcgtccagacggagtgaaggaggagcgcgaccaagcacgttctctcctaaaattaactgccaacaaaaaatttcctagcagccacagttgaccgcgacaaggagactcagtcaaacacgctgtccaggcgcgcacgcctggtcgtcatgttcaggttcagcagacttggcgcctgcgccggcgtcgccaactgtcctaccgcccttgctcgacccgtcagtctggacgctcctccgcgtcgaccgcgatccccaggcgggaagcctcgtggataacg

SEQ ID NO: 4161 - DNA, 405 bp, Zea mays
  misc_feature (4)..(9): n is a, c, g, or t
atcnnnnnngattgttgaccatgagatcattgtacgagattccagtcgcttccatcatttcaagaatggctcttgttcctgtggtggctattggtgataccttgttctgtgaaagcagcaggtgcagaagcaacactaatgttttccaagtgaaagaaatactaatgtgatcatgacttttctcaggactaatgtgttcatgacttcattataatgattcacgcagaattctgtttaccattatttctctctttgtttttagttcttctgtgacatacacctgcactggtgtttatgttgtttgcctctctttgttcatgtctaatgctgatatatttgaaggcataattcttatagatgatctgcacagtccactgttgttcattctcctgaataagccttgct

SEQ ID NO: 4162 - DNA, 498 bp, Zea mays
caggttctgtccaacaagttcggccacttcgagaaggccggcttcgggcagctgacgcggctgctgcactatggcgtgagcacccacgagggcagcaagtgggccaagcaccgcaggatcatcaaccccgctttccatttcgagaagctcaaggtctcgtctcatgcgtgaatcacctcatcagtgtagcttgctatttgatggatccgatacgagcttcccgatcaatcgattctcctgcagcgcatgctgccggcctttgcgtcgtgctgcgccgacctggtgagcacatgggagcgtctggtggtcgcggccgacggcgaaccatgcgaggtggacatctggccggacatgcagaggctgacgggggacgtcatctcccgcgtcgccttcggcagcagctacctggaaggcaggaggatcttcgagctccaggaggagcaggtgcacctcgccatgctcgtcgccggcaagatacacatccctggatacatgatg

SEQ ID NO: 4163 - DNA, 436 bp, Zea mays
gatctgcacagttacaagaagcaatttgctgctagtatataagtatatatatatatactttcctgctccactgaacaaagcggcttgacgacaccgtgcaaaagtgccagtagaaaacatccatgcgacgccaagtggacagacgggcccaccgacaaccgagcgttgccgccgttcccggcggccggcctctcaactcgcagtcgccgggtttccggatcgggaagcagcagcgagccgcggatttccgtcggccattgcccagaacgagcaaccacagggaagagaaagaacatgcctagactagagggcagaggctaaagcaaaccaacggttcctgtaacgcgaagtgtataagcttcagcttcacttgtagtctagtactgctgccccgggtggccgctcaagcacatgccgtgagaaagagcgtggactt

SEQ ID NO: 4164 - DNA, 461 bp, Zea mays
gcataccgcccatgccatagcagttagaacggcaacaaacatatgtccactgtacataagatcattacagccaccgcttgatttcctcagcagatgataccatgagggcccctctccggtgcttggcctcaaaatgtctactaagaaactcatcagtccccagtcaggtctgtactcgtcggggtaatcttgaagagtagctattatgatcaggaaggatgaaaaagcaaaatgagctcacagtggtctatcaaagcagcagctctattattgcacaacagcagttcacagtctgaatgtactgaccgtatggcatatcctcctccatgaccctcgagatcatgtctggatctgaagcataaggagcgtaatatttctgtgcccacggatgtggatggtcaggtatctgataccgagcttcggcgcaccaaggtcgagcagacggaaggatcgtggcaaga

SEQ ID NO: 4165 - DNA, 409 bp, Zea mays
aggtgttcgatatgatgccagataaagataggattgcatggacagcgctgatatctgggcatgagcagaatggagaggaggacaccgctcttgagcttttcgaacagatgctggccaagggagtatcaccaacgccttttgtcttggtgtcagctttgggtgcatgtgccaaacttggacttgtcacacgtgggaaggaattgcactgcttcatcttacgccggaacattggctctgtccctttcaacattttcatccacaatgcactcgttgacatgtactctaagtgtggagacatgatggctgcgatggcagtatttgactggatgcctgagagggactttatctcttggaactcaatggtcacggggttctcacataatggcctcggaaagcagtcacttgctat

SEQ ID NO: 4166 - DNA, 427 bp, Zea mays
atgccagatacaaaattggaggatatcaaaacatctttttagttccaaatctatcaatggtagattaggattctttcattctacggaaattactttgatggatgttgttataaaacaaaaacaatgtggttgtctgcccctgctcgtccagttcaggtcggtcggcagtcatctacgcccacgccagctgcggcgcagccgaccccctgcccggccagttcaggctgactgacagtcggccacggccacacccacacagccccgcttgaatctttattcttcacaatttgttagagagaaggctagttctggatggcttccatgtaacttgatgggtgacctttgttgtgttgtgcgagttgtgacaaaatcatctctatctactatgcttgcagatggtgggagtgtgttgctttgcctgaatatg

SEQ ID NO: 4167 - DNA, 322 bp, Zea mays
agctgacgagagacgaactctgtcctctgtgggttgcagggaaagatgtgaaggaagtctatgcggcggaggcgcctgtgatccatggggaggagatcggcggcccgaagctgaacaccaataccatgtgagctgctcatggagagcgcgggtgatctctgagtattgtgtcaggtctgtgggtttgtgtacacagtacacgtgaatggtgtggtttgcgctgtggagtagagtaggagctggaataataagcgtgctggttgcgttcgccgtggtgcgctttgctttttacgtgtgcgtgtgattgtggatctacgagtaa

SEQ ID NO: 4168 - DNA, 509 bp, Zea mays
cgttctggattttcttcacttcagcaattactgaatcaagtctaacaaaagtatcatcatcacacttcattatgtatctagcatatacaacatggacctgagaggacaagttcattataatagtgacaaagtgttttacagggacttcatagtagcaagaaagaaagcacttagacataccccatactcgcatatggcaattgtcttgagaacaaccaaatcatagctatccatgaatggcacaataacaatgtccccgaaaaactcagcctcctttttcagctctgcattaatctcgttcctgccatgctgcagaaaagaaaaaaaatgaccaactcaagtccaacaaaaaaaagtactcgagtttggtcttcaagatttaccagggcaacaaaaaaccgggccacaacattcggcaacttctgagcagcagacatccatgtctttctcacagccattcgctcagcaaaatggttgcctgctgataggataccgatgaaaatctcaac

SEQ ID NO: 4169 - DNA, 408 bp, Zea mays
acaaacaagatccgtgcctacgcacactgcgcgaaaaactcggtaaggaggagtggcacatgcgatggaaagctcctgttgactgtccgatgtctgaaccatgcacgcgttaacatgttttcaggaagagatcgctctgctcctgatcaacctggacggcatcagcacgaaccgcatctacgtgacgagccaaggcgcgcacgcccggagcggaaggaagaaggggagcgggacgtccgacgtccacatcatccctgcagggctcggcgaagcagcagccgcgctcacgagacaggagtaccatctaactcccaaggacgggaacctgcagagccagcagctgctgctgaacggcaacgtcctggcaaccgacgccgacggggagatcccggagctggagcccgtgca

SEQ ID NO: 4170 - DNA, 762 bp, Zea mays
gaaaagaaaaggcaatcatgccatgcatgcctatgcacaaactgcagctaagtccaacctgaacaaaagaactacttactgaaattaaatccaaactgaagaaacgaactatcaactgaaattgatcgtgcaaactaacttataccaaataacaagaagtccatacaacatcctgtgtatttgacaagtaacacttttgcatcactcatttatacctataagcaattaaagcacaaaatcccaaccatagttgcagcgggaaataagcaccacaggtaattcaattcaactaagcgcatagataagaatagaccgaaaaatgggtagataaattgcaagaccacaagtaagctatgcgtgagacattccatgtcacatacaagttaagttaacaaaccacgcgtaccttgcagcgcttgtagcagaattctaggagtcattgattcagcagaaccacccctcaatctttcaactagctcagcacattttctgaacaatttcctcccctttgagtcctcacttagacggaatatcttgcaaacatagtcaagctcacgcagcaaggcatccctgtcccaattgggtgcacattgctgaaagacatccctaacccatccaaacagttcagatgtcctctggcaggcctggcaccggaaaagcatctctgcatggccaacgccgttcttaatcgtctgcccagtcccaatctttccatcacgaattgcacagtctgtgtgagtccagtgcgagcagatatcacac

SEQ ID NO: 4171 - DNA, 400 bp, Zea mays
cacaatcacaccactagttttccgaagtgccttccatcccgcacaatacggtgggggaggaggcgacgttcctggatcggagaccgccaaggacttacttcaaccagatcaaggggtacccgcgcagaagcactggatctgcctcaagaactacttcaaccagaagcgcggcccggtaatgtcgcttgcgcgccgacccctctcctcttgtgatcttatcgatatcccgttcgttctatgatgtgctcgcatgatttctcttgcttggcgatttcttctggtccatagttgtagtaacttgtacccggtaggccggtaggatcagggtttttcgtcgtggtgatgccatgctactatgctagtctttgttttggggaatggagttattcgttggattgga

SEQ ID NO: 4172 - DNA, 490 bp, Zea mays
tctttacaggtaccagaaaccgggagggagcgcactcaccagggtttgccaggttgtggttgccgccgtccggaaggcccatgtggatgtgccgagcgacagctctctcctgtatgaagtgccaggcaaggaggcagcggcggtcgtagggagcaggaagctggtgcacactcaagggctaaggtatggtacttgtagtggttttgagagcttcctaatttttattttgtctactgaatgggaaaacaaaacaaaatgaccgcatttagtaggttctttgatcgggctgccaccttttcctccgtcgacgaagcatcgtctgctgctgctgctgtgcctagtccatggaagctgtgcacggtgacgcaggtggaggagctgaaggtcctggcgagaatgttgcctgtgctgctagctggcgtagtcttcaacatggctgaagccttcttcccgcttttcgtcgaacaaggagaagtcatggacaagaaca

SEQ ID NO: 4173 - DNA, 694 bp, Zea mays
cagcagcaattgccatctttgcaggcacaggtaagatgtaacttttttctgtagctgtagttattatttctgaattctgtctctgaccttccagaacatggttcatcatcctacacctaactttgaagcagttcggctgttggcctgctgtccagtgtacatcccatgtgcatgcatagcaggccaacatccgacacctgactaccgtgcttcgaagctacacaaggcttttgatagtagtgcttttcttattcctacaagtcacttgaaagttctgttttggattaaaaatgaacttcagctttccttctggttctttggcaactcgcatccctagttgcaatggaaacttgttgagctttagatcagcattaattttctgcattcacgtatgttattgtaacatttatatgccgatccagggatcggagcagcagatgcaggaagggctcagcccagccttcacgatagaccaagattgcctcaactagacagcctggagtcgcgtatgctaggattccagcaacgagctgaggtctgtacaagcacaagagtttagagtagccgatattgtcaggcgttagctgccaaaggctaatatcacgatcgaggtgtaccgtgtacgagaccattcctgagttgcgcagctggcagctaaactgcggtcgcgccttctccgagggaatcgagaaaa

SEQ ID NO: 4174 - DNA, 851 bp, Zea mays
  misc_feature (844)..(845): n is a, c, g, or t
gatgaatgcccccgtgctgtgcctccctctgtctcgggtgtctcggtccggctgtaacggttcatcctgtgtgttaacctgtgtggtaacctgactgatcacctgaccaaatccatttactgatcttcctattcagtgtacgtctatggctgcagcctctttgacgctactggagttggtatctggatgatatcatagattcatagtagattatatagctttcttccctgtgcatgcatactggttactagatgaaagagctcgtgttacgttatgccacactcctctcttccgagtaggacatgccttcacacccaaattctgcatatccttctagagaccagctgtgagttgggctctgaacgtttcttccatgttcaattcgattgaacatgactgttttgattagctgttctgttctgtttattttttatttctcacaatttactggctgcagcgtgagttcgtctagtattggtaaaaccttctgctgttggcagaaacagagtctcactctacaaatactgcaccaaaccctgatctgttctattcccttttcctgcaaatgaactggggaaacaatgtccagtaactcacacttgtgtgctcaaacctgctcatcgttctgtggatcaccaggcaatggtaccgcgactccgcggagctgagagaggactggaggatggagtacctggacgcttggaaccagttcgggttgtcggtgacgcgcgagccgcagccgctgtgcgctacttgcgcgatcagaagcctgcgtagcctgtgcccttgaccttggcttggcaccttgctgctctctgcatccatgcgcctgtaattttgatcnngagggg

SEQ ID NO: 4175 - DNA, 686 bp, Zea mays
cctcttgacatgatgtacacatgcggtttcctgtaacaataaaagatcatttgtcaagaaggggaaggattagtatatatatgactggaggtagcttgatagtgtcacatccatgtagtgcacgaagcatagcagaaatatccaactaataataagtgatgctagaaggaagagcagttgcagagagagagagagagagagagagagaagattacgataattattagtattaatacgctaagtattaaagaatggtcaaattttgcttcattgaaagactagacttgttttaactacatgaaaggtttcaaaagggtgcctagttaataaaaaggacaaaaaaaagcttacctctttgtcttctgtactacagggttttgacagagaacggcaatcttcttccaacacactgacatgatcagccaatgatgctacgagagctagatgtgtgttcaactcagcttttagttctgcatgttcgtcctgaatgccagccaactttttctgcaactcctcaatgtgagcatctcgggaagagacctccttcattagcaactcctttagggatattgctctattctctgtagctttaccattcatcataagcttgaatgctgtttcttcatacaccgcagaattcactgaagaggtaattgcatcatccatcagaacaacaaattccctct

SEQ ID NO: 4176 - DNA, 433 bp, Zea mays
tgctccacgatctttctctcgctagcaatttgatcggtggaagcatcccagatgggattggcaacgccacaaagctcagaaaccttgatctctcggacaaccttttaggtggtagcctccctgagtcactctgcaacctcactttgttagtggagctcgatctcgacgggaacgacattggtggacacattccggcatgctttgacgggctcaggaatctgaccaagctgtccatgaggaggaatgtcctcgacggcgaaatcccggcgactgtcgggaacctctcggcactgtcactgttcgacgtgtctgagaacaacctcaccggagaaattccgacctccttgagtggccttgtcaatctcggttctttcaatgtgtcctacaacaatctctcgggacctgtgcctgcagctctctccaacaagttcaa

SEQ ID NO: 4177 - DNA, 554 bp, Zea mays
ttttttcgtagccctggcagagattgcttcagcttcgatagcaacatcttttgcttcgactttagtatgttgtacttcacttattaccaatgaagtggaaactttttagcaaaggttagtaaagcaatcactagaatgagtacactaaaatttaacaaaagcgaaaagtcacataccttcgaatttcctgctttgaagcttattcctaatgtccacatgcttttcagatgcttatcgtgcttataagaattttttgaaagttagtatgagcataccccgcgaaggaaaatacgaaggtgacagagtacataccttctccctattctttatagattcttcaatacttaattctttcccacccctcttccaaatttcagataagaattttttggaccactccgaagcttcgacagttgaccttcggacatggtcagcagaaactcagaaatcgggttctatgcaagctctcacgtggttgcacctgactttcaatagaaccgaagcagtgcttcgggcacgtttccaagcacagtagtcctctcgtgctgagagaa

SEQ ID NO: 4178 - DNA, 707 bp, Zea mays
  misc_feature (697)..(697): n is a, c, g, or t
gagttgaaatcgaatatgggggtattgggcaaagaagctgttgcagcaatgactgccgttgaggcccaacagcaaagattgaccttgcagcgtcttattgcattggtacattatttgtctagttgggtgatttgggccacttgactttttgtttgtttgtcttgaagttgtctattgtgtctcataacatttgtggacttaattgaaggttgaatcagagagaaactaccaccaaaaggtcctacaaattcttgatcaacttgagagagaggtctgatggtttcacatccacatcctttccatccttgcccattgtgctaaagaaagtttacaacttcaagaaaaatctggtcggttatgttatcttgattgagctttcttattttttttctagatggtatctgagcgccaaagaatcgaaggagcacctccggtggttgagagttccatgcctccaccgcctgcatatgaagaagtcaatggtatattcatgagaaatacagttgcagaattggtcgagactgtggagtatttcttggctgaggtaacttgtttcgtcacattgcacaagttcgtagctgccaggcgctagctcttgatttttacccatataataatctacatatttgttgtcatttttcttcggtaggcaatccagtcataccaagccgaaagcgataccgagctcaacctttcnactggtgact

SEQ ID NO: 4179 - DNA, 409 bp, Zea mays
tctctccaagtagacgcttcaatcaatgcagtatatgataattgtacatcctctacctctaccaataatccccacatgagcaaactccttgtactatatgatggatcctattggtgtctttgaggacaatctctctacaggtgattattgaaatcagctttgcagcaagatgacagtcgctacaggttctgagattcatagtcaccctgataattgtccctggactagtgttcaaaaggagaaatgcaatagctaatttctcactgtgaacagaaagatggtcttccttgtcttcttcttcgacatcatgaagtgtagcctctacctctgggttataacccatcccccttatttttcccaatagctcatccagtttatggtagatcatttcagattgtgggtgacatct

SEQ ID NO: 4180 - DNA, 515 bp, Zea mays
  misc_feature (272)..(280): n is a, c, g, or t
  misc_feature (285)..(289): n is a, c, g, or t
  misc_feature (291)..(292): n is a, c, g, or t
  misc_feature (294)..(304): n is a, c, g, or t
  misc_feature (310)..(313): n is a, c, g, or t
  misc_feature (316)..(321): n is a, c, g, or t
  misc_feature (333)..(333): n is a, c, g, or t
  misc_feature (335)..(335): n is a, c, g, or t
  misc_feature (344)..(347): n is a, c, g, or t
  misc_feature (349)..(349): n is a, c, g, or t
  misc_feature (351)..(351): n is a, c, g, or t
  misc_feature (353)..(354): n is a, c, g, or t
  misc_feature (359)..(359): n is a, c, g, or t
  misc_feature (361)..(362): n is a, c, g, or t
  misc_feature (364)..(369): n is a, c, g, or t
  misc_feature (372)..(376): n is a, c, g, or t
  misc_feature (379)..(381): n is a, c, g, or t
  misc_feature (392)..(398): n is a, c, g, or t
  misc_feature (400)..(410): n is a, c, g, or t
  misc_feature (424)..(427): n is a, c, g, or t
  misc_feature (440)..(446): n is a, c, g, or t
  misc_feature (450)..(463): n is a, c, g, or t
  misc_feature (465)..(469): n is a, c, g, or t
  misc_feature (472)..(477): n is a, c, g, or t
  misc_feature (479)..(480): n is a, c, g, or t
  misc_feature (483)..(483): n is a, c, g, or t
  misc_feature (492)..(500): n is a, c, g, or t
  misc_feature (503)..(503): n is a, c, g, or t
gacgcgtcggatgcgccatggtcgcgtgctacggcggcaggggcaccttcatcacctgcaactacgacccgccgggcaactacgtcggcctgcgcccgtactgacaccgttcctttcgtcgtcgtctggccgccgccgccgccggcggcctgtgtctcttgctgtcccatggacatcgttgctgctacggtgctaccaccactataatatcgagatgacatgacaatgtgtacaaaagttgcctggctaccgttattatacttgctaaaaannnnnnnnnggacnnnnngnnannnnnnnnnnntgatcnnnncannnnnngaccaggggacntngagttctannnnangncnntatgngnntnnnnnntgnnnnnctnnntctatgtgtgnnnnnnncnnnnnnnnnnnagtgattctgccannnntcggatatcatgnnnnnnnagtnnnnnnnnnnnnnngnnnnnacnnnnnnanntanccttctgtnnnnnnnnnttntcgtttttttac

SEQ ID NO: 4181 - DNA, 408 bp, Zea mays
taagcacactatcccaaactacagataaaaagacgggcaaaaagaaccatccaccgtccaggcaaaggcctgctggaactgcattacagctggagaagacatgcttcacctatagcctttgggaacaaacaaaatctgcaacaggccatagaagcacacagtctagaaagtgaaactttaaacccagtgcataaaataggaggagagacagtagaaataaccccattattaagcaaacatcagtcacgaactgagtcttttggagcaaagcgaatgagatgggaggagagccggctcttcctaaaagagtaaaaacaccaaagctaattgggaacaggaaaagccaaccatttcttcaagaatcaggcaagggtcatgtttcaccagatgaagaacacgcaaacaggt

SEQ ID NO: 4182 - DNA, 440 bp, Zea mays
aaatctcactgtccaagaaagctgggaacgggcatctgatataactgatagagttcgcaagatgattaactatgtcaagtttgaaaggttccaaaagtttcaggatattgcaaaggtattgcgtatggatcaaaagctgctagttattgattctcctgataactggccgtctacgtacttaatgtttgactctgcatgctactatcaagatgtgtttgtgcgcctgacagaacaggaaggtcattatgatgtttttctgtctgctaatgactgggctgatgtgaaagccctcactgaaatactggacgtagtctatcatgctatggagaagtttcctgtagaaaacccaactgcaaacctctatttcaatgagatgtgtgagatccacgtgcttttgaaaacctggtgcaagagtccatctactgttgttgccaaagttg

SEQ ID NO: 4183 - DNA, 381 bp, Zea mays
tccattctgcaacggccagagagtgttatccaccacgagtccttgtctggaacgacggcgtgactctttgcgctggagttattcagcggcttgactacggatctgcacagtgccaagctctctgatcgtcgtgactgccgacgcgagacctgatgatgtacgagaccgagagagcgatcgaagcactcggccagttcctcggtgtcagggcttacacctgcagtcctgcacctaccggaggcacgagtgcacgagtgtccgcgtggaccaggaaactgtgtgtcgagcagatcagctcaggttgccattggaactcccggacgcgttcttgacctgctgggaagccggaagggatgcgttgcgtagagaccacatcagaat

SEQ ID NO: 4184 - DNA, 483 bp, Zea mays
aattcgtcgcaggaggctaggctaagagaatttatcctgtccagaaggaggctaggccggacctatataaacagcgcacacgacgagtcggcctcggcctccacggccactagccgcctcagatcagagtactccggtacggaccagagcgcgcagaaggcggccgacaagatcacagcgctgcccgggcagccgggcggcgtcggcttcgaccagtacagcgggtacgtgaccgtcgacgaggagagcggccgtgcgctcttctactacttcgtggaagcggcgcgcgacgcctcggcaaagccgttgctcctgtggcttaacggaggttagggcgataacacgtctgacgtctcttctgaaacatgcatgcagtagagtagacaagaacagcgtaaacacactagctagctcacgttgatgccctctttatgtgtgctgccacaggccctggttgctcgtcggtaggctatagagcaatga

SEQ ID NO: 4185 - DNA, 497 bp, Zea mays
agcgtcagatttgatttggtctctggagtttgtattggtttgttacatcattgatgatggatttggattgttgggttttttgggtgtaatcaggcggtgggcgacaagggcgcggggaaagtaggcgtggctttcccggtggtggtgagcacctggccgttccgtgaggcggtcagagcggcgtggaaggtggtttcgaccggtgaaggatggggttcggccgtcgatgctgtcgtcgctggctgctccgcctgcgaggacctccgctgcgatggtacaggtcagtacctgctggcctgttcccttgcacgtgtcgtccttcatatgtcaaagagcaaggccgaacttgggtggcaatggccatgctgccctctgaagcacattgttgatgcagcagcattatcacattggttggaaacatgatgcaacatcagggactacaatagaaatgggttgttaagttttatggtttggatctggattacctgttgactgct

SEQ ID NO: 4186 - DNA, 516 bp, Zea mays
ttgcctgcctttcaccaggtagcctcgattcttccttgtccaattgatggttccatacttcaattgtccaaagttgagacatggattcagaagtacgtttgcccttctattgagtattgagaattgttggtcatggccaggtactcatatttatgtgcatcaagaacgtgccgataccacatgtccggcctgaagagcggttcctcgtcggaaggatcggccccaagcagtacagaatctaccggtgcatcgtcaggtacggctaccaagacttccacaaggacgacgtggagttcgagaaggagctggtgtgcagcgtggccgagttcatccggtcagggtcgtccaagctgaacggcacggccgaggccgaggaggtcgacgaggaggaggagcagcgcatggcggtcgtccgctccaacagcgtccgcatgctggaggaagaggccacggtgcagaacaccgtcggggtcggcccgtcgtcgcgggccagcagggagatacagtcgccgtcat

SEQ ID NO: 4187 - DNA, 351 bp, Zea mays
agctgaatggctcacgcgtgtagggttttggagcagcgtaaccggccagggtagagattggtagctcacgcaggggccggcagaccgagtacccagccacctcaggcctagtttggatactcgtattgaggtgggttagatgtaacttaaactaatttataacacaatccacctcaacacatatggattaaagtcaatactagagtatccacacagccttatacggtggtctgggctgtctcgccggttctaatagatatatagaagcaagtatgatacgtagaagtaaacaatcagcgtagcatgtatagagcgaatacatagacatggaggatcgtaatgtaatcttgg

SEQ ID NO: 4188 - DNA, 438 bp, Zea mays
gcagctcgatcaacctgagcgagtggttcactgacgcagacttcgacagcgacttgggatgcctgttcgacgggcgctctgcagttgatggaggaagcaagggtggcgtaggtgtggcggatttcagtttgtttgaagcaggtgatggtcagctgaaggatgttctttcggatatggaagaggggatacaacctccaacgataatcagtgtgtgcaattgattctgagacctatgcgtggcgtgcgacaagtgtcctgtctttgggtatacttggtttgtccaatgccacggtgccactgctgcgagtcagctgaacttcttgtagaaagcacatggcagcttggcattagacaagtgtgttggtgttccttaattctttggatatgctttaggcattgactaaccttaagggttcgtcactgtctcgcttagcttag

SEQ ID NO: 4189 - DNA, 265 bp, Zea mays
cttgatgtaacgccccattttttcgagccaatacatgcatgttaacattatgtaaattcatgtaaataggaacccgcctgacttagttcaataagatagttctgttcgtttcaaatatatttatgttttatcttgaggtaaggccccattttctggaggtcgtctttggacatgtacaaacaatctcaacctatgttgaaaaagtttttattcaattagtgctatccctatcctataacatatgtcatcattctggactcgatcc

SEQ ID NO: 4190 - DNA, 503 bp, Zea mays
cgtcctggtcatccgtttccacgcgcagggcggtcacgtcttcgtcgcctccatctgcatcgtcttggccggaatgtaattaagcgattccttaatccttatgcatgcgttgcggtgcggctagcctgcctgatacgtacctggcactgctctgctctgaggtttccaggtccatcatggtggctctgccaaacctgcgttacttcgtcgacgcggcgacggcggcggcacggatgcgcgaaatgatcgacaagctgcagcctctcgagacggagggcaagaagggcaccgccatggagaacatcaggggccagatcacgttcaaggacgtgcatttctcgtacccgtcaaggcctgacacgcgggtgctccacgccgtgaatctcaccatctccgagggcgccaccgtcggcctcgtcggcggcagcgggtccgggaagtccaccatcctctcgttgctgcagaggttctacagccaggactcgggggagatactactggac

SEQ ID NO: 4191 - DNA, 379 bp, Zea mays
ggaggcttcttgcttgttcaaccctgtacaagttccatttttggattttaagcgtttatttatgcttttcccagttaggcatgacgagctggagagtccatctcctgctgagagatgtttgttttacccttctttgcttcctccaccttacacccaaataagcaactgcagtgacgttggtttcggctgcacccaaactacatgactgaagaaacttgtggcctgtgtaacgcgaatccatcagaacgccaaagttatggcttctggttgtggcaaattatggttcctccctgttcggttgagtggttgcattctggaggtatcttgttctggactcaggctaatgattgtgcgtgcgactgtttcagagtcatttcaa

SEQ ID NO: 4192 - DNA, 586 bp, Zea mays
cggtctctttggattgagcgcatcaatgctggtacacgcctccatggggtatgtatcgtttacaattgaggctcattttctatccttggcccaaagtctcttttcatggtcacgctaaaacaaacaattctcagaagacaccagctttgttcatctcatgcaagtagaataggttgccagagctttggaatctttcgaaacttaagcagtgcagtgcccatgcttattatagtaccttggttgtttgtccaggtgaactacggcaatttcatgcatgggttaatgaaggagaacatccaactcaacaggaaggtgctctcggagctgtcaatgcacgagccatacagcttcaaggctcttgtcgatgtgtctcggaatgcatttcctggcaacaggcctgttcctgccaaggaggggctagcgagcattctgtaaacgttttcttcccaataattaaacttgatggtttacatctacatctgaaagtgacctgtctgcttgtaacgtgacgaggaggtccgaaattgtcacgggcattgcacgtgttattcctctatttttttcccacctatctaattgcatgcta

SEQ ID NO: 4193 - DNA, 456 bp, Zea mays
catggatgcaatgcaactgggtacccagagtctctcttcagcatcatcagaacgtgtcggcctgacctctacttcctttcccctgtgttctacatgttcttcagatatgcattgtcattggggtgctgctgatggtgctgtcaccgattggcggacttcggcagatgattctgaaaatcaagacatacaaattctaccaagactactctggtctaagccataattaacacacgcccatcatcggctgaaactggtttctgaatctcatcgatgccatggaattccaaaaaaaataaaacattctcagagaaagatacatacatgtacagtctcatgactaatgatgatcagtggtcctgttaatttgtcttgaaccatgaattggttatggattaccatatgcatatatgtatcagtattgtaggggaaatgtttgtgtgtgttcactttggactt

SEQ ID NO: 4194 - DNA, 456 bp, Zea mays
  misc_feature (20)..(20): n is a, c, g, or t
  misc_feature (33)..(33): n is a, c, g, or t
  misc_feature (140)..(140): n is a, c, g, or t
  misc_feature (212)..(212): n is a, c, g, or t
  misc_feature (231)..(231): n is a, c, g, or t
  misc_feature (260)..(260): n is a, c, g, or t
  misc_feature (357)..(357): n is a, c, g, or t
  misc_feature (367)..(367): n is a, c, g, or t
catggatgcaatgcaactgngtacccagagtcnctcttcagcatcatcagaacgtgtcggcctgacctctacttcctttcccctgtgttctacatgttcttcagatatgcattgtcattggggtgctgctgatggtgctntcaccgattggcggacttcggcagatgattctgaaaatcaagacatacaaattctaccaagactactctggnctaagccataattaacacncgcccatcatcggctgaaactggtttctnaatctcatcgatgccatggaattccaaaaaaaataaaacattctcagagaaagatacatacatgtacagtctcatgactaatgatgatcagtggtcntgttaatttntcttgaaccatgaattggttatggattaccatatgcatatatgtatcagtattgtaggggaaatgtttgtgtgtgttcactttggactt

SEQ ID NO: 4195 - DNA, 393 bp, Zea mays
tgctgagttaagatgctctgtgggatatttgaagtccattattgcagtgacagagggtttggtgttcagtgaagacagtaaagttgctggaaattgcagtgcctgtctctctgtgattttgggatgggagaaatttggaagccaagaaaaggtggcagtcagagaatctaaatggtttaggctaataatggaggaatttgttgtggccttgactgctcctggtttgacgtcgaaatctttctccagtcagcagaagtttgctgcgaatatagctgtttcgttgctcaggctgagccaagtgccagattggctgacatcgttgtttgatgggcatctgatatctggcatcgtggctaatctttctgctaggatcccacagagcatcttaactca

SEQ ID NO: 4196 - DNA, 661 bp, Zea mays
tctgtgttctgtatgtgtgccatgccaaagaataaaagaaccaagatagagacactgccacataacatcctgtaggcgtgctgtgggcatactgttttcttaatcagatcacaacaattcagtgaggttcgacatgttcatcacagaatgccagactggtaaattcagtggataaggttaacaccatcctggtcattgataaggaatattctcaattaacacaaacacggtatcattcaaaaaagttcaaattgtattagtaaactgctatgtttgcagcaggccaaaggaatatgaataccaaaatcttacatccataatagaaaacttctccttcattttgaggcaaggttgcacccactcagaagtatgcaaaggaagcacctcactttccagcacagagggaacttctgcttctactgtaaaattaaattaataagattatagagaccaaggaaagtaaactacaaataatttacgatagatccatcaacctataccttgaaggtttatcctgtgtgtgacaaaagactgcaaaaacacaatttcagagaaattttagcctgcgcggtcatgattattccaacacattaaagaagagggagattgacattgtatacatgagtactcatcaataaagattgaacctcagtgtcaattt

SEQ ID NO: 4197 - DNA, 345 bp, Zea mays
ttcagatgaatgaaaaccatacttgtttattccatttccttctaactcggaacagagattacaagctaaacagacatggtgaaagaatgacaagtgtacataaagaataaagaattacaactactaacaattgaatcttttatcctatcacctataaaaacaaagctacaaacaaatctttcttactcctttgcttctttttttttgttcttctgattgtataaaagaattgtcagactgtataatgaactaagttttcagtaacagcaaaagaaccactgaaaaaccatgttcttttcttcttcacttcaccttgtgtcttccccccattcagctatgctgaga

SEQ ID NO: 4198 - DNA, 422 bp, Zea mays
ggtacaataaccagcagttcgttcgcgctcgctacctcgtgtcatcccgcggggaactgctgatggtcgtcaggctcgctgcccaccatcgcgcgctgacgtcgtcgttcaaggtattccggatgaccgtaatcactagggctaggacctggatcgaggaggttgcattgtgtggccgaatgctgttcgtggggcgaggatgctccaggtcctacgaggtgagtcagtacccagggttcaaggacggcatcttcttcttggatgatcggagcttctacgacgtcgagatgatgttcggcagaatcaatgagaggctgtacccctgcagcgacaacggcaggtggtcgccggcggaagggctgtctcgccatgtcgacctcttcttcccggagcgagttccttctttgaactctcctccggct

SEQ ID NO: 4199 - DNA, 482 bp, Zea mays
agctcggggaactgaccaggggcatccggccccttttcactacagtatggagaaacatagattgtggacccttcgcccaacaaaattgggagaggatcgaggaaagaaccaaccaaccaatcaaaccaaagacaatacatctaacaagccctgaccagagagcaaaaggcacgagcgtatgtacatgagttatgcacaggttgagcggagaaaaagaatgtgcaaaaagggacatgcagctggaaggaccaccctgttagtcctttctttggtgtaggaaggtgaagccagaattctcccggatcagaggtggcatgtcgacatctgttacctcgatttctgtcatcgacttcgagatgtcgtccaccgaaaacggaatgctgtgattaggagcacactgtgtgtcaagcaacggccttcaagtcaacaatacgtatatctgagtaggaataagcaaaaacaataacctggaatcatcatcc

SEQ ID NO: 4200 - DNA, 307 bp, Zea mays
  misc_feature (28)..(28): n is a, c, g, or t
  misc_feature (84)..(84): n is a, c, g, or t
  misc_feature (193)..(198): n is a, c, g, or t
  misc_feature (202)..(202): n is a, c, g, or t
  misc_feature (224)..(240): n is a, c, g, or t
  misc_feature (243)..(249): n is a, c, g, or t
  misc_feature (254)..(254): n is a, c, g, or t
  misc_feature (278)..(279): n is a, c, g, or t
attccaaagccaaagattgcatcagttntgctgctatttcctcctatcattctttctgatgttgaaaatgatattaagcctagnattcgtgaatgggagaaggtatttttgttcatggtatctattggaacctgctagattgtacacttgacaataacacattaatactagtgatcccatttttaaatttccnnnnnnggcnttgaacaagactatattactannnnnnnnnnnnnnnnnccnnnnnnnctttnaacgagtgtgatagagaactacannaaaatgttgttgtttttcaaccaaaaag

SEQ ID NO: 4201 - DNA, 567 bp, Zea mays
  misc_feature (400)..(400): n is a, c, g, or t
  misc_feature (402)..(403): n is a, c, g, or t
  misc_feature (405)..(405): n is a, c, g, or t
  misc_feature (410)..(414): n is a, c, g, or t
  misc_feature (416)..(417): n is a, c, g, or t
  misc_feature (420)..(428): n is a, c, g, or t
  misc_feature (430)..(430): n is a, c, g, or t
  misc_feature (445)..(446): n is a, c, g, or t
  misc_feature (492)..(496): n is a, c, g, or t
  misc_feature (504)..(504): n is a, c, g, or t
  misc_feature (523)..(523): n is a, c, g, or t
  misc_feature (526)..(528): n is a, c, g, or t
cgctctcaaggtgcctgccgacgccgacatgctctacgaggtcggcgacaaggtggacgcccagcagcccaagatcgcgcataccgatgagttctcgtttcttgacaaggcagccgtcgtctccgaatcggacatggaggagatgcgcgtgtcggggccgggggagaccggttcgtcgtcgtggaggctctgcaccgtcacccaggtggaggagctcaagatcctggtgcggctgctgcccatatgggtgaccagcgtcatcgtgtcctcggcgtacgcgcagatgaccaccacattcatccagcagggcagcgccatgaacatgtccatcctgtccgtgccggtggcagcggcgtccatgggctcgtttgaggtggtcttccctcctcaaacgagagcntnngnacgcnnnnncnncgnnnnnnnnngnatggacatgttcatnncgctgcctgctggatgaatgtggtggtcatctgcgcgtacgcgagnnnnnatgacgcnggtcacatatgggcagcancgnnnaggatcttgagctctcacctgggtgacggtgcagagctc

SEQ ID NO: 4202 - DNA, 487 bp, Zea mays
  misc_feature (11)..(12): n is a, c, g, or t
  misc_feature (314)..(316): n is a, c, g, or t
  misc_feature (399)..(484): n is a, c, g, or t
tttgatgtgcnnaaggagctgcctggtggattgcctctcatgaagccagaggattaccaatactttggaactttgctgaatgaagaagaggaggaggagctatcgccagaggagcagaaggagaggaaaatcatgaaactgttactcaaagtgaagaatggtacacctccacagcgtaaaacagcacttcggcaattgacagacaaagcccgggagttcggtgctggaccactgttcaacaaaatcctgcccttactcatgcagccaacactggaggaccaggagaggcatcttctggtgaaggtcattgatannntactgtataagctggatgagctggtccgaccttttgtgcacaagattcttgtggttattgaaccactgttgattgatgaggannnnnnnnnnnnnnnnnnnnnnnnnnnnnnnnnnnnnnnnnnnnnnnnnnnnnnnnnnnnnnnnnnnnnnnnnnnnnnnnnnnnnnccc

SEQ ID NO: 4203 - DNA, 447 bp, Zea mays
  misc_feature (30)..(30): n is a, c, g, or t
tctccctagccgagcttctctctcccctgntgtttcccatgcgtgcaaggagcactaaggccagcgcccttgccctctgctccagccatggcgtgggccttctctggtccgggctcgcagtcgcccatggcgctctccccttctccgcggcgttcggtagcaggaaagagcagcgccccttccttctctcccatgaccggcgctccctgtcctcctccccatggcgcccgtgcccctgctctaggtgctcgcctcctccatttcggatggccggccttggtagccgctgttgccatgagtgccatggtcgagcgccctattccctgctccatggctcgagctcgagtttcctcatggcgctgcctccctgtccatggcgacgcagcagctccctcccatggtgccccctgctcttcctccttggcgcctagaaattgcagcaacata

SEQ ID NO: 4204 - DNA, 654 bp, Zea mays
gtgtgcaggaggaggaggtggtgctggaggggaagatctcacaagcgagtgaagaccacacagtctcgcgcactcgcaaacccagtgcacgctgcggttttcctcttcgcccaccttcttggagcggggaggttggccatgaggaggtggtgcccggctgccctgctgggctgcgtagtggcgctgtccgttctggtggccgccgtggaatgcgtcaatgcgctgtggcttacgacaagaaggcagtgctgattgatgggcagatgcggattctcttctccggatccatacacttccccaggagcacccctgatgtaactgcattttacaaaatctcttctccccccactattccctggagaggtttatggctgcggtcagctgtttcttgatgcaaagctcgcaaacccagtgcacgctgcggagaggttttagccgtccctctttcttccacggttagtttcttggatggggtttgagattttctcggtcattgtcccctctggcctccatcccttgtttttctctacagcatctgtgtttcttggttcttccttgcacaacatttggataacccaaactaagaaacttccgacaaaaaaactattttgggtggttttgtggcattttttagaatctatggatctgaagtga

SEQ ID NO: 4205 - DNA, 1108 bp, Zea mays
ataatcgctacatacattattcattgttttgaataccacattctccaagttggaggtatcacttagaaatgcttgtgaggtatgcaatgtaatgtttgatacattctggtattttcagatggacttcttttttgtttttaaccaaatgatttcagggtcaagatgaactatttatagatgatggaaacttgcatgaactgtttgggaaattaccagaagttgatgtagagagttcagaatggacagaggccttggcaacagatggtacaagtttaatctatcaaaaccttcagaagctagatagttttctgtcctctcaggtaagcatctctatcttcctaagaggctaagacaaccacacatgtgtcatttctggtttcaacctcttatgttcaagtcttcaagactagtgacctttgttgttgatgaaatacattaagggtgcaattcattgtatttgatatatagttatactaacaaagttttgatgctacctgtttaggctgcctgtaaataatatacatatacatgcatacaacaaccaatgattttgctgattagaattatcagtaggatcgaagtaaaagctataagcaaccacattggacaagtgttgagacatcaaaacttaccacatagataagctgatgatgtatccgggcccaatttgtatagttgcatctcattattagaataccagtacaattttatgaacttttcccttatgttcttttgtcttttttattctgtagtactttttttaaaaagaaactaacaggagctctgcctttcaattaagcggagaatagagtttgcgtacaagtttattctgtagtacttgctagaaataactttggtttgatcactaaattgactgctatagccccccctcccccgaaatcttgtagcgctttgtacttatatatgtgtgtgttccttatggatatatttaaagcaaggtgtttattaactacctgttgctctttaattgtagctctcaagccataaaagaccaaacaaattgaccatatattggttaccctatacatgtggagcagtaggtctctctgtgtgttctctgtggctttacgccatagcagttgatgaa

SEQ ID NO: 4206 - DNA, 1387 bp, Zea mays
  misc_feature (8)..(8): n is a, c, g, or t
gcttttcncgtaatgatgcatcccggtgttgatgcttttgaggctgaaaccacaggtgtacccaaaagagaggcagtatcgtatttagaatgcagtaaaagttatagttccgtgataatatcaagtgaacattccctaaaattaataaatcttcagatatcaaatcaaggataattcaataagactagaaagagcaaataaagaacactgaactactaaactatgagatgggataatttatgaacgcacaagtgcaagccaaatatggttggcttatcacagttgttaacagagtgctacatacatttcccaatacccagaacaaatttcataaaaaaaggatgccaaaagcccaaaatgattatctgcatgcccaagagtaaccaccttgctagctgccctggagttttttagtttaagatgatggtagatgtggctatagtagatcgtctgtccagtaagaatcagagttgtgatggtatatagctgcattgcaaaagctaagttcagtcattacgctgcaggaattaaaataaagataagagaaacttggtattgtgccttaccagtgccatgtagaactgagttggcagctgcaattatgaacaaaatgaaaatattatatttggcattttaggaaaaaaaatataaaattctcatacaatctcatgaataatttcatcgtgtcaaaaggaaaaaggtgaatatatcaatgcacagttgcacacgagcaattttatgacaaataccatatgaatcatcttccacagatgctattttgtcacaaatattaatacagatctatttggaattcctgtctaactatccatattctgtggtgccataatgtgtcagttcatgaataattgtgaacgtacaataaaagttaataatgctggcagaaacaagtagagtcttatggtgcagtttagggattcatagaataatgaaggctggcagaaacaagtagaataatatccattctgttaatgataacaccacattacactatacaaaataaatgccattacttccgttaagaagctggtattcgatgttagatcaaatacagaactgtcaatgtcctacaatatacatatgtcaaattactgttgaagatggctcagaaaaagaagtataagtaatggttcttacagttgcaggttcgaggaagcaaccggcaaggttaaacaaatctctgcacaatcatagaagcataacatggaattatacagggttcgacgcttaacaagaaggtacaagtgtaagcatgcaaggagcagaaggcatgtgaaataatataatcgcatccaattccaagtaggagaagacatctgacgtagcatacccaacaatccaggtcataaggaaggcgacagagagcccc

SEQ ID NO: 4207 - DNA, 410 bp, Zea mays
  misc_feature (402)..(402): n is a, c, g, or t
tcgtatgtcgcatattgagctgtcatctgcaatagttcccgtgctcgaggattaatcataatacgcgatactgcatgcattgggcccgacaggattatgccggtctgctgagatcactgacagtgtacacaatgtagtaggaaacatagttctcgacttctcgtgccatcttcctgaggacctttctatgcgatcatgcatgcattgcgtatttagacgtgaactatgtaggctttagaatgggttgtgttggggaaaagaaaggagagataagaagaggtaggaatagaggcactagtgacccaaactgaggtttcaataaatggtacgtacatgcttaacttgagagaccacaccattcttcattgatagtatttcccttgtgtgtaatgttgtgacagncgtatcca

SEQ ID NO: 4208 - DNA, 246 bp, Zea mays
tcgggtcatccgagcaccgcatggtgcggctgctgcaggtcgcgatgcagtgcgtcgacgcctcccccggctctgccccgccgccgaccatgcgggaggtcgccggcatgatcaatgccatccgcggcgacgaggacgacgggtccgtctccttcggggcatgatgccatcaaacgaggagcaaggaccggagaactcgactcgtcgtcatcgaccacagcgctgcggtactctgcgagagatgta

SEQ ID NO: 4209 - DNA, 306 bp, Zea mays
  misc_feature (295)..(302): n is a, c, g, or t
agcacctcttcttcgacccgcgcgggcagctgatccacctgtggaacaagatcttcctgtccgcctgcctgctgtcgctgttcgtggacccgctgttcctgtacctgacgggcacgcagcggaacacgtgcgtcgagttcgaggactcgctggcgctcacgctgtccatgatccgctcgctgctggacctcttctacggcgcgcacatcctgttccgcttccgcaccgccttcatcgcgccgtcgtcgcgcgtgttcgggcggggcgagctcgtcatccagccctacgagatcgnnnnnnnngtac

SEQ ID NO: 4210 - DNA, 391 bp, Zea mays
acctagtccttactgcgccctcccacagaggccgtcattcactaatctagctgctacgcttcgcttcccgctccgattgggagctagggtttagcttatctccgagctcagcttcgggtcgcggcacgcggcatggcggggtacggggaagagaaccagaacgccatgaacgggtacgaggaggaagaggaggaagaagaggttgaagaagtcgaggaggtgtacgaagaggaggaggagggggacggggagagggaaggagacgagggggcagccgccgaggcagcagcgatggcggccgagacgagaagtgtcgatggaggccggggcctagcggaggccgttgggaatgttgatgccggaggcgaggatgagagggatgcagattcta

SEQ ID NO: 4211 - DNA, 452 bp, Zea mays
cactgaactctataagtagcaagtcaacaaattagatgtaaaaacaatcagaggaactgcgtagcgtagacattggtccctttttttccaggaagaacactcatcctacaaataaaaactacaaaaatactcctcacaccaaggcaggtcgtgcatcaccatcaattcgagcaaggtgccagcgccatcaccttcaatccatcatacaagtactttaataaattgatagaaaaaacaaagaacactcttttccgcagtacccattaccatacacgtcttgggacttgggcgaagtagaagcttgttacctgctctcggcttggcaatggctgaacgacagctccttgttgcagtattgttgccggtgaggtcgtcgacgcggaccatggtgctggcttcgctgtagaactggtggacgacatcgggggtttgttgcagcaggttgtagtagt

SEQ ID NO: 4212 - DNA, 799 bp, Zea mays
  misc_feature (652)..(653): n is a, c, g, or t
  misc_feature (673)..(675): n is a, c, g, or t
  misc_feature (687)..(700): n is a, c, g, or t
  misc_feature (706)..(714): n is a, c, g, or t
  misc_feature (717)..(724): n is a, c, g, or t
  misc_feature (726)..(733): n is a, c, g, or t
  misc_feature (736)..(749): n is a, c, g, or t
  misc_feature (751)..(764): n is a, c, g, or t
  misc_feature (766)..(766): n is a, c, g, or t
  misc_feature (768)..(770): n is a, c, g, or t
  misc_feature (772)..(772): n is a, c, g, or t
  misc_feature (774)..(790): n is a, c, g, or t
  misc_feature (792)..(792): n is a, c, g, or t
  misc_feature (794)..(794): n is a, c, g, or t
gagcggggagacgcgagaacgcgacagggctcttggatcccccagagggccagagcccagagcccacacaacagcaggtacgcggagtatgttttggtcctcttcctgtccttcccgtccccggttggcgatctcttcgtctttcgtcgtggcatccagttccgtccatctccccaccaggccaccaccaccagcagcagcagcatagatttggcacgagttcccgtcacgtttggattcgatcgctcctttgtgtattctagtccacgctctgatgatcgctggcgtctgacgagggcaacagccacagatcatgaatccagtgcagtcctcttcattttgttttgttttgtttcgtttgtgcattctagtcctcgctctgatcgctggcgtctgccgagggccacagctgtcgatcatgaatccagtgcagccctcttcattttttgttttgtttttttactataataaaagaacggaagcccccctttttgggatttcttgatttgcgcggacgcggacagtggattttgcgtctccggcgaagtgccgtgccgtaccgccactgccacacttgcagtccatgttcccgtggatcttgcgatccagacgcgggaaccccaccacctgttgattccctgtttttttttgnncttttcccctgcatttctgnnnatgccgatgccnnnnnnnnnnnnnntttgcnnnnnnnnnccnnnnnnnnannnnnnnntannnnnnnnnnnnnnannnnnnnnnnnnnncncnnntncnnnnnnnnnnnnnnnnngngnggggg

SEQ ID NO: 4213 - DNA, 677 bp, Zea mays
cgtgcccgtgcgtttccttgtcgcatcgcacgtagccattaattcccatgcacgtaggccaccgctgcatgctgcacggccacgagaacagcacacgcccctcgttacgttcctggcatgcatatctgattgcgtttcttgctccttgcgtgttcctcgtgcatcgtggcatgtcgatcggcggatcgagcaggtgtgggaggtgccggagggcgcggaggttctggcctcctccgacaagaccggcgtcgagatgttctgcgtcggcgagcacgtgctgggcatccaggggcacccggagtacaccaaggacatcttcctcagcctcgtcgaccgcctcctcgccgcgggatccatcaccgtgagtgcctgctttcacgtcaccttacagcgactgattcctctcaccaaacggacaagcagccgcgtcgctctccgcatctctactctgattccgctttgccactcgcacacgctgcagattccctttgctgaggccgtgaacaggcagctggagaccactgcgccggaccgggagttctggctcatgctctgcaagagcttcctcaaggctcgtgaagaataagagtattaattagagtttgcacactgtgatgtcattgtcacttaccattaaaacggttgtaaatcttctatcacttcaacaaataaacctc

SEQ ID NO: 4214 - DNA, 653 bp, Zea mays
  misc_feature (315)..(328): n is a, c, g, or t
  misc_feature (333)..(337): n is a, c, g, or t
  misc_feature (343)..(357): n is a, c, g, or t
  misc_feature (361)..(405): n is a, c, g, or t
  misc_feature (409)..(416): n is a, c, g, or t
  misc_feature (418)..(456): n is a, c, g, or t
  misc_feature (462)..(463): n is a, c, g, or t
  misc_feature (472)..(477): n is a, c, g, or t
  misc_feature (501)..(504): n is a, c, g, or t
  misc_feature (526)..(528): n is a, c, g, or t
  misc_feature (535)..(541): n is a, c, g, or t
  misc_feature (568)..(572): n is a, c, g, or t
  misc_feature (632)..(634): n is a, c, g, or t
  misc_feature (649)..(649): n is a, c, g, or t
attggaagcatgaattcaggctttttttggatgaggaagctgcttcctggttgaaggtccggggcaggaaaaatccttcatatgcggatattgttaagctccctctcaccggtgccaatgctgttccgattcgcaactctatcaagtctcctggtgatgctcagcgtgtggctcgggctggatcttcggttttcaatcgtttgggccctcctttccttaatcatgctcaggctcatagtatctggcggcctcgtgctgggcctcggcctcgccccagagtttccgtgttcaaccgtttgaactttccggtttcgnnnnnnnnnnnnnnttctnnnnngggaannnnnnnnnnnnnnnggtnnnnnnnnnnnnnnnnnnnnnnnnnnnnnnnnnnnnnnnnnnnnnaaannnnnnnntnnnnnnnnnnnnnnnnnnnnnnnnnnnnnnnnnnnnnnnttgaanngacaaatgnnnnnntcgcgtctgtacagtttttagtannnnttgagagttgcgagcatttttnnncgccggnnnnnnnggagacttgctttttctcaagcgactnnnnntcagatttgtaaatagtgtacttttgttactgtcacatggcgaaacatgtacgctactannngttccagtgatgggnactt

SEQ ID NO: 4215 - DNA, 716 bp, Zea mays
cgtacgtaaaagacaaaacaatgacgtccgtcacacggcgatcgtcgtccatttattatttttttgccagaagattgattaatagttactacttctcgatctggggacagctagctagattaccaaccagtacagtagtacattgagtgagtgtctgttaatgcgtagcgtaggtgaccaccgcggacgggtacatcctgagcttgcagcggatacccggcggccgcggccgcggctccggccaatcggcggccggcagtaagatcccggtgctgctccagcacggcctcctcatggtaaagtatatactccactgtactactccatcaagccatcgctaatctacacactgatttcagccactaaattgtctggcgtggccgcaccgcaggacggcgtgacgtggctgatgagctccccggacgagtccctgggctacatcctggcggacggcggctacgacgtgtggatcgccaacacccggggcaccgtctacagccgcggccacaccacgctgtcctccagcgacccggttcgattttcccgcccgtgtccgtgcccgtgcccgatcgcttcgatttcgattcatgcatgtaacttgcattcttcgctgtcgcgcacgtgttcaggcgtactgggactggtcgtgggacgagctggccagcaacgacctgtcggcggtggtgcagtacgtgtacgcgcagtcgggacagcaa

SEQ ID NO: 4216 - DNA, 200 bp, Zea mays
atctccggcatctcgtctttgccggagcaccttcaacaagatatcttccttcgcgtgggcgatatcaaagccctattcatgttcgccgtgacaagccgcgggtggctccgtcgcttcaccgacccgaccttcctccgcgagctatgtccgagacacggcggcaatagccgccatggcgcgcgcgtcctgggcgtctggct

SEQ ID NO: 4217 - DNA, 404 bp, Zea mays
gagtacgaggtaggcctggtgtgggaggaccagatgccaccgtccgccgccgccgcgcacgggttcgccccggagcttgtggagcccgggatcacctcctcgtcctgatctggactggacggggacgtcggccgggcctgcctacctacgctaaccccagattctgaccgacggccagcccggcaccaagtagaaaggctatccatactagtagtaccacctaatcaataccgtaatctactactactactactaacaaagaagattgttgggatcgaggatgacagctagctagcgtctgctcagtcagcagcatatcgtcgttagccgcgcagtgtgcagctgcgtcagctctgccattgctactgctccttttgggccttttgtgttgtgctctcctagaa

SEQ ID NO: 4218 - DNA, 819 bp, Zea mays
cccagtgatcagaaaaaccctaactaataacaagcatccatgcatgcattttaaattaaaatcgattggtttactgcagtggtttgataagtatccacagttcttttcaagtcctctctacatcgccggcgattcctactctggcatgatcgtgccaaccgttacatctgaaattgctagaggtaaaaattaacttctctgttgccatttctactccactactagtgttaacttacctagacggttacatgtccaggtaaagaagaggggagccaaccgaatctaaatctaaaggtttgaggattattgcgccgttggctgagcatatatatactagctccccgtatgatatgaaggtttcgagatttcagaattttttctggcgtaccatgttcagggctacctcgttggtaatccagtcacagatttcaacttcgatggtccgtccagaatcccatttgctcacgggatgggtctcatatcggacgaaatatacgaggtgaaacaatgcttcagcaattaatgaaatcttcagcatcggaattacagtggcaattggacactagttttcctcgctgtttaatcgcgtcttggtactttcaggcatacgagaagagctgcagtgtgggtgacagtagacgccaaagcattgagtgcataaatagccttggcgccatagacgaggcacatatccaattcttgtttaattgtttccaatgaccgacaactgagaacggttccttaactttttgaagtgcatcaaaggcataagcccgaaccacgttctggagcccctgtgcgctttcgcgagtcccaagc

SEQ ID NO: 4219 - DNA, 721 bp, Zea mays
agacatacagaggtatgtgctgttctatctatcccgtaaattatgataaggagtttgctgagatcaccagatgaacttatctgagcttatgtttctcagggaagcttgacaaaggagcagttcttaaagcactttgtgctggttttagggaaactaccgagccagccgtttgcttgagtgatggttggtgcattgatttctctatttttttttatgttcactgcttacatgatctatcatatacttccaagtgtgatttgtatgttgcatgctcttgatgttcactttatttcggccttagatatacaaacaaacgagtgcctagagaacaatggtggctgttggcaagataaggctgccaacatcactgcatgcaaggtacttcctgtggtgctgttttttttttaccttgaaattttggtttatcaaatatttgttctgattagcttatgcatgtaatgtgttttcggtttatatacaggatacattccgtggaagagtttgcgagtgtccagttgtgaaaggcgtcaaatttgttggcgatggctatactcactgtgaaggtatgctacacaaggcataaggagattcatcttttggcattttcttttattatgtgttaagagagcttctgaattataacatttgtgttttaagcttccggatctggtcggtgtgaaattaacaacggagggtgctggaaagataccaagaatggtcg

SEQ ID NO: 4220 - DNA, 384 bp, Zea mays
ttagtgtaactccgtattcttcaaataattcctttacaagttcctttggcttgaactttgggttatcatgcagcttctccttaatgatagtagtcaaccactgtcgtgttgctcgacgctgaccctctccacttcctccaccacaagtatgttcatctgtcaatctcttgataataaatttcttgttacgagatgattcagacgcatgcaaccgccaggtgcagcctccttctgcaccacattttacagtgacacgagtagtttcattttttatgaaccggtacacaaatcctttcccaatagcatacttgcacaactgagcacggaaatctttcacgttatcaaattcttgaccaactcctttgataatgtcatcccacaaca

SEQ ID NO: 4221 - DNA, 234 bp, Zea mays
gtagtatataatgtaaatgtggatgaactagagagagatttccattcatcattgaacggaccacgacaaggattccaaggcgccgattcccaagatctgcacgcagctggtaggatgagatcatcccattacagttctgccacccatttattttaactcatgggccggggataaaacaatttaaaaaacatgtttggtgaattcatagtatcaacgcaccatggtttatgttga

SEQ ID NO: 4222 - DNA, 860 bp, Zea mays
  misc_feature (61)..(61): n is a, c, g, or t
  misc_feature (175)..(175): n is a, c, g, or t
  misc_feature (201)..(201): n is a, c, g, or t
  misc_feature (715)..(715): n is a, c, g, or t
catgctcgcagtacctcctcgacgccgcctacgatgccagcgtcaacttcttttgactccncagagatgtaggctcatttgctccctcatctccctgcctcggtttgtgagtaatgaaaggtgaatggatgcacatttgcaaacctgtttccttgtcaggtacccgaactgccantacacttcagtgtgggtaagaagcanattttgatctaatatgtcgtactgtaaccactctctatattgtttcacctttgatataaccttttgtgtcatattttattacttggtcactgtgttataatacaaaatgctagagccctggtgaggcaagcaacacacgcctactgttctagttagatgcaaactaccccatttctctgcctcttcaagggttacacatatatcttggttttgctgcattctaaatgtgatttgatggttacttgcttattttataccatttttctttactaattgaggaaacataatcatactaatcattagggttgtagttactagttagtattcccataatgaatattctatgttgttatgactgtttttgttccttactttttcaaagacagcggtgatcagctacacctattcacattgctaactcaattcaaaatagaattatgctgcaagctacacaaggtcttgacatccaaaatgtgaagtgtgtaattgtttgtatagtagagataactttatncattctggtatggtaatgtttgttttggtttcattttatccatatctcttgtcttatttttatacattcttgttgataggatactatggaagcacttgtggctgagactagaatagaagggaaagaatctaagacttatatagaa

SEQ ID NO: 4223 - DNA, 380 bp, Zea mays
  misc_feature (374)..(374): n is a, c, g, or t
cgataaagatccagcaggccaaactgtccccctatcccagtggcgaagcccccaccgaatcgggtcgagaaccaaacccctcctctagacgagtaaactactcgggcaaccgcaccaagatctggttcacaacgtctagaagccaggacccggagcgcctcctcttcctcggcagcacctgcatctgcatgcagagcacaagggcagcatctcgtggtgaggggacagtgggaataattggcggctcggtgttgggagaccatgggaacaagcgccggtgaggggaggaatcttagctcgttagttctgcgagcagtcacatgaatggatggatggcgaaattggtgtgttgttttaggcacatataggcagtnaaacca

SEQ ID NO: 4224 - DNA, 480 bp, Zea mays
  misc_feature (472)..(473): n is a, c, g, or t
gacggcgtcgacatgttcagctgggacaacaagctcgccggagcgcgcgtgctgctgtcacgggtatcattcatacatggcacgcgcatattaaatcacactcaagctagcacagctaggaaccatattgctcggccgctgcgttcgtactcatgtcaaccctctgcatgcatgcacgcacgcacgcagagagctctggtgaacggcgacacgaggctggagccgttcaggcagcaggccgaggacttcttctgcaggatcctgcgcgactccccttcctccacgacgcagtacacgccgggcggcctgatgcacaagtcggggtacgccaacctgcagtacgtcacctcggccagcttcctgctcaccacctacgccaagtacatggccgccaccaagcacaccttctcctgccagggcctccccgtcaccgccacctccctcagggctctcgccaagcagcaggtggacnncatcttg

SEQ ID NO: 4225 - DNA, 665 bp, Zea mays
  misc_feature (658)..(660): n is a, c, g, or t
tacaggcagttgttaaatttctgtacaattcaccttctcgtttccatttgcagtttgattggttcaagttctaattcagagacttttaacaacgggtgtttatcgcattcttcagacttctcagtgaaagatgttgaggtatttaaaacattgaagcagtgtgttctgcatctttcttcctggtaaaaataattacatccagatgatcaagaagctttcaagattaacctatcaatggaaataattctgcaaggacataaagagcctatttatggacgtccacatgttatgtaagtttgggggtaagacactttttaacatgtctcttttttctcgttcaatgcagctttggggcttcgtctacccttccaaatacgaggagatgctgacactctgccggactgagaaaccaggaatctgtcgatggtgagtggtgaccaatcccatagccagttgaacagacaaatggacatgtcgcgtctgtacagtttttagtaggctttgacagttgcgagcatttttgtgcgccggtagtactggagacttgctttttctcaagcgacttcgctcagatttgtaaatagtgtacttttgttactgtcacatggcgaaacatgtacgctactagttgttccagtgatgggcactttgaggtaannngtcac

SEQ ID NO: 4226 - DNA, 503 bp, Zea mays
gaataattctatagttgattactttgtaacggaatcaacttttgaaccaattaggaaaggtatactgtgttagctaacaggaaactaagctgatatttaagaaagttgtaacatggttatctcagaggcgctggctacaaaatgtagtcaaacgattaggttgtgaattgtgatgtgcaggtgacaaaatatagatcgttcaccttattttgtgcatcactttcataaatgaataataatgtagaaattttcagaaaaaatgtataagagaaaggttaccatctcatcatcaagatctccaatattcaaacgcaagaaaacttacctgtactgataaatctgagatgaagcaaacggtatcactaagaaatgcttttctcctgaatagacaaatgcaaggtcatgggctaaaccagtgctaacgctaatcagttttaccaatatatgatttcataatttctacaataccatgatggaagaatcacactccgtaaccgggaatc

SEQ ID NO: 4227 - DNA, 387 bp, Zea mays
gccattccttgcggccatctctgtgtcaccaggtgcgagcgcattcaaacggaggggcacatggggaagcttcgagctcaaggaaagcggaggaaatgagatggatggagaatatgcaaggcactggatgagcgcggacgtgaagagtagggtgagctccagcgtgggaaggagcgggtccgatgatctcttccggccatatgagatctctggttgggcaggttacgcatctctggtggcagcaattctgaaattgcacgagactgtgcgaatggattggccaaactcttgggcggctgtagttcccagctcttctgtgatgttgcgcgactgcggtacaatgttgaaaatcaggctttgctcacacgaagaaggcaacaaggatag

SEQ ID NO: 4228 - DNA, 396 bp, Zea mays
ttcttgatgacatggcttcggatgtgaatgagctggcaatggcaggaggagcatttttcagcaacgacgacgcatcgtttacggcgcctcaggatctcgccgcggcgctagatggtggccagctagcaccaggagcattggacgccatcagtgcatcgctcatggagacggacgggaaccctggtctcgagctagaggcaatgttttctcctgatcagtacgagaacaccttgtttccgctggaagctctgctgggtctggatgatgctcccgtgtacgaggacggccaagactaccggcagggtggcgggagtgccgacgacgaggctgcagggacatcgctgatcggcggcgctgatgacagtcttgacgtcctggatgattatttgttcatgg

SEQ ID NO: 4229 - DNA, 570 bp, Zea mays
agagcaggttttctttttgcccttgcggtctgctgaggcttattttgatttttcacattctgatttctcagtccttttcattatctgcattgagttcaacatatactctctcttcatctcctcttgcatatatcttgtttctttggttcagttttgcacatgacttctttccttttagttgtcttcaaaacatgtcacttaagatgatgacactcaaattcttttcccgtctgtatcagtatgagttgagaaaaaaagaggaaagagaagctgctgaagctttaaaacgtgaggaggagcttcgtgaagccaaaagacaacaacagaggctaaactttctgctgtcacaaacggagctttatagtcatttcatgcagaacaaggctggtggctcagcgccacctgatgaggaagatgtccctgatgaagatgaggaagaagatcctgaagaagctcaattgaaaagagaggccttgagggcagctcagcatgccgtttctcaacaaaagatgaggactaatgcatttgatagtgaaactgtgaggcttcgtcaaacttctgattctgctc

SEQ ID NO: 4230 - DNA, 932 bp, Zea mays
  misc_feature (842)..(842): n is a, c, g, or t
  misc_feature (880)..(885): n is a, c, g, or t
cctgttggaaaatctgtcttcagcggagaaaaggaaatttctcgtcaacactgtatttacagatagtattgatataattcttttaccctgtgcggaaaatattctactacgtctcaaatgatgatgatacacatgctaatgatgtgtttgcaactattttgggaattgtaagtgacaatgaacaaaacactgacagcattttctgtcattcatgtaactccatgttctgattaccagatacagattgtacaaaacattttatagacagtttcatgtcacctgcatgatggtagatattagtgagttcatgtttcacacgatttttctcgtcttcggtagaagagtgattacagctaattcattatatgtgaattgttttttaagtagattatatgagcatctgtcggctcttctttgaataactaacatgtgtagaaagaagaaaacatggccttgatcttctgttattgacctggacggccacctgagtgcacatagtataactttcattcttgttcactgtgaataaaatcacacttgtccatattgaaatccatcagattattgcagtcatttagctgctatttgctagtgcaacaaacttactaaatattgcattctctacttgcagctccttagccttgaagattcaagagaagctgtttatggcacccttgatgcctgggttgcctttgagcaggattttcctttggcttcactaaagcaagcactttcagttcttgagaaggaggaacagtggcatagaattgtccaggtattgtatagtgtaacctgctttcattcttgtttgtttatcttatctgtctacagcacacttagantgtgaagtaaaatgtctgtgactacatactcaggtgannnnnnggatgctgagcaaagggcaaggaaatacaatgagaacatatgagcta

SEQ ID NO: 4231 - DNA, 388 bp, Zea mays
ctgatagcactaaactaagctgtaaaccgaagatagaattggatagatacggatatggcaaagggtgctgcagtttcttgcccagtgcgatagactcgacggttttggcgctcggtgcggtatgtgattttggagttgggcgttgtgaggaggctcaaatagctgtctccaggcattgtacctcagttcttgaggcggggcacgccacagaagagctgacactgacaggctctgggtgtgatccacccaaaacggagaagaagctgggcagttctgaagctgtggagggacatcacgactccaggttgattgaaccgaggcttgttgaatcagatgcaaacctcgagtttgtaactgggattcttggctcactgactgataaacagga

SEQ ID NO: 4232 - DNA, 389 bp, Zea mays
gtcaagaactattatcacagagactttctcatcgatgaggataaccgttggttgctgcttgggtggaagggacgggtgctctatgccatgtcgacatgggttgctgaggataataagcccatcttttagtgtgcctgaatccaactgtagattatatttgatattttgatcgaagggttatgttgaaccatgatccaccacatgttgtggttcagtggacttatgtttctagagagtttattgctgaaacctgtgaggtagaagcaattagatgcttagagctacataggctgtagatatagttcttgatatattcctgcagagttgtaatcatgtatcatgtacactagaattaaaaccctgcagctgacaagtggttacacgtttga

SEQ ID NO: 4233 - DNA, 327 bp, Zea mays
gacggctgcggcctcggctacggagacgacgcggactacagcgccatgtacaactacctgcaccagcccgcgtgcctggaccaccaccaccatgccggcagcattggctccacggcgagcaacggggtggtgtccaatggcggcggcggcggcggcggcagatgggacgacgactccgaggacgaggacgacgatggcagcatgttccaaggcatcgaccagctgttcaacgagcacgaagacgacgagctgcacgtcgctggtgtcgacatcaccatcaagggcaagaggatgcaggacggacgcatcttcctccggctgcgtatc

SEQ ID NO: 4234 - DNA, 376 bp, Zea mays
tgtgacggaggcttccagcttctctctgaagctgatgtggacgcgctggagcagcctgatcgtggagctgcaggcaggatacgcgtatcaggagaatcggagctgctccaagattggccgacgattttgtggttgctgtttgattcaggtcaccagcagcaggtgggccccaggaccaccttccaccgtcttcgaatcgccgacgccctgggaatgccgtttctttcttcacctgttctgatgacaccggcgatataaacattcggaccaaagttcgtcaagacttccttttgccatctcaagtaaccaaacgtgcttcaccgaggcgcctgtctcccacacaaccgacgagtacaaaaaaaaagttgatgaatac

SEQ ID NO: 4235 - DNA, 452 bp, Zea mays
agctatcggggttccacctgtagggggtggccccgaacaactaaccatagccgtcgtgttgaaggaccagagctctcaaatagaggacttgaaccagctgaaactagcatgcaacatggctctgaagaaactgaaccctctcttcaaggtgcgtgcattgttcctgtaaaaactgtctacgttttgatttggcagacctcagagatcccaaagaactccattgctccccacatgtatgcaggtttcctccgtcgtcatcgtcccgtccctccctaggaccgcctctaacaaggtcatgaggagagtccttcgcaaggagttcagccaggccgcccaggcaaagcattcaaaaatataggtagttattagaaataattagtgttttctgctgcaaatgcacctgcagaaagagttaaacaacaaactgtgcatatcgggaagtcctgttgttt

SEQ ID NO: 4236 - DNA, 428 bp, Zea mays
tactatgtgaagagcctggttggtgggcagctggtgctacggcttccctcaggggtggtgtaagagaagtgcaagctgcagcagaatacaaaactttagtgcttcaccggttcatatgtacttttagtagtgcccaacctgggagccttttttagttgatgttacgagttatgactatatgtatggcaaaattgctgcaagggtcctcttaaaagatactaggttgacactgagactgtttatagctgcgcttttctggatacccaatctttgggtacttggcttctgccgtatgactgtcgtggtcttaggatcaggtgggtaatggtctctttggattaggtaattctagaatgctttcataaatcgatatttatctatgcagaactggccacgtgaaaatcgtgggactaaggtcatcaggtcgt

SEQ ID NO: 4237 - DNA, 523 bp, Zea mays
acgccgtcctcacgctcaccaagtccaacttcaggccatacggcaaggacctcaacggcggcgtccccaccggacgcttctccaacggcaggattccgacggacttcgtaggttcgtgtcccgcgccgctagctgcgatgctgactcgagcacgagcctaattaacgaacagtcgctgtatggatgcctgtgcagcttcacggctcggcttgaaagatctggttccggcgtatctcggcaccgacctcagcgacgacgacctctgcacgggcgtcagcttcgcgtctgggggcaccggctacgacccgctcacctccactctcgtggtaaacaacaaacgaacgacccccgttgaaatgcctttcttcaggcagttctgccgatgcaggaggagctcaacatgttcgcggagtacaaggagaggctcgcaggggtcgtcggagacgaggccgccgccgcaggcatcgtggccgaaagcctgttccttgtctgcgccgggtcggacgacatcgtcaacaactac

SEQ ID NO: 4238 - DNA, 354 bp, Zea mays
gttggcgcagaggatgacggtcatgacgcacaggatggctacgacgatgttgaggaggaagtagtttaggacgaggaagaaggggctcgcaaggacgacggggacaacggagtggtagtactcattgatgaagaccacctcgtcgttcatgacctggaacattgcttcggccgagcagctggtttcgccattgttgtagaggcccttcaggagtaggtccctggagtcgtccacttcttgtttgctcaacgccggcaggtgctcaaaccttcggcgcagtagcttgaagagagcgaacgagaggcagatcctcttcaggcgctggatctgattttgggaatgggaggtgaagaa

SEQ ID NO: 4239 - DNA, 373 bp, Zea mays
gatcgcctttcaactcctctaccatcccattttcgtgccctcgccgctcgggacccacgctgatgcggcggcgacacaccgcgttgaggaggagctatgttgccctccactctcctccaacgtaccgccccgccaccgaagttagaagagacatcggagccatcgtccctgctccacgcaatgttcgggatggtctcctacaggcgcacgctgctgctcgggctccccctgctccgcctctgactgtgcgcccctgtgcgcgccttcctcttcctcgacgcgccgacgacctctcattgagcctctctctccgcctctccgtcgatgcatcccgcttcccccactaaagatagtggagatgttcaagtggacc

SEQ ID NO: 4240 - DNA, 453 bp, Zea mays
  misc_feature (420)..(422): n is a, c, g, or t
  misc_feature (424)..(424): n is a, c, g, or t
  misc_feature (436)..(437): n is a, c, g, or t
  misc_feature (445)..(448): n is a, c, g, or t
cgttacgacgtgcaatacctgcaagcccgcaacgatcagtagggacgacaccgaagctgctgatgccaggtccttgaagaacctcaacagcaccgcgccgctgtcaaactcccggacaaggcgcaatgggccacacattctctcctggctcttaccgaagtcaaagaggaagccaaaaccagatgtgtccccaaacaccgtcgaatgcgagaacatgtcgcagcttctgaaggactggggtgtgttctcactggattccctgaggaaagaggtcgttgaggccaatgagcacagggacgccgcgctccaagaggtatcagagatgaaactatcactaggagagctgactgccaagctagtgagcctggaagcatactgttcggaattgaagaaggctcactagcttggcagtcagctctnnnantgatagtttcanntctgatannnnttgga

SEQ ID NO: 4241 - DNA, 383 bp, Zea mays
aacctcactgaagcacagatctcaaattctcaactcgtacaacgattcaaaccattgaaattctaatgcttactctatcggtctgccttgggctcgtaagagaagagatcgggatcacagaagggagggggagtctaggaagcacatggagaggtacggacctgcgccttatcaatgagcctaagcgcaaacatggagacggggagcggtgcctcatagacaaaggagtggttgatgcactcgttgtagaggaagcgcgataggacacattcgtcggcggtgaggccaacgagcactacccaacttgctcagtggtgcgaagcaccttccgctagtaggagagctcggaggtgggcttgctgacggtggtgagaaccacggtg

SEQ ID NO: 4242 - DNA, 443 bp, Zea mays
cgtcggggatgaggtggttgctcgagtccaggcactcaacatcaggacgacggcggcggcgacgaacagctgcacggcaagacgatatgtgtatgcacctgcaagccttgctcccaccttttcattagtgaagatctcaacctaacttaattatcgattgcgctgcgcagcgtcaagttcgcaaccaaatgcttcatggacgaagaggagggctctgttgcgattgaaggcgaagcaatggctgtcctgcctacactggagctcagctctcagtcgactagaaactaggagtggcctcaaaccgggtcactagtcacaagttgctgttgcttaatcatacccgacctggtaatccctctcttctgcaacactgtgtagaatgcgtgtaaactaaacttagtgtagccttcacattataagcgaggagtgaaataaagctgttg

SEQ ID NO: 4243 - DNA, 359 bp, Zea mays
cgcaagccgccgtatggccacgaccgtctgacgggttcatggaatacgaggttccgcggaccgcatcaccgcacgcaggtagtacaagtcgggtcaaaatgtgctgctgaatgcgcatgccctgctgcctcggctccggctcggctccgcgtcgttggttcaacgaaccaaaccgagcagccgcccagcttgtatattacccgcgctccccgttcttcggcagcccttcccttctttattcctggactagtagtagctaatctatctgctggtctcccttcagctgccgacgatcggagggatcatcagctggctgtccgaaatcccgaacgagcttgtgcgggcggtagctctgagag

SEQ ID NO: 4244 - DNA, 670 bp, Zea mays
caacaaactcaccgaggaaaaccattctccgacatggtgaggacgagaaggaggttggtgctgctgctgctgctgctcctcgccctcacggtgctttccccgctcgcgctctacactagccgcctctccgtggcgcttaactctatacgtaagcggtccctcccctccgtgatttgttcgagatttgagtcctacttgggcgttttcttgttggcattattagggctcttaacgactttactgccccattttttttgtagaagcgcgggttttccctggagaaatcacgaatcaggtgagtggttttttgggttgttctcctcggtggattgcgatccttggggatttttctctggatcttgatggttttgtttattggttatataaatgtcgtggtagggccgtggcgtcaaggcagataagctgaatgcgcttcctctggtaaattgcgcccccacctttttggggttgtttttttttgtcagagtggcaattcattacggatttatgtttcctttggatgcaggaaacagtgagctccttgaaagaacctgtcgacattgtcttctcagaggagctgactgaatctaagagccaaggtacattgatcaccatttcaccatctttgtttggaagcatctcgttctagtgtttgtatagttggtgcaaa

SEQ ID NO: 4245 - DNA, 345 bp, Zea mays
tctgcggctctgcccccgtttcggctgcgaccccttcgcccgaaatacgaatggtacggtaccagtgccacgtccgtctccaaccttctctttgccgcaacgcaaccatcttcgtgcatgcctacacggccaaaccctagcttccacctggtatctaaatttcttcactgctgtttttttttgaacgattcgttacctaatagcttgttacgcgctactgctgtatgattccacccagccgaggatctggtttgcggtgatttatgctcaatgagtgggattcacttgtatgtttacaatgcgagtagattttctgaggctgtttacatcctttattttttttct

SEQ ID NO: 4246 - DNA, 408 bp, Zea mays
ctctgaagacccctccgacctcgccatcgtcctggtcctcgccgacacgctcatcgacggcaacgagctcgaccacccatcgaaatccagggaggaggtccagcttccacgcgcggtgtacttcgcacccgacaacgacaggtacatggtccacgtaggcacctcctctaggaccggcgactgcctacgctggatggagccattattttccaacccgcgcgagaaggtccatgacgggctcgttggcgagatagagtggtcccgcgtagtccgcttcctccactcctccttgccatcaccacaccaggcggaggtggtggagtcatccgagtcggagtctctgcgtcctcccggcgtcgtcgacaaccacgtcgagcccaacctctacagtttcaatcccgctgatct

SEQ ID NO: 4247 - DNA, 610 bp, Zea mays
ccgccggagagacaaccttcagcaggttgccgacaaactcctatctcccaggtcagtctcacatacacatgcgaacacaggaaactcggagacagaacacaggtgttttggtggcaccctattgactgccttttcttagcctctaaggccatatatttatagaccgttacatggaaacaaactaaccattacaaggaaataaaccggactgttatcagtcctgatcctgccgaccagacctgtccatataggactgaactactaccatattagctatttcctaaaacaaaaaataagtaaactagcaccaatcaaggattactttcctatcatacctaaacctagttagctagtgccaaaatttcagatcaatctaaccggtgtgggttgcgcggcactgcggtgccacgacactgccggccttaactccggcactgacggacatttattgaccgttggaatctgaattttcttgatttgtttaattccttggtctccaacagttacctgctgcgtatcctgacatagggatacaacagacaggttaaagtacccctttgtcccatttgagtctccctctccctcacttgctccaccttggctcaaattt

SEQ ID NO: 4248 - DNA, 807 bp, Zea mays
caggcttctgattggaggtattaattttccatgcttatttaagaaaaatgttgtttatatgtattctcatccacggtgacaataattcctgctagtttgtactttttaaacactattttcttgtccaaacattttttcagactatttaatgtaagcacaagcacatttttcattaagaggaacagaaaaaagcttaaaaattttacaagcctgcttactgatggtggattccgcaaatgtttctttagtgtgtaatgcataattaactgttagttttgtgtttggttctgttagttaattgttcattgggaataagtgtttttcattaatgtaacagacccaaattttagctggactgttggatttaaagaatttgctcacccagccacggagaccttctctaccattgctcaagcagggccaactttttttcttgccattgctatgttcggatttgttttccaaatcagtgcattggtggcagagaaagaactaaagcttcgtcaggttcagacttcaatcaccacagtctgcctgcatatctttatgcttaaagtgagcccgaattttgatatatttgcaggctatgtctaccatggggctctatgaatcggcttactggttatcgtggtttacctgggaggcctttcttacaacactttctgcactttttactgtgctctttgggatgatgttccagttcgatttcttccttcataataattttggaatcctattcctcctgttcttcctattccaactgaacatggtaagttccaaatattaattgatttatttgttttgatt

SEQ ID NO: 4249 - DNA, 732 bp, Zea mays
gctaaaggtgcacttttctatgcttgtttgctctatacttactgtgttatcacacacttgttcttttctgtctttgttgttccaggacatgattgatttttgcaaagacaccggtcttcagtctagtgctgctgtaacaagaaatgctactataaaattaattgggatgctacataagtttgtgggcccaggtcatcttcatgtcttcttattttaacatgttatgatagtcgccggatcatgttcttgaaataaaccatcctgcagatattaaaggctttttaagtgatgttaaaccagcacttctaagtgccctcgatactgaatatgagaaaaatccttttgaggtatgccatgttagtcactgtttggaaaatacttattgtgtaactttgattttcaccgacatcggtttggttcaattattagggtgctgctgctgctgctccgaagagaacagttcgagttctggataccacatcttctgtatctgctggcttgtctgatgggttgccacgggaagacattagtgctaagataacacctactttactaaaaaatctgggcagtccggactggaaggtagcggcctcttttaaattatttgatttactttgcaagtgtcttgtattttatttgtgatatttgctattatgcttatatgtgaattgataggtacgattggagtccatagatgcagtcaccaaaattgtggaggaggctaataaacgt

SEQ ID NO: 4250 - DNA, 1086 bp, Zea mays
  misc_feature (971)..(977): n is a, c, g, or t
  misc_feature (1019)..(1022): n is a, c, g, or t
  misc_feature (1042)..(1042): n is a, c, g, or t
  misc_feature (1044)..(1048): n is a, c, g, or t
  misc_feature (1053)..(1053): n is a, c, g, or t
  misc_feature (1081)..(1081): n is a, c, g, or t
tttgcggcttcaccaaagcgtcctgcaagaacacacgcttattccgcaatgccatgataggtcatcactcccaatccttagctgcaccaagtagtgcatttcacatgagcacatgaacatgctgctggcttatcctttccatcgtacagtccaaccggtatgttaagggctaataacacagtacaccttttttttcttaaaagtttgtctcttgtggatccacatggttatgtcaacgaaggcaaggcagagagcactcatgtgtgcagttagagatggaatgctcatagttttctaccactcagatagcttctaaattcaaggtgaattaaaataggtgagctacctgtgtagttactagacgtagcaccgatttcttgtttgattcttgaagctcaccagcaatcaaaatttcgtccaatataaagtacgcctgcagatccaaaaagaaagaagtcgaaacgtttcggtattgttatcttcacatattatacccaagtgcatttgcaaagttatgtactataaaaactgtattttaaaactgatagagtagcagatattgtcggaagaaacattttcgcaccttatgaaaattgaatatcagatcaagctcacagacctgcatgcagtatgacaaagtcagagagccatcaggaaaatgggccttagaactggggagtttatgcaaaggaatctggaggtctcacattgccaaagtagcggtccaatatctcaacatagtgatggatgatctgaagggtttccagttcattgtcagcggggtcaatgcacatgcagaagtaaaggctagcatacctgcaggatggtgcattatgtgtaggaacagattatatctgccatcggtgtgtataatataatcggtgttacgttccagctgattagtaatttgcaagcgcttcgccttttactggttactagtaacaatcaggaatggaaatttttcattcatnnnnnnntacaactcacctcttgtacacaactctgtaaccttgccagtnnnnaaaattgcacagcttggggncnnnnntcagnacgagcgtactaatctctttgatgatcnttgtg

SEQ ID NO: 4251 - DNA, 273 bp, Zea mays
gctcctctgcttcagtagaagccggtaaactagcttgtttaggaacaggatatgcatacatagatctcaaagagatcgaaagataagagaccccagctgtttattatattccatgcaaaaaataactcaagtgactaaagccagaacgctgacgtgaagctacctaagttggtgcagcgacagtgataaaaaggctaaagacttttctagttaaccagctatactattattgtacagtaacatagatgccaatgtgtgcccttagcactagta

SEQ ID NO: 4252 - DNA, 563 bp, Zea mays
  misc_feature (401)..(402): n is a, c, g, or t
  misc_feature (409)..(413): n is a, c, g, or t
  misc_feature (425)..(427): n is a, c, g, or t
  misc_feature (440)..(440): n is a, c, g, or t
  misc_feature (450)..(452): n is a, c, g, or t
  misc_feature (463)..(470): n is a, c, g, or t
  misc_feature (481)..(483): n is a, c, g, or t
  misc_feature (530)..(532): n is a, c, g, or t
  misc_feature (555)..(555): n is a, c, g, or t
gaagagaggtccacaacaaagacgaagagaggcagtagaacggaggtagttcagagtttcagagatttgttcatttgttcgataatcccctttcacaagacacagactcttatttataccatcacgccaccctgacaagctagaccctatatcacagccacacacaacaccaggtcccacagccagcgacacacttacaccactctggccctctggtacaaacgttggcacgacgctcgcgatgaggctgcttcccattctcctgtgtatggtccgacagcataagatgtgtgacattgtgccttgtccggcaacataggatgtgtgacattcccctctccttaagcttcggcttgcccccaagccgatgtagaacctttgaagcaccaggattcaatgcnnatgaaannnnngatcaacctatnnntatcaatggcaanaatagtatcnnncctaaagcagnnnnnnnngtgcttgtgannntttgcagattgaagtactaagctgcatgcggcatccaaacatggttnnnttgcttggagcctgcccagagtntgggtgcc

SEQ ID NO: 4253 - DNA, 291 bp, Zea mays
  misc_feature (216)..(225): n is a, c, g, or t
  misc_feature (227)..(288): n is a, c, g, or t
gtctcgtacctcgtccactgtataatcagggaagtaaatgtgattcggctcgacagagccagtcatggagtagtacgcgtcaggtgtagcactgctcacgtagacgagcacgacctgcggcaatcggaggagatcgtagaggcggaggaggagcgccagaagctggccacccttgtcccagctcctaacaacctccaaattatcgaacaccagaannnnnnnnnngnnnnnnnnnnnnnnnnnnnnnnnnnnnnnnnnnnnnnnnnnnnnnnnnnnnnnnnnnnnnnncat

SEQ ID NO: 4254 - DNA, 1402 bp, Zea mays
  misc_feature (403)..(404): n is a, c, g, or t
  misc_feature (688)..(688): n is a, c, g, or t
  misc_feature (717)..(717): n is a, c, g, or t
  misc_feature (721)..(721): n is a, c, g, or t
  misc_feature (730)..(733): n is a, c, g, or t
  misc_feature (744)..(799): n is a, c, g, or t
  misc_feature (807)..(850): n is a, c, g, or t
  misc_feature (853)..(853): n is a, c, g, or t
  misc_feature (856)..(858): n is a, c, g, or t
  misc_feature (861)..(867): n is a, c, g, or t
  misc_feature (870)..(875): n is a, c, g, or t
  misc_feature (881)..(909): n is a, c, g, or t
  misc_feature (914)..(922): n is a, c, g, or t
  misc_feature (925)..(931): n is a, c, g, or t
  misc_feature (934)..(944): n is a, c, g, or t
  misc_feature (946)..(951): n is a, c, g, or t
  misc_feature (954)..(957): n is a, c, g, or t
  misc_feature (959)..(962): n is a, c, g, or t
  misc_feature (964)..(964): n is a, c, g, or t
  misc_feature (966)..(966): n is a, c, g, or t
  misc_feature (969)..(981): n is a, c, g, or t
  misc_feature (983)..(985): n is a, c, g, or t
  misc_feature (988)..(999): n is a, c, g, or t
  misc_feature (1003)..(1004): n is a, c, g, or t
  misc_feature (1007)..(1008): n is a, c, g, or t
  misc_feature (1011)..(1034): n is a, c, g, or t
  misc_feature (1036)..(1047): n is a, c, g, or t
  misc_feature (1049)..(1050): n is a, c, g, or t
  misc_feature (1052)..(1056): n is a, c, g, or t
  misc_feature (1059)..(1068): n is a, c, g, or t
  misc_feature (1072)..(1074): n is a, c, g, or t
  misc_feature (1076)..(1076): n is a, c, g, or t
  misc_feature (1080)..(1084): n is a, c, g, or t
  misc_feature (1086)..(1089): n is a, c, g, or t
  misc_feature (1093)..(1093): n is a, c, g, or t
  misc_feature (1095)..(1104): n is a, c, g, or t
  misc_feature (1106)..(1114): n is a, c, g, or t
  misc_feature (1116)..(1131): n is a, c, g, or t
  misc_feature (1133)..(1134): n is a, c, g, or t
  misc_feature (1141)..(1141): n is a, c, g, or t
  misc_feature (1145)..(1145): n is a, c, g, or t
  misc_feature (1151)..(1157): n is a, c, g, or t
  misc_feature (1159)..(1162): n is a, c, g, or t
  misc_feature (1171)..(1171): n is a, c, g, or t
  misc_feature (1173)..(1173): n is a, c, g, or t
  misc_feature (1177)..(1180): n is a, c, g, or t
  misc_feature (1183)..(1185): n is a, c, g, or t
  misc_feature (1192)..(1192): n is a, c, g, or t
  misc_feature (1194)..(1208): n is a, c, g, or t
  misc_feature (1212)..(1213): n is a, c, g, or t
  misc_feature (1215)..(1216): n is a, c, g, or t
  misc_feature (1218)..(1231): n is a, c, g, or t
  misc_feature (1233)..(1236): n is a, c, g, or t
  misc_feature (1239)..(1247): n is a, c, g, or t
  misc_feature (1250)..(1262): n is a, c, g, or t
  misc_feature (1268)..(1273): n is a, c, g, or t
  misc_feature (1276)..(1281): n is a, c, g, or t
  misc_feature (1287)..(1288): n is a, c, g, or t
  misc_feature (1290)..(1290): n is a, c, g, or t
  misc_feature (1294)..(1329): n is a, c, g, or t
  misc_feature (1334)..(1341): n is a, c, g, or t
  misc_feature (1343)..(1364): n is a, c, g, or t
  misc_feature (1371)..(1376): n is a, c, g, or t
  misc_feature (1378)..(1382): n is a, c, g, or t
  misc_feature (1384)..(1399): n is a, c, g, or t
tgtagaaactagaaagctaagatgaaaacacagctatatacttgtatgttaaacttgttttctagtaaagggctaatccactagttgacaccgcattggcattgtagtacctaagcattttgtatatagtttatacggtgcactggatagcagtgcaagcactgaatcaaaaagaagacagaacatgtgtattacttgttttcattttccaaatgcaagcaaatctgaagctctatgcttactaacatagaataagttcggcctgagctacttttgcacataagatttaaggaaaggactgctgtagcacagtaattaaccttgaactttatattgtttagagtgtgtggtagcttttgcctttctaaaattaatagatcgcaaaccacaaaaacaatctcanncaagagaactaaaatgcccttaaacattctcctgctattagtacaattgaactaaatgaggggcaaatatggaattaatatggtttagtcccttttaaccacatcttgagggactagggactaaagcagtttagtccctattttagtcctaccgtttggtaatttaggaactaaatgagactaaaatggagggactaatctttagtccctcaaaccaaacggggccttaaggaaaggactgctgtagcacagtaattaaccttgaactttatattgtttagatngggtggtagcttttgcctttctaaattantagntcgcaaacnnnnaaaacaatctnnnnnnnnnnnnnnnnnnnnnnnnnnnnnnnnnnnnnnnnnnnnnnnnnnnnnnnncggcacannnnnnnnnnnnnnnnnnnnnnnnnnnnnnnnnnnnnnnnnnnncancannncannnnnnnaannnnnncccccnnnnnnnnnnnnnnnnnnnnnnnnnnnnncaacnnnnnnnnnaannnnnnnacnnnnnnnnnnncnnnnnnccnnnnannnncnanagnnnnnnnnnnnnngnnnccnnnnnnnnnnnnactnnctnntcnnnnnnnnnnnnnnnnnnnnnnnnannnnnnnnnnnncnntnnnnnatnnnnnnnnnncccnnnantctnnnnncnnnntctnannnnnnnnnntnnnnnnnnncnnnnnnnnnnnnnnnncnncaccctntacncctccnnnnnnncnnnncctcctccntncctnnnntcnnnccccccncnnnnnnnnnnnnnnncccnncnntnnnnnnnnnnnnnncnnnntcnnnnnnnnnccnnnnnnnnnnnnnctttcnnnnnnacnnnnnngatccnncncccnnnnnnnnnnnnnnnnnnnnnnnnnnnnnnnnnnnntcttnnnnnnnnannnnnnnnnnnnnnnnnnnnnnttctctnnnnnncnnnnncnnnnnnnnnnnnnnnntta

SEQ ID NO: 4255 - DNA, 333 bp, Zea mays
catgcgggactacaagaaggtgcgcgcgtacgagctcagcggtactggggccggcgccggcggcagagcgcccagctactgggcgatgggcagggaggagaggaaggagaggggcctcccgaccaacctcctccgcgagatatacgacgccatgggcgaggtcatcaagaggaggatgaccatgggctgctgcggcagtggcggaggcggactcacggcggcgtcctcttccagcctactcgacgttcccatgcaagcttccccgctcgctcaagtcctgccacgacctctgcctcccggtacttattggtcgtctcgtcactgtctgcattc

SEQ ID NO: 4256 - DNA, 375 bp, Zea mays
  misc_feature (209)..(209): n is a, c, g, or t
  misc_feature (273)..(273): n is a, c, g, or t
  misc_feature (281)..(281): n is a, c, g, or t
  misc_feature (326)..(330): n is a, c, g, or t
ctgctggttccttgggagccctctctgcagcgtcccttgtaaagcctacctctttgtctgaagttttagatgccagcaaggaaaggcttttttcatcacttgtgcctgatggcagcatgaaagcactttctaaatacacagagatggtagataatattatccggacccaggctgagaaattgcagcaagctagtgagatcactagagtnaggttgaaggaaatggacttaccagattctattctttcattggaaggaaatataaccttgcccntggatctnaaggaagacgtagaggctgtgcagataagcggtggccctgctggnnnnnaatctgagttgcagcaacttagggatttgagcagggtcaatcagg

SEQ ID NO: 4257 - DNA, 366 bp, Zea mays
cgtcgtctagccgactagcggcgggagctatagcttcgacgagccgacgacaaacaccaacaaggaggggaaaggagggaagagaagctagggcctagggagggaggagagctgctgggagacgacgacgagaagactggcaccgtaacgctagccgtccgtgacctgcgcctgatgcttgttagtttgtgtcgaattgtaaccggaatcgttccagctaatcaaagtttatataaattagagaagcaatccggttagtaatcattccgactcaccaatccggcacaaacgaagaaggcatgaaagatcgcaaggctaacaacgacgactgctgatggtatttttctattatggcagagagaagac

SEQ ID NO: 4258 - DNA, 342 bp, Zea mays
  misc_feature (324)..(328): n is a, c, g, or t
ggcgatgacaggggcggtgatgagtggcagtatgccggcccctgccatgttgtcggggcagtcggatgccccgaaggagatggtggtgctcctccatcgttgatgtggggcagccttcgggacccctggagttgccgaaaggacctctcggcgcagggacttgacgttcctgcgggaggtgagttcccagctcccgccgtacatgacgtacaacttcttgcggcggtcgctgtcatccccggagtcggaatctccagtgaagacgtccttgaggtccccctcgggtgattgatacccgagttctcgttctcccgcggccacttnnnnntcgtcgaccctctc

SEQ ID NO: 4259 - DNA, 435 bp, Zea mays
agcagatcatctaggttcgacttcgacatggcgaagcccgaacctcctcctcctcgtgcaacccctacacaaccaaaacaaccccataacaaaagatccttccacacctccgaaaacctagataaaacaggaaccgtcggtccgtcctggatctgtgggaggaaccacagctcgcagcagctccgaggaggatggataggacacgcacctggagaagaggctacagaggtgccggtcggcgcaggtaacgatgacggctcaatgcggggtatactggcgaaggcggcgcggttgatcgacgggacggagaagccgccggaagagaagaggagatggtagcgccggccctagccgcgtcgaagtgggagaagacgacgattatgagatcggggtgggccgtgagggcattgttggcctgacctgctatatacatgt

SEQ ID NO: 4260 - DNA, 778 bp, Zea mays
ggtctgcccaccaggaggttagcatcttcagcttcatccatgttacttacctttttccacatttggtacataggcagaattcctaggaatgaaatgccatgccctttttcaccacgcttgatctttgatgtcactctccttggtacagaatgattagcggtgccaatagctaatagttgcttggacaaatcactgtatccataccctcctataagaccgatgccatgccaacattagcaagtcatgaactgacctggcatgagttttgtgggaattttcttgcagatgcagctcatcgcgactgtccggaatccattcattgtggagtacaaagattcatgggtggaaaaggtagggaaagggcccaaataaagtgtcttaaatggtcccgcgttaaataattgggtgaaagcctttccttgtcatgcatctcactcgcttaaaaaatttcagggctgctacgtttgcattgttattggctactgtgagggaggagacatgtatgtatctgttggaggttaaatagttcgttcacaaacatttacttcctagctaatgcaacctgtactggttcagggctgaggttatcaaaagagccaatggaaatcatttctctgaggaggtgcagttattgactttgtttccgttcttgtgttcagttgctgtgttacaaccgaaggattcactcttcagtgtttttttttcatttctagaaactttgcaagtggctcgtgcaacttctcatggctcttgattatctacatgcaaatcacattct

SEQ ID NO: 4261 - DNA, 569 bp, Zea mays
agaaagcgaagtgtagagctgcacttgaggcagcagaagctgcgcagaaaattgcagagctcgaggcgcagaagagattgagagcagagtggaaggcaaagagggaggctgaggataggaagaaagcaactgatgcactgaacaaaaatgatatccggtacaggagatactccatcgatgacatagaggctgctactcataagtttgataaggcgctcaagataggagaaggcggatatggaccagtatacaaagcagtactggatcataccaatgttgctatcaaaatcttgagaccagatgcatcacaggggcggaaacaatttcagcaagaggtaaatctgatgtagcaatcacagattttatcgtttgaatagttaaaacctcgtcaattatgcatatgaaatcatgatcaacctatttatatcaatggcaacaatagtatcgtgcctaaagcagttaatcacgtgcttgtgacgatttgcagattgaagtactaagctgcatgcggcatccaaacatggttctgttgcttggagcctgcccagagtatgggtgcctggtgtacg

SEQ ID NO: 4262 - DNA, 407 bp, Zea mays
atacatggatcatgggcggtatcaggcattgccaactattgatacgttacatggccctttactttccgtgtccatatttgaatttagcagccagatgaaatctcctggttaaaacttgcctgatttggtactgtagttcaatcacgagttctaacattgcgtaaaccacagacagatgtatccatagcatgaacttgaacattatccatagctagatataaagtgttataaagtttgtatcctataatggcagacctagcataggtgttggaggacagcccacatcccactgtctctttcgtttccgacaagatgttttggccgttacataatgcctgtaaggtagaatgccattgcagttgttgcatcagaaagcagccatttaacggcattgtaaagtgagtgat

SEQ ID NO: 4263 - DNA, 714 bp, Zea mays
  misc_feature (603)..(607): n is a, c, g, or t
  misc_feature (629)..(635): n is a, c, g, or t
  misc_feature (647)..(651): n is a, c, g, or t
  misc_feature (656)..(656): n is a, c, g, or t
  misc_feature (658)..(664): n is a, c, g, or t
  misc_feature (672)..(675): n is a, c, g, or t
  misc_feature (684)..(703): n is a, c, g, or t
ggttgcgctcccatgagctgaaccatagccgacccaaccttctggagttcttgtattctgaagatattgtgatctcaaacttgacgttcttaaatccaccagcctagagcatacatctggtgtactgcaggtgcaacgcaattaacttagctctgtgcataaggtgtggtttggtgaatattagctacatctgtactaaagcatagtgtctttgtattctccagtaatgtaaaggtccacaatgtgacgattgagacctcattggacgctccactcactgatggcatagttccaggtatgatttttttctaggctgaatggacctttttatgatttattttcttacaacatagatatttgaattcattcttgatggtaggctggtattatttagtgatttagttctgaatgcagcaaaaaacatcttgatctctgaagaaaactgattctccttttccatttcttgttgtacttggtagcatcaaaacctgaattatatgccctaactgttgccccatatgcttaataaataatctgaaccactcttactttgtaactcttaaaatgcactagacaacgatgtcgagaagtttttactcatcnnnnntaattatccgttcttgctccannnnnnntattcaaacttnnnnntcaangnnnnnnncataattnnnngccatgaannnnnnnnnnnnnnnnnnnntgggacaggta

SEQ ID NO: 4264 - DNA, 347 bp, Zea mays
ggccctcctcctcatctatcgtaccattccccatctgggtcttgggtcttcctctccccaccgccttgccgatggatggtccaccaccgacgacgtgcgcccgtcactcactagtcactaccactctcccctctaggtctctctcagccacgccgcccgacgtggctttactgacctgcgagctggtgctgagcgcagagtcaaacgcggcgcatctttcgcgcgccctttcccgctcccgcgtcggcaatggcgaaagagagagagagggagaggggcgtatggttgccctagggcttggcggctgcattgggatttgcagtttacaactaccagtctaccacaaa

SEQ ID NO: 4265 - DNA, 730 bp, Zea mays
cacaaatttgaggagaaaagtctggaacagctcaagcatgtagaccctttccttgacatggtaaagttttactttacaaaaacaatcatgctatgtaaaatgttgcatgagtaaaaaagttttcctttggtgcagggacaaagatatcagtgcacaactactataattggtatcacagaaaaccaaacatggtgttacaaagcatgcaagatctgtaactcagcaatcattcaaaaggaaaatggttataaatgcacaaaggaaggatgtccatctacacaatttgaatggaagtaagtgtatactgctttgaataataattaccataatgcgcactgttagtaatattaatactataatctttagaacagacgtaccagttctataaatgattgtatattaaatagatccaattgaaatgagccttcactccaatatactcttacatctatatgtaaacatatgcttattgatcagaacaaatataatactctttttatttaactaactttcagttttatactctaattcagatacaagataccattcattgcaagtgatcacacctataatctagagtttatgttctttgagaaaaaatagatcaaatataatattctttttactaaactaactttccattttcatactctaattcaggtacaagataccattcattgcaagtgaccacacctataatctagagtttatgttctttgaaaaaaaggga

SEQ ID NO: 4266 - DNA, 568 bp, Zea mays
ggaagaaactgaaagaagccatacttctacgcaacagatgccaggcaagaagcatcatatggtgtaaattattatcatggctgcctctacaatcctctgtctgacagtagtcattgcaggaactggatgatatatgccgtgagagcaactggattcttccaagatacagagtacttccttcagttaccggtggtatgtggatgataatcaccgatttttcaagttcctgcatgtcgcagcatggagtccttggaccatacatagcaggcgacagttatcatatggtgttcgatcttttacagtttgtactcctatattggcagatatgtaccaggccagtgtccaccttatgggcccagacttcaacttgagtgtagatggtgatgtgagggttacccctcacgaggcacgagactcagcagcgtccaacatgctgtctcagcttcagcagaaggcaagggaaggctaggagagcggcatgtctccacagaacccttaatgctgcatccttgtgggtatcgacttgcatgcgacaggaaagaacagccatcacagctcagaaatgaac

SEQ ID NO: 4267 - DNA, 352 bp, Zea mays
caccgaggctcttacgcactcgacgccttcaggtacgagcctcactatggagaggatgacagcgatcaagttgtgagtggatttatgtccctatccaaggtaccctttgcaaaggatcaatatttcttcagtcgaactgcacagtttcgggaacaactacaagaggcacttgacagattgggctccatgattgttgatctgaatgagttggtgatgttcttggcgagctaccctcgcatgcattgccaaccttacaacatgcatatcctactgggtaactgcatgttcggtcgccaggtggaagcagaacttgtcattaaatttctgctgcacacacagcttcatagttcct

SEQ ID NO: 4268 - DNA, 828 bp, Zea mays
cgtcttgatgtcctttggagatatggtattccccaaacactgacaacaacccatacaaccaaaatattgggatcacaattttgcagcctgaaactcttgcttgtactgtagacctgaaagcaaatgatggtgactaattcaatgcaaaaaaaaaactatgtgatttttgagtaaatgaaactgaccaaaacagtagggctcaccatgctgagaccaccactcctatgtactcctggagtcctggtgtcgttacgcgaccataattgtctttacggttaaattaaagcaagacgatgggatcagctggctttgcataatctgagtacagacatctacaggccaggcctcgaggctttccctattttgtagcatctgaattgtagcaagaattatgatcacagcggaaaggaaagaattgatgacattgtgattgtatctgaaatataatttgaacagaattttattttatttttggttgcgatagacaagtgcaagatatacttagttatgagaagtttcataagaatggctagtgacagacagttgtagaacccacaaaggtaagcacataaacaacaattaacaatagagaacttaaaggtgagatgataatgatgtttctattagagagattggggaacatctctctctaatagttccactctagttttccacctaaaatagcctaaagatgtcctgcattgagtaaatacaatgaaccctaggcctaatcatgtcttgttctctccccttttaacaggttgtacaggtaaaatacacaagcgtgcactaagaactgcaatgcttgaccctataattgcctacaaa

SEQ ID NO: 4269 - DNA, 467 bp, Zea mays
cccttgcaaaatattcttatgctacttcacttcaagcaacactgcgctatggaatccttataagtttggtgcaaggtcttggtcttggatttacatatggccttgccatatgttcttgtgccttacaactttgggttgggaggttcctgatctctcatggaagagctaatggtggtgaagttgtagtagcactgtttgctattatcttgagtggactgtaagaatgtagattttaagagtttgtttttagtttaatttaaaaatgtaccctaatattcatcaaagcttttaattcattgtagtggacttaatcaagcagcaacaaacttctattcctttgagcaaggacgtatagctgcatacagactatatgaaatgataagccgttcaacatctactgtgaaccaggatggtagtaccttgtcttcagttcaaggcaacatcgagttccgcaatgtctacttcag

SEQ ID NO: 4270 - DNA, 618 bp, Zea mays
  misc_feature (571)..(574): n is a, c, g, or t
  misc_feature (584)..(592): n is a, c, g, or t
  misc_feature (597)..(598): n is a, c, g, or t
  misc_feature (600)..(601): n is a, c, g, or t
tcaggccttgtccaggcgctacaggctgcttctgtacaacagcaagcaagcgccggcgaatggtttatggacaccggagccagctctcacatgaccaacaattctggtaacttacctatttattattcttcatcatcgcctaattcctcgcatgttattgttggtgatggatccaaaattcttgttcacggtaccggccatacctctctgcattcaccaccacatacctttgttttatcctctgttttgcatcttccccacttaatcaagaatttaatctctgtgcgtcgtttcactactgataactcatgtacaattgaatttgatccttatggtttttctgtgaaggatctggccaccaagaaaataatcatgaggtccaatagtttcggcgacctctatcccttctttggaaccagctctgcttccccgacggctcttctggcacacaccacatctgttgatgtttggcatcgtcgtctcggtcatcctaataaatattccttagctcggcttcttgatcaatttccctttttatgtaataagtctttagctgcttctcctacgtgtnnnngcctgtcagnnnnnnnnncatgnncnnctaccctttccacattc

SEQ ID NO: 4271 - DNA, 184 bp, Zea mays
tctgggacaaggtgagcgagtggtgccccttcgtttgtcctcaccttttctgtgatccgctctgtggtcactcgtggctgtggtttcaggagctggaggaggtcggtggcctggacgagctggaaaaggagctcgcgcgaatcggccggaccatctgatggattcgtccggattccggcgcggc

SEQ ID NO: 4272 - DNA, 711 bp, Zea mays
atgacaggtggtcttctgcgtctaccgcgacctcgtggcgctcgccatcctcgcccccgtcgccttcctcggcgagaggtacctgcactagcttgtctccctcctgtggctgtgaattgtgatcctccgctgggcgctgggtcgattcatctcctcccttcccttgtcgcatgcagaagggtgaggcctccgttgacccctcagatgctcgcgtccttggctcttcttggcttcactgggtacgatacgacgaatttggatcctctgctcatgctggatggagcggtttgtttatatatatatcgcaatcgcatcgcagtgatcacgctagctcttccgcgcgcatgcaggctgttcgtgaacccgctcctcttcctcgtcggcctccaacacaccaacgcttcgtacgccgcagcgttcgagccctgcgtgcccgtgttcgcgttcctcttggccgtgattgccgggtacgtacgtaccaagaccaaccaaccatatcagaggagaacctgacccagtttcttcgttggcagttcatatgcatttattattacaccctgaccaccaaactgagtggttggtagtagtagtagtatactaatccgggaagcaaggccaactaaaagctacgtacgtgtactctcattttcagcgttgaaacgatcaacgtctccacgcaacatggcgtcctcaaagtcgtcggcacagccg

SEQ ID NO: 4273 - DNA, 539 bp, Zea mays
cagattgtccatgcaggatgatactgatgatgcagattttccttttgctgtggatgatgtttatccagattcacgaccagggtatcttctgctcctacttcacctttggttgatcatgctgtgcaatagttctgcatatattaactgatctttatttatttttttgacttggttggttaatttgttaagcgacattgacagtctcatagcttggaaactgctacgctcattagtagatctttgctgattaaaccatgcaactttacaggagtagtggtggaaaggacacgggggatcaggctggttcgtcatcccataaatcccaagatgctgctgttgggtatctcgtccacctgctgaaatctgcacgtccactgagagattctacctactcatctcatacatcaaggggtgaatctaccgaagcaggaagcaccagctctttcttgtcccgcaggacatccgacgcactggaggagtttgaatctttcaaggaaacaagggagaacctgctagcacgtagtagatctcggctgcaa

SEQ ID NO: 4274 - DNA, 394 bp, Zea mays
  misc_feature (388)..(388): n is a, c, g, or t
  misc_feature (391)..(391): n is a, c, g, or t
ggcggagaagcggatccccgctggcaagtccgccggcaaggagggcggcgagggcaagcgtggcaagaagaagggcaagaagagcgtggagacgtacaagatctacatcttcaaggtgctgaagcaggtgcacccggacatcggcatctcctccaaggccatgtccatcatgaactccttcatcaacgacatcttcgagaagctggccggcgaggccgccaagctcgcgcgctacaacaagaagcccaccatcacgtcccgcgagatccagacctccgtgcgcctcgtgctccccggcgagctcgccaagcacgccgtctccgagggcaccaaggccgacaccaagttcacctcctgctagaataaggaagacaccgtgtccacctcntgntag

SEQ ID NO: 4275 - DNA, 559 bp, Zea mays
cagattccattgagcgtcttgctgtaacaatataactattatttaatgttatttgtcaaaaaggtgtacatacatctaacttttgttagctgtatgcaggttatgattggtgaatacttgggacagcatgaggagttccctcttgctgtgatgcattcctatgttgactccatgaagtttatagggttgaaatttgatgctgcaattcgtgcgttcctgaaaggatttcgccttcctggtgaggcgcagaagatagatcgcataatggaaaagtttgctgagcggtaggtttatatgtatttatagaactcaacacatttttctttatgatttccgccagtgaccctcagacactgatatgattatttgcaggtactgtgctgataatcctgagcttttcaaaaatgcagatactgcttatgttcttgcttatgctgttataatgttgaatactgatgcacataatccaatggtgtggcctaagatgtcaaaatcagattttgttcgtatgaacactgcaagtgatgcagaagaatgtgtcccaaatgagctcttggaa

SEQ ID NO: 4276 - DNA, 320 bp, Zea mays
ccttatccagaaggatattttggggcttgatatcgaagtgcactatccgtgtattacaactgtggtgcaggtattctaggccacgagcgatcccgattgctatcgcatagagcttcaattctgccaccctagagcttccttgggttgctcagagtaaatatacctgtccaaagaaccatttggcatgtactcgtatataagagcccttcttgagcgctctaaacaaaacccaaataggctaacgatgttaacatgagatgtccttccaatgcttacaacttcgttcaggaattcctccccatcccctttgcactcatgca

SEQ ID NO: 4277 - DNA, 574 bp, Zea mays
gactgttaaatcacttgcagctttctacactgatgtctcaggtgtgttactttttccttattgaatgactcttgttctcttttattggggtgattttagtagcatgattatcattggtcatacttattgctatgcacattcagcaactaatccatgtatgattgtgagcttagattttcccagcttgctgggggtttctcttttccagaaaaaaaatgaccttcttggtgcttgctatgcttaagtcgtttacaaatggtaaatttatgtgatgaaggtatcaatgcatcggtgaagtcaactgcaggggaggccatggtacatcccttggatgatattgagcataaaaaggacgctgaacaggaaaattgcccattctggtgggctcggtcaccagagaatatacttcagcaggatacttatctagcattggcgaccgtatttgtaattttgaggttgctgtatcgtatttttccaaagatagattcctttaccagatgggcatggaggaggcacaatatgtttgcaaaattgatgggagcacatgaatattttctcacctaccttgagcaag

SEQ ID NO: 4278 - DNA, 420 bp, Zea mays
tccttcaaccacctgcaaggcgaggtgcccgaccgaggcttcttcagaaacctgcctcgctcatcggttgccggaaacgaaaacctctgtggcggaacgcctcggcttcgcctgcatccgtgccccgcgtccgctgcggggaagaacagtcggagcaagaggtggccgccgctgaagcatgttgaaatggctctggcgacagtgggcgcagtcgtgttcttggcatcattattagccgcagctactcagctcgtcgtctgtaggagccgtaaacaaaggcggcagcagacgaagaggcagcccctaggagccccagcgaccggccgagagcagtacgagagggtctcttacaaggagctgtcggaggggacgaaggggttttcagacgccaacctgctcggaagaggaagctacggcaca

SEQ ID NO: 4279 - DNA, 427 bp, Zea mays
ggctgtggcggtagcaacggtcaaaaatggcgggaaggggaaggggaaggggaaggtgctagtgcttggattggggcccggcggcgggagccgggagacacaagggttcatgggctcggtccttccaagtagggtccaggtggactgagctgtgcatttttttgggatgtctctctctctctcacacacattttggagactgggacgttgtttttgtatgtattgtacgtaaatggttggattgggtacgtaaatggttggattgggggcctggaaatggagagtttgggatgagctgagtttataagtatccatcaaataccgtactattcttttatgtgtgggtgtggattgctcaacttgaaaacttggatatactagtgagcatatctccacagattttgtggctaaagattcacatgatttc

SEQ ID NO: 4280 - DNA, 409 bp, Zea mays
ctaggtgaaggcgaaggcagcaagagcacccccgcatgccgcaccaccagtcgcacgggggacttgcgcgctgtcattggctgtggccaccgcatcatccttgccatcatcagtgatgcctcgatcaccgtgtgagggacgcaacgattgactggagcccagggttttgggggaacaagtatcaatgattcatgattgagacaatagcaagcgaacaagggaacacggttgggggccaaatccgtggtggaagcctaggcaaacatcgacctaaggctaggagaagagatgaggagtatgcgaggcaagctagactgtgaggtgggaatgggattggatttgaggcgagattggggtaaggaagaggaggactggaggaggctcacggcggatgcatatgaggagagag

SEQ ID NO: 4281 - DNA, 397 bp, Zea mays
gcacatggcggctaatctcaagtgggctcctgttctagccctcctcgtcgtcgttgctgccatggttggcaccaccagcgccggcaacatcgcagtgtactggggccagaacggcaacgaaggcagcctggcggacgcctgcaactccgggctctacgcctacgtcaacatcgcgttcctcacaaccttcggcaacggacagaccccagttctcaacctcgccggacactgcgaccccggctccggcagctgcaccggccagagcagcgacatccagacctgccagtcgctgggcatcaaggtgctcctctccatcggcggcgccagcggcagctacggcctctcctccaccgacgacgccaacagcgtggccgactacctgtgggacaacttcctg

SEQ ID NO: 4282 - DNA, 491 bp, Zea mays
ttattggcgttcttgcgaattttgagccaggttatttgtggtgagctctcttgcttgttttccagttgtcgttaacaccatgacacttgctgctgaccccagattgctcatgtgtgtgatttttgtggtgggatgaaagcggagtcccgatgtgtcgctcgccaagggcttgataaaacgactgaaccagaaatccattgccattcttgtgatatcgtgtcgacttggtcttggtaagaaaaattattgtttgtgttagttcggctgatgaatggagtaactagatatcttagttgtgagcattgatatggtcgcaatcgtgattggcaaatcagcatttttgtcgtgtaagctaagtttatgtttgaagatttaggttatgcgatagggattaaattggtgtttcgtatccaatgtgtcacacgcgtatccaatgtgtcacacctggatccaagacccggacgcgaacataaacaccaagtgtgctgaga

SEQ ID NO: 4283 - DNA, 722 bp, Zea mays
  misc_feature (702)..(703): n is a, c, g, or t
  misc_feature (716)..(717): n is a, c, g, or t
  misc_feature (719)..(719): n is a, c, g, or t
ttggttgctaaccccttcttatctttccaggagccacggtctttcgatctttcctccattgcagttaaaatttcaggcctgtactttttccttaactcttgcaatcccatttctctaactgattgaaaacccatacaagctgtcaatacaagctggctgctgtcaaatgtagatccagcaagagactgcagtagtgtaattgcatctccggcatcttttgtggtcactagtgcaggccctgcaaattaatgtatgaagacaacagtgttagttgcacatcaaaattcgtaaaaaaaaagaacaaataaaaaaactttaacattttccagatgttaataaacagactacgaaggaataaccaataccatataaatccagcaaagcaagtgtcgtcctgaacaacattatgcgatttccttcaaaaaggatgacatcccaaatgcgaagtactataagagaggtaaagtcttacttagatatcgatagcacacatatggtaacagaatataacctacaaagacataagaaaattttccatatgctgatagtgagatttaaatgttagtgaaccagaaggggattaaccaatattacagcagtgaactaccaacaaaaatattggaataacacatatcataatgaaagaaccaagacactgtataaaacctgaccactttcccatggaagcatattgatgaaaanngaaagaaaccatnntncag

SEQ ID NO: 4284 - DNA, 305 bp, Zea mays
tgggtgcttgacactggggcgacgaatcacatgacgggaacacgtcacatcttcgccgagctcgacaccgccgtcaccggatctgtccgcttcggcgacgggtccgtggtcgccatcgaaggaaaggggacagtcctcttcgcttgcaagtccggggaacatcgccggttggaaggagtgtactacatcccgcgcctcaccaccaacatcgtgagtctcggccaaatggatgaggatggctacacaatcaacatcgagggaggagtgctgcgcctccatgatccgcagcaccaactgctggcgaa

SEQ ID NO: 4285 - DNA, 388 bp, Zea mays
tgtcgttgaagtgcaagacaacgactgtggtgcttcgtgaggggtacgagagaggtaagctcgtggagcagcatcccctggctgctgtgagggacaaggtgcattatgtgatgcgcactggagtgctgtaccgtggaaaaggtttgtccaagcttgttctggatgaggatgtcactgaggaagagggtgcactgaatggggaggaatttgaaggggagggaatggatggggatgctgatgtcgagtgcttcagaatggagattgtggatgacgatgggtctgctgatgatgtggatgatgaaggttatagtgatggttgacatggactgatgactcttgccttcttgatttatgttttgcatttgtggcttcagtcgtgaattacagt

SEQ ID NO: 4286 - DNA, 434 bp, Zea mays
ttactccagatcgatttgtcaacgaatcagctcaccggagatatacctgaagatttcggcaatctcaagaacctcacaatactgtttctgtacaacaaccagctcagcggcaccatcccggcaagcatcgggctgctaccacagctcaaggatatccgcttgttccaaaaccagctgtccggagagctcccgccggagctgggcaagcactcgccgttgggcaacctcgaggtgtccatcaacaacctctccggcccgctgcgagagtcgctctgcgccaacgggaagctcttcgacatcgtcgccttcaacaacagcttctcaggcgagctccccgcggaactcggggactgcatcactataaacaacctgatgctccacaacaacaacttctcaggcgacttcccggagaagatatggtcgttcccgaatct

SEQ ID NO: 4287 - DNA, 359 bp, Zea mays
tatctctcctcctctcccgtattggtgctcgctctggagcttatctcccaccgccgatcgctgatcttcctggccgtgccgctcaacgtgtggagaaaaaaaaaatcccaccgccccagccaggtcttcttccccctgcgcgcttatcttcagccgccgttcagtgttcgtgggacagaaaaatctggccgtcgttcttcacgcgcagctccatcgtgctccattttctctggccgctactctggccagcgttctctgcttgcttcagctccagcgcccagcctcagctcgcgcccaagctcctgcgcgtctctcagccctgcgcgcgagctcagcatctccctgcgcaccacgacatc

SEQ ID NO: 4288 - DNA, 495 bp, Zea mays
ggcgagcccggggtgagttgagttggccgtgttcctctccattcctttttttacgctttgcacctcgcggcacgtggatttcgcggaaccaacccccacggcctcccttttcgttgccgtaggagtcgtggacgaagccggtgtcggtgatcgtcgccggcctgctggtgcccgctgtgatggcggcggttgcggccaacggggtgccggagccgctgcggtcgtcgaggctggccaatgggatctttgcgccgtggatcctcttcagcgccgtcatcatcttcgctcgtgccaggacgcggccaagggctccatgaatgaatctctctagagagcacgctaccgccagtttcttatgtacttactttcccatatcaaccatgttagaatgtaggaatttggtaacgattccaattatcaccggattttgtttgtgtttgctgacggcacgttatctgaaatgctatagattcagactgtcaccgtagttccttg

SEQ ID NO: 4289 - DNA, 375 bp, Zea mays
ctatctttcctgaaaattcataaaataaaatccagtaattcttcacctacaggagcaaagtgaaagaaacattgttcagtgtgcattgtggccctttgcaagtatgcttttgctacgtccttgattgattctctttctttacacatgttgatcatggtaaggaatagcctggtttccggattacgtatcccagtggtgctatccactagtagtggataactgtaccttgccctattaatctgagttgatgacgattctaccgtctacttcaaattcacactgtctaaacaatgttttgcacattcacttattcataccagtaaattcagccttagggctggtttggttttgtgacaaagggagattgaaggagaa

SEQ ID NO: 4290 - DNA, 362 bp, Zea mays
cccaggcgcgaacttgcgcgcgaacatgtgtgagtgtgagtacgtgccgttggacggcggcttcctgaggtccctgatgaggtcggcggacacctcctccgctcggtacgtgcgcgggtggccgtcgaaggagccggtccagttgacactggtgagcgagaacccggcgcacccagcggggtccagcatgtccagcagcgtcgggaagtagtgctcctccgggtagcacgagcgctgcctctcgacgaggcagggcagccggaacttgccccacagccgcctgtccccgaccaccgccacggcgtgccgtctggcgagcacgaagaactgggacccgacgcggaagctctcgaacggaacct

SEQ ID NO: 4291 - DNA, 434 bp, Zea mays
cgccgtcgtgtccacccacccttcctctaccggagagctggacgagagtacagtactgcagcatctcctctttattactcgtatacgagtattaattgggctaaccccccgtgtgataacggatgtaggctccgacaagtgcagagcagcaccgcagtgggggaccgttggaagttggtggccctggccatggccatggccggctcgacctcactgtcactgaggtcactccattcaactcccccaactaaccggaattcaagttgctgccagtgacccaaatggcctcctgctttcatctagagtagaccattcccaagcgacttgcactttttatcactcgtacccctcgtacggcagcagcataatctaatggaataaatactcctgctatatatattttatatataataaggctatcatggattgcggta

SEQ ID NO: 4292 - DNA, 381 bp, Zea mays
agctgacacagatatcgaggaccaggagaacaatgcaattggtgatgattacaatgatgaccttatggatgaagaagatgacgactttcttgagaaccatgttatagaagtaagatggagggagagcttaactcgaatggattatgatcatcatctgagattttccaggggtcgtgcagactccagtggttttattgatatatcttctgagtcatttcatggtgtggggacagttgattcatttgatctgcatcgttcgtttggtcttgaacggcggcgccaaatcggaagtaggtcgcttcttgatcgaccaaggaccgatgggaatgcctttcttcatccactgcttgtcaggccagcacagtctagggagggaactaa

SEQ ID NO: 4293 - DNA, 1311 bp, Zea mays
  misc_feature (277)..(278): n is a, c, g, or t
  misc_feature (303)..(303): n is a, c, g, or t
  misc_feature (319)..(319): n is a, c, g, or t
  misc_feature (352)..(356): n is a, c, g, or t
  misc_feature (363)..(363): n is a, c, g, or t
  misc_feature (377)..(379): n is a, c, g, or t
  misc_feature (392)..(395): n is a, c, g, or t
  misc_feature (397)..(397): n is a, c, g, or t
  misc_feature (422)..(426): n is a, c, g, or t
  misc_feature (444)..(444): n is a, c, g, or t
  misc_feature (548)..(551): n is a, c, g, or t
  misc_feature (564)..(566): n is a, c, g, or t
  misc_feature (583)..(585): n is a, c, g, or t
  misc_feature (602)..(602): n is a, c, g, or t
  misc_feature (620)..(622): n is a, c, g, or t
  misc_feature (631)..(631): n is a, c, g, or t
  misc_feature (655)..(655): n is a, c, g, or t
  misc_feature (944)..(945): n is a, c, g, or t
  misc_feature (1113)..(1114): n is a, c, g, or t
  misc_feature (1245)..(1251): n is a, c, g, or t
  misc_feature (1298)..(1307): n is a, c, g, or t
gacctccacaagctgacaaaaacagtggtattgccgacaatttcagctctttgttcatatcattttcttggttcccatgacaaataacttgagttctatttccatatatttaattgaagtgtttgtcatgatcaactcttgtgctggaaacatactgctcctattcttgtggtagtgaatgcatctagggatgtatctctgttatccaaatactacaacctgaaagatatttccagttactccatgcgaatttaaactttttagttcaagttatganntgagttgcttatatatgggagtagntttctcacgtgtaccnataatcataaagttcctggatcgatagggccgnnnnntgcggtntatgctacctatgnnngatttttacatgnnnngnacaaaaatgaccccacgtatctggnnnnngtatctgggtcgaggacnatgtttcttgatcgagtgtcgctaccactgtacatgtttcttgtgattatgcgtgtacctatcatgtgtgtgcgcgcgcactatcaccaccactaatgatgccnnnntatccaaactttnnnacacacaaccacaacannnccttctaataattttcnatacagcaagtcttgagnnncttaggtancttaggtgtcttaagatagaactngtaccaacatgagcattaagggtgtgtttggtttgaggaatgagctggtacattttctcactcctcaattttttatttggtttgtggaatagaatgagttgatccatcaccacaacattctttataagctaataattagtatacatacgaggaataagttgattccaccaaaatttatggaatgaactcatgatgtatcaactcatgaagcataaggtgactccacaaaccaaacacactgtaagttgacgcggtggaatgtttgggtgatatgcggccacaagcatannaagtaatttctttttgttgtttaatatgatcttaactgtgatgctgaaagctattgtgattttcttgacatttgtaaacatacctctaacatgttgttcacctataattttccagagaagcagcttgcgaattccgtcaagcagaacagatgcgggtgcaccattctnngataagacgcctgcttgatgttgtacaatctgtgtagtcttaggattttgtatctgctttgctgtgttcacacaagcgtgaattcattttgatatccagtccttgaagccattcgagtccagaaacatacnnnnnnnaaatccatcgaatatgaaggtttctggatggtagatttggatcgtcnnnnnnnnnngtga

SEQ ID NO: 4294 - DNA, 356 bp, Zea mays
ctccttgccgtcttccacagctttcttgaactgcatgccgccggctggtggatgctgcgcgcgcttgaattccggtcgatcccaagaggcgcagttcaataaagctgtgggaaactgcagagagaggccaccagccgatccgatcgatcggatcggatcgcggcaccagatctcgaccaccgccggaactgggcgggggcgaagcagatgatgcggcgattaattaaccggcgtagcagcggctggggatctacctgcatcacgtcgatccacccgcggtagatcgatgggaccgtcacaacaaggacaaggtacggattaggtttcttgtactggtaggaatggatggtggttac

SEQ ID NO: 4295 - DNA, 882 bp, Zea mays
ggcaatgggtgcgggttggatccaacctcacttctctagattatgaagatacgtctgtccatagaattgatcatctccttcaagagatggatgcagcaaaattatgtagaatggattcatgtgatgggcaatataatttgtgtggcacggaatcaacatctggatcacttgcacaaaacattaaatccagaaaaaatgggggtgagcatggttctcagcaactgcaaaccctggatcgtgttgactctttagatggcttccagaagcatgacagtgaacattctcttttaaaaacttctcaaggtaggccgaagtctagttgggaataagttactttggtattcgtattacctcgatgaaatcatgaaaatagtacttcatcccgaattctaagttgattgaacttttctaggtacattgattttgatatgcacctagatatacagtatatgtatctagaaaagccaaaatgatttaaaatttggaacggtggaattagttgataagaaatactgttatatgtatctagagaatccaaaatgacttacaatttggaacggagggagtagttgctaagaaatttgaatagttcgaatgcttatagatcactattctagatatacaaatgctttgttggcccctcacatattcattattatattgatccatattgtgccatcttgtgttatcatgtagaatttgcaagttaagccagaatataagtacctatgaattctttatctctatagctttctatatgcgaaaatactgttttctggccattcatctggtattagacattttcagtttatctcacttttgatgatttacttacgtgagctttcctttcccacaagcagtatcgccaaagatacagcatgc

SEQ ID NO: 4296 - DNA, 499 bp, Zea mays
tcttataaatgaggatcctcgggattttcggtctcatctttgccaggtactctttgatattttgctgagtttgatttgtcctgaaataccttttgttttgactttgaatgtgcattttgcctggctatggtgttggttctgcagggcattgtgtatgcacttttagacagaaaagaagacgcagatatgcagtttgatgtatacagaagccttgtgccggatgaattcccagataagagttttatcagtgatgttatactggcggctaggacggagtcacatgatcggctacaaaaggaatttgactctgagtttcaagcgaagaaatgatacattaagttttgtatagatgaggcccaaatactcctggtaggctaaatggttgcatggtaccaatcttacaaataaaacataacacagtaaaagcatagtgaaaagaggcgtctcttatcaggctatcaccaattttcctcatttcctctccctcttagtctctgca

SEQ ID NO: 4297 - DNA, 698 bp, Zea mays
agaggttcaagggggtgatttgcggtctttcttcacattggttagcaatcaaatgttccatctttgacaaatattctacaaatactactacttctctgatggccatgctcatcaaatttcaggttatgacagacccagatgttccaggaccaagtgatccatatctaagggagcaccttcattggtaatattcagcatttcttaccttagtagggatgttaaatagcatatgttgctcaggaagatagaaccatatcttgcatacaaaattgcatgctttttagcacttaaatgggagtagtgtgactaaatggcatccttcacatttgcaggatcgtgactgatatacctgggacaacagatgcctcctttggtaggttctgctgaatcaggcttagtctattccatgttttagttgttctttgaattaataacaattcatctgacaattgcagggcgagaggtcataagctatgagagcccaagacctaacatcggtatccacaggttcatttttgtgctcttcaagcagaagggtaggcaaactgtaaccgtgccatccttcagagatcatttcaacacccggcagtttgctgaggaaaatgaccttggcctcccagtagctgctgtctacttcaatgcacagagagaaactgcagctaggagacgttgaaagttccagctcttattgtccacct

SEQ ID NO: 4298 - DNA, 1524 bp, Zea mays
  misc_feature (1119)..(1119): n is a, c, g, or t
  misc_feature (1519)..(1519): n is a, c, g, or t
gggaacccgatcgatgggaaactgctgtctcgagaggcctcgtcgcggtggcagcggcagtgcgggctccgtgcattacgccaggacgaaccccgtgtgggtggaggacaggagggaggaggcgtgcaagggcgagggcgagggcgccggccacgcgccggcggctgccacggagatgaagatcaggatcacgaggaagcagctggaggagctgctgcggcgcgtagaggacggcaagcacggcggtggctgcggagtgcccgtccaggacgtcatctcggagctcctgtgcgtggccagcactagctccaacttccggcacagggaggaggggcagtggcggccgtcgctgcagaccatacccgagtgagacggaccgtggtctgattgacgatcggatcatgttacttgaaatgtatgacatgctttatctatgaatattcatttgtccgacaattgcatacagaaactttacctactatgaaagcacataactctaacatcggtctccacagcgatcatttttacggtcttctcgccaaagacaacgtcatctcggttcggagtcatcacttcaaagatcatttccccacccggtagtttgctgaggaaaatgaccttggtctcccaatagctgctgtctacttccatggcccccagagaaactgcagcttaacagaccctgaaacctccgcctctatccttcctccttgatctgtgcattacgtgcagttatttttcttaattatcctcttcttattttcttttcactctcaactcttttctctcccatcacatcccttgctcctcaactgatctctaatttctccctctcccctccctaactcccccctcctcctctttcacatttctcctttcttctcactcctctctgtctcacttccccatatcctcccctatccgacttcgatcaaatagagccttccggagaccacccatgaggtgagtacgcgctatcactgtctcacctcactcttccttaatttcctccctctcccttccttttcctttcatctcctgcccgtttccctcggttcctccttcccttgtctcctcctttttcttacctccttcgttttctctcctctttattccctnacccccaccccactttgtccacgacacacagcatctctgcctcactcccctattccgtcctccgaacttaccacacacaccaaacctaccacttctcttaccttacacttctcattctaccatatttttactcccctttctccctctctccttactctttattttttttcaatcctttactctccttctttctttcctttaccgttccctcactactccgcctctattccttatctcattacttcaactactccctcccgccacgaccaagctctatcctcagatgatctactctggcacagcttctgctcacacccagcatccctgctctttatcctcgcacaccgtgcctacctcgtcatgacactttgtcacttgctcaacaactccgtagacactncaccc

SEQ ID NO: 4299 - DNA, 349 bp, Zea mays
gggtgttactgttgatttaaaagaaggtgctagattcgtcatcacaggcatcagcattcccaatgacccttccaagttgtccaaagctacaatcttgtcactgcttggttgcatcaagagctacttcacctttgcagctggacctcttaagggcttcaaggaaaatatgtgcaagaagaagttgttgaagacatccatgggatatcagtgtcctaatgattgtatcctctttgatccaaagcagtcttctgtctgcatggaagatggccctttcatagatgaatcattctatggttcagagatagcctcattcaaagatgctcttacaagaatcggagtaaccgtggat

SEQ ID NO: 4300 - DNA, 475 bp, Zea mays
tgttggagcagccataaggccgacagtagaagtggcaccgaatgtcgaagccatacctgtgcagcaggagccacattagcacgagaaagcaatcgaagcaagcatgtaattatgtaacccgtaatctgaccacccatcgagcaggaactaactaacaggagcacattttgacccagtaatgggacacaacatccttcgccttcgctgcatctctaagtctaaacatcatgttctaactacagtggcacgccagccacacgagtacagaccccgcgagattcacgagctccaactgtccgcagcattttgggtgaagctagcgctagacaataactccccatcccatcccgtaccagatccactcgccaccaatctgtgtctttctacgagaacgaacccgagccaacctcgcgccgaaacccatgacccaccggactggagctgcgcggcgcgggcatccagttccagttccacc

SEQ ID NO: 4301 - DNA, 896 bp, Zea mays
  misc_feature (172)..(174): n is a, c, g, or t
  misc_feature (241)..(269): n is a, c, g, or t
  misc_feature (641)..(641): n is a, c, g, or t
ctggtctactagcacataaataaagtaaagaccctatcattgaccggtatgctttttgatcaacggacttacctcctttgttgaggtcggtgtgtccgtcggttcccatcggagtctttgcgggcttggcgtccttcatcccaaaccgctttagcaaatcttgcgtgtactnnntttgggagatgaaggtgccgtccttgagttgcttcacttggaacccaaggaagtagttcaactcgcnnnnnnnnnnnnnnnnnnnnnnnnnnnnncatccccaccacctcgcaaaagtcgaggatagcaatgaaatctggctggcgatttctttacttagcatctcggtgaagtgccggtataaccatctcccatacaatgatacaactatacaagatgcatgcgtggagtgggggctgctgctgcccatttcccccctttaatttgcttgctgaggaagatcaagttgcattgaccgggagcacgccattggtggtggtatgctgcatcgctccagcgacagcgaggtgtaaagggggtggagattacatcgctggagaatcgatcgggaatccagacgcctttcttttctagtgaaaaccgatgcatggctttacaaaatgttgggcggcatatactactaccangttggatcggctttcccaaccttgaaagcattagcaattaaaaagtctctaaggcattcataccatgctcttggggcttgcttaagtccatagagcgccttatagagcttacacacgtggtcggggtaccgttcatcctcgaagccagggggttgctccacgtacacctcctccttgattggcccgttgaggaaagcgctcttcacatccatttggaacaacctgaaagaatgttgggcggcatatactactacc

SEQ ID NO: 4302 - DNA, 412 bp, Zea mays
cgaggttgaacatgtgtgacgcctgccttgctttcaacggatgatggtccagagcagaggcattgtagttgccgtaggagcaagcagtgcccagcggtcaagctgtactgcaggccatcaataactggatcaccccttttccattgaaggagttcccaaggacaggcaggaggcagcaggcagcagggagtggtggtggcaatgggaacgcaaatgcagagagaagaagctgtaccttttggttgggttgggttgggttgggtgtgtcgtgttgacaaatcatcccaattgttagacagattgatcctgcgggtggtggatgcgatgccggtacgttacattcttattcttatcctgccgcgatccccgctggaaattgcgtctccctggaacgcctgttagcatatacctt

SEQ ID NO: 4303 - DNA, 1028 bp, Zea mays
  misc_feature (960)..(962): n is a, c, g, or t
  misc_feature (994)..(994): n is a, c, g, or t
  misc_feature (997)..(1003): n is a, c, g, or t
caatccaataccaaatcagaaggaatattagaaaaggcttcacttgttaaatatgtcaaggcattcatgtactgcaagaatagagggggcagagaatcccatcagataggtgctgtagaatgtggataaagcctgaacaagatggtctacttgcaaaactgaagcagagaaagtgtaaaatatacagttcagaccactgaggctaaaagaacaaatctacattgggtaaatgtcaacattcagattttaaaacataccattttaacattgttatggcagtccagaagtggtctacgagcaaccagattgtaagccaaacatccaaagctaaacatatcacaagcagagccaactttagaatctctactttggaccaattctggtgcagtatagttcaacgatggttgaagaggtaaagctgtatcctcgacatcatagtcctagaaagaaaacaagcagataaattgttaacaggtcagggcattggaagcaacaaaaaaaatcacaaaacgtatcttgaagacacaaatcacagaagatgtcaccaaagtacttaggaatgggtatgatgaagcgctaaatatgcttagttgaccattgataacttaacaatgtagcggtctaataatgactaacataggttcgtggtgcacatcgtatatgccattacaaatcccagcagtagcaatgtgctaaacacaatcgccagttcgccacatcacagtagtggtatattcttaacttttatatgaaaagatcagttcaagacaagaagaaactctgccagaaaaatatgtatcatgcaaaactgtgtgacaatttagaaattaaatgattgcaaaaaaaagaacaatataagttcagtggaatattttctgttacagcaaacttcaaagggataatacagattagtaatattcccaaaatatggtagaagaatctgcaaattaaagccaccannntgacaaactaaatgtatatcacttactaaccnaannnnnnnatagttgtgatgaagtcaaactcaa

SEQ ID NO: 4304 - DNA, 389 bp, Zea mays
ccatgccgccttctgacgagagcccgcgtgactcggggtgtgctgctaggcgtgttgcagatttggccgggaagcgatccttcttcaccgccgcagccgacgatggcaatcccgttacaccctaccaggcacgggtggttgaacttgaaacacccgagacagcagcagcagcagaagcatgagtgtttgaagcatggtttcgatcagacagcttagcttggctccccttcgtcatgagtgtttgaagtgtctgcttacttgagcttgcatctaggtgagaggccttttttgcagtgtgccactacataatctactgctacaatcgtatcatatctcatgtcctatttttttttctttccccttgagacctggctagcaattcatcttgt

SEQ ID NO: 4305 - DNA, 354 bp, Zea mays
ttgggggtataaaatttctttcttatgatcatccaaatttaggtgttactcttctctatctcactttagtttccctctctctctagttttctctctctctcttttaattagagttagttgtattagtgagggattatttattttattttgcccaaaacatatgagtcatggaatgttgcatcatattgagcctaaatattctttgaattgttgctcatatttgatttggtttgaatttgaaacttgatttgaatttgaattgaaaaccctagagaaaataaatagaaaagcaattagaaattccctagaaaatggaaagccgaattcggcccaaggcagcccacttagcccagt

SEQ ID NO: 4306 - DNA, 353 bp, Zea mays
cacagctggtgatcagcctgagtcaagaacgaaccgcgcaaaacagtagtgacctttgctaggtggtacgggtcgatagggctggcccgtagcacacagcaatggcggtggttcgggtattgactcagcctccaattgttctgggttaaattttgcattttggacgtacgactggccgggcaatgccatggttggttttggtggttttagggagtctggagtcatcggtgctttttgttggctggctcgtggtttttggtatgatgtttgcttttgtaaccatagatgtaggagagccccccttgatgatacagtcaatatcagacaaatgcagcattgtatcgtgagattca

SEQ ID NO: 4307 - DNA, 575 bp, Zea mays
cctgacctgagtggtttcttctttgcttggtaaggaacccttgctttcttggatggatctttgttctgcggattgtctaaatctcaattttcttcttcctccacgcaggtagtcgcgcatatttggtagccgcgtccgcgtgacgtcgtcggtgcttgggtccattcagacattgttcttatttgatcagtacccctatttagcgcctgcaagatcgagatcgatcttacttgactccataagatgtattggggatttggagtgccttgtactccaacttaagactgggagtgaacccgcataccccaagcccgcccttccaccgaactgaactagacatcacatcctcaagcgtcatcaattctaatggatgatgcagcagaaaatattcttgcatcacttggccgtgtgcatctcgttgatctaatggcctctgaagcagattgcagcaacgaaggagcacgagaactcgaccatcaccgaatcgacagaactctacagatggtcagccagcgaagacagcaacggtgtgctcgccaaggacagcgtcatctctgttgcgagtggaaaggtca

SEQ ID NO: 4308 - DNA, 230 bp, Zea mays
gtttcttatttctgcatgtgtaccattagacaggttatggtaattgatcatcccatcgcgttttggttcatggccacgctcctttttgccatattgaacacactcgataaatttgagaaccttcaggtaggcttgtagtggtataaatacctacaaaagggtaaaaccgattatttaacaggaaaataacacaaaaaactattaggcataaaccagcaccagcctgttgc

SEQ ID NO: 4309 - DNA, 365 bp, Zea mays
gcctgccgtggcggagcggtacgagcgccgcgagaagctgggcgaaggcatgttcggcgacgtgtacaaggcctgggaccgcgtgcacgaccgcatcgtcgccgtgaagaggctctcggggaggaccgacgaccgcttcgtgaagacctccatccccgacttggcgcgagaggtcatgtccctcgcggcgtgtcgcggccacccttccgtcgtacagctcctggcgacgcacgtcgacggcagccgcgccgacggcgactgctacctcgtcacggaacacgccgggcctatgaacctgcgccagtacatggccgtccgtcgccttaacggccagccattcggcgaggacgaggtgcgcgacgtta

SEQ ID NO: 4310 - DNA, 392 bp, Zea mays
  misc_feature (383)..(386): n is a, c, g, or t
agtcaccagcagtccagcactggtaagaaaacaagaggccaagaggatgtgccaggcagtgcgagtgtgcgacacgtccgaaaaaccggtcatcacagcagccaaaggcactgtcagcttgcacacacagtgaaaagatcatccactaaacaagtggcgatgagcccacaagcacaaaagtttgcgagcataagaattggactttgggttatgctattctgattgtgcaacagactttagagttccaacaaagcatttgcaaaccgatgctttataatagagatttattttgacataatttgtgagatatcgaagtcgatgaatatatatatgttggtcgttgtcgtgtaatcgttgtgcacaaacattttgtaagatatttnnnntgccgt

SEQ ID NO: 4311 - DNA, 379 bp, Zea mays
gctcagaagtcagaaaccacacagcgcgatcgatcgatccatccatctttggatccttggcgttgcgtcagcggctttttgtgtgtgtgtacaagcagctggcctggtgctagctagcttccagcaggaggagcaaaaccgcccagtcgatcagctccaaaacagataccagggcatatggcagatactactgacgaccgtgcgcgaggaagagggcgttccggtggacggcagccggcagccggcaggcagagagaggaaggatcggatcgagagagtgacgacgacctcggcttggaacaacacgagctgggcccagccgtctcggaagaaaggcggccttggatcggattttgatgggggtggcgctctttaactt

SEQ ID NO: 4312 - DNA, 346 bp, Zea mays
tacttcctgtctagtgtctccgtcgaccgtcgctgccagccagccacagcaagctccgcacgaccgccggtccgccgcctaccagagcgagctcatctctcagccgcgccggggggcctcctcgtcacgccggcgcagcccgcgcttcgttccaccgtagtttgcccggccgtgctggggcaaaaaaaggtccgggcccacgtgttcccagacggagcgagaggacgtcgatcggtcaggccatcagggaccagaccagacaaagccaaaggggccgcggatcggtaggcggccggcgcggatcggaggaagaagggaggaggaggccatccagttggagtacttg

SEQ ID NO: 4313 - DNA, 755 bp, Zea mays
  misc_feature (746)..(750): n is a, c, g, or t
attcgggcgtggtgagttgcttctcgtcctcggttgagcgcacgagtttatcctgcgcgtttcgctgtaacttctcttggattttgctccggggtttggggtttgaatcgattggggtgatctgatctgagatgtgatgctgcaggtttgtgccgggagggaaggaatccgtggggctacagccccatccgggctgagggttgaaggaaccggccctttggtgcgctccccccaatcgaggaaaagggggcatcggatgctttgttgccttcggtgagcaatttcactgacttttggttacaatttactggggatttgagtaaattcctgacccatcgctccaaatgatcagaccgtcgcaggctcgcagcatccgttacgcgattgggaatggaccatcagcaggtcgaaatgactgttctgtgacactttccccccaatcccatcaatcccggtacgcacctcctcacccgtttcacctatcatctgtttattctgtacccagttaactgaaggttttccaagttttgtgcagacttgatttttatttgaacacaagatgggactgtaatctcggttgctgttctgtgcctcttaggttttcctccgtcctggatttggaagggaggaactcttggatttctgtctccatggcgcacgaattgtagtttccagaatcttactttgtagatttagtgtaaataatagtgatagcagctggtgacgaatctcgggtttccttagtnnnnntcacc

SEQ ID NO: 4314 - DNA, 576 bp, Zea mays
ttggatctcgtctcggcctccggcacagagtttgcgcaagaagacgacaacggcgatgaggacgatgacggctccgacgatgatgaggaaagcgactttgacgaggacttcaacgacgtggttaggatgaaccctcaattgtctagaccccagagaggttgctggtttcagttgtctagactccagagaggttgacctagatgatgtatgtaaaaacatgcaggagggtgtgttttcggttgatgaggacgacgaagatgacggagaggaagaggaggaggaggaggacgacgacgacgacgatgacgaggacctaccaagctggtccaaccttgagaccgtgaattcctgccatccactgtactttgcaaggatgattgtagaggtacacgatcgaagtttggcagcatgtcttgtcagcaactgcactcttaactaaatccattattcccagactgcaaccaagtctagcatagactggctggaccggccacctgcaagccttgtcgtcgagggccagctgaggcctgcctttgctgaggagagcaccatggttgccaagcatatatcaagtga

SEQ ID NO: 4315 - DNA, 1486 bp, Zea mays
  misc_feature (590)..(590): n is a, c, g, or t
  misc_feature (620)..(624): n is a, c, g, or t
  misc_feature (628)..(628): n is a, c, g, or t
ttgaagcacttcaggttttgaagcacttcaggttactcccctgcagccaggtcaatcaacaaggacacttttacaaatgaacacgttccagaatatcagccctggtgcaccaaactcgctattacaagttgctgtgaaaaataatcagcagccagtgtggtacttcaatgacaaaattccactgcatgttttctttggtgaagatggaaaaatggaacgagctagttttcttgaggtaaaaagcgcgatcaagtctgtatggttttgctgtttcttttttcttgtttgggcaatcaaagcgagtgatggtgcattgcccatagaactacttgatttaagtcacccatgtttcgttcttccatacgaaatttgaagtcattttatctgactgcaggcctggaaatctttacctgatgacaatgaatttacaaaagaattcccgggctctgtaatcagcagtatagatgctacagttgagcgccttgcagcatcaaatgtgttctttatagccaagcggaaaaatgcaaacatggatgttctgtatcttccgcgaagatgccccgcggaatccccttccttatagagcccantctttgggggagagtcaaggcctggcgggnnnnnaggnatcccttttttcccgtttggcttataaagaaacacttttggatgctggcaggggctccagtgtagcatttatttctgtgattaacagagcccggaattttttttgaaatctctttggttatcgggaagaattcccggcggggcccaaaaaaatggcttcaaatttgtatgggagaacaaaaatggggggattaaattcgggggatactatgggcaatggcactcctttgtttgccaacagaaaaaaaaaaaaaaaacaaaaaatggatcggttttttcccccgaaaaaaattcgtttctttttcttttttttcccaaaaaaaaaaaaaaagaggaattttttttataacacaccccgccgtgggttttttttttttctctcttatataagaaggggggggggggggcggggggtaaaggggggagcctttctctttaaaaattgctttgtttattggttgcggggggggggaagaaaggaaaaatcaataaaaaaaaaaaaaagaaccacaatttcgacccaaaacttatccctttgctctattatttcttttctatgcaaagctctaataatatttatgtctcaacttaatgctttttttctatttacattctctccatccgaattagcatgctacctcaacattgaactcgcccctcacttcaccttgactacccacatcactcatgctcttttcttcatctttacttaactaaaaacacacgtatttacgtaacccgcgtttactgcttatacggcgagcacacgtacaccgcaaccttccatacgctatgtccgcaccaactctgtcctctggcagcctcatccacctcccgcgtccgccggtcaacgcataca

SEQ ID NO: 4316 - DNA, 363 bp, Zea mays
atttggggttcaaatctttccatttgcttgtatcgtgtatgttatatgcattcatttcatgccacggatcatgcgttccgaggtcatgaggcactgcacctttagccttgcggattccggatgtaccatcagccaaaaattttactttgcgccgatcttcatacagcacagcattggcaaaatcacgttggatactcaactctatttttgggaacaaatcaaggagagcaaaagatgcgtagaaatgcacatcatatgtgttccacatgatgtattccactccttctagatacaaaaacttgccaacgtgttcagggccatcctttgaaatcaagtaaggaattggctcttctgacttgagtc

SEQ ID NO: 4317 - DNA, 397 bp, Zea mays
  misc_feature (387)..(389): n is a, c, g, or t
actcatttagctcatgaccacccgacggataagaactcagtagctcgtgtcactaacttctatctgttatccttcaaatcagtgactgtatgttttcactaggcccaagttaaccttgtacagttttgaaccaaaggtaggtttcgtttggtagacctgtttaattacaggtatactgagatccattgcctatatatatctatggaagtacactgacattgaaattattcctccacagggatgtttcagcttttcacctgatacatgggtgtcactcatatccatgaccttggcatagtttcctattccttttccttttcttctgaaatgatgtaatttgtggggcgccagcatcttgtctcctagagtaatattctgtttgcagtnnnaacgtcct

SEQ ID NO: 4318 - DNA, 1357 bp, Zea mays
  misc_feature (450)..(454): n is a, c, g, or t
  misc_feature (458)..(711): n is a, c, g, or t
  misc_feature (714)..(742): n is a, c, g, or t
  misc_feature (744)..(761): n is a, c, g, or t
  misc_feature (765)..(833): n is a, c, g, or t
  misc_feature (846)..(860): n is a, c, g, or t
  misc_feature (862)..(869): n is a, c, g, or t
  misc_feature (871)..(872): n is a, c, g, or t
  misc_feature (874)..(874): n is a, c, g, or t
  misc_feature (876)..(876): n is a, c, g, or t
  misc_feature (881)..(892): n is a, c, g, or t
  misc_feature (894)..(899): n is a, c, g, or t
  misc_feature (905)..(913): n is a, c, g, or t
  misc_feature (917)..(922): n is a, c, g, or t
  misc_feature (926)..(927): n is a, c, g, or t
  misc_feature (929)..(943): n is a, c, g, or t
  misc_feature (945)..(950): n is a, c, g, or t
  misc_feature (952)..(954): n is a, c, g, or t
  misc_feature (961)..(966): n is a, c, g, or t
  misc_feature (975)..(986): n is a, c, g, or t
  misc_feature (989)..(1000): n is a, c, g, or t
  misc_feature (1003)..(1008): n is a, c, g, or t
  misc_feature (1016)..(1017): n is a, c, g, or t
  misc_feature (1020)..(1023): n is a, c, g, or t
  misc_feature (1025)..(1028): n is a, c, g, or t
  misc_feature (1031)..(1031): n is a, c, g, or t
  misc_feature (1036)..(1059): n is a, c, g, or t
  misc_feature (1064)..(1067): n is a, c, g, or t
  misc_feature (1070)..(1073): n is a, c, g, or t
  misc_feature (1075)..(1075): n is a, c, g, or t
  misc_feature (1077)..(1085): n is a, c, g, or t
  misc_feature (1091)..(1098): n is a, c, g, or t
  misc_feature (1100)..(1102): n is a, c, g, or t
  misc_feature (1105)..(1111): n is a, c, g, or t
  misc_feature (1114)..(1116): n is a, c, g, or t
  misc_feature (1119)..(1119): n is a, c, g, or t
  misc_feature (1121)..(1121): n is a, c, g, or t
  misc_feature (1123)..(1130): n is a, c, g, or t
  misc_feature (1134)..(1144): n is a, c, g, or t
  misc_feature (1146)..(1148): n is a, c, g, or t
  misc_feature (1150)..(1184): n is a, c, g, or t
  misc_feature (1187)..(1187): n is a, c, g, or t
  misc_feature (1192)..(1192): n is a, c, g, or t
  misc_feature (1194)..(1194): n is a, c, g, or t
  misc_feature (1196)..(1197): n is a, c, g, or t
  misc_feature (1200)..(1201): n is a, c, g, or t
  misc_feature (1203)..(1206): n is a, c, g, or t
  misc_feature (1210)..(1211): n is a, c, g, or t
  misc_feature (1220)..(1220): n is a, c, g, or t
  misc_feature (1224)..(1226): n is a, c, g, or t
  misc_feature (1230)..(1232): n is a, c, g, or t
  misc_feature (1234)..(1240): n is a, c, g, or t
  misc_feature (1247)..(1250): n is a, c, g, or t
  misc_feature (1253)..(1253): n is a, c, g, or t
  misc_feature (1255)..(1257): n is a, c, g, or t
  misc_feature (1259)..(1259): n is a, c, g, or t
  misc_feature (1261)..(1270): n is a, c, g, or t
  misc_feature (1275)..(1275): n is a, c, g, or t
  misc_feature (1286)..(1291): n is a, c, g, or t
  misc_feature (1294)..(1294): n is a, c, g, or t
  misc_feature (1296)..(1298): n is a, c, g, or t
  misc_feature (1301)..(1302): n is a, c, g, or t
  misc_feature (1308)..(1312): n is a, c, g, or t
  misc_feature (1315)..(1319): n is a, c, g, or t
  misc_feature (1324)..(1336): n is a, c, g, or t
  misc_feature (1338)..(1340): n is a, c, g, or t
  misc_feature (1345)..(1349): n is a, c, g, or t
ggtctgtcccatggagcagtcagtacaaactcctcttgcatcagatagttcatgtctcgtgtatgcatacgcagtagcttgccacagcccacaagcacatttttttggacgtggaaggcgctgcaggggatccgggatttggacgtggacgcggacggcttcgtgctgaacaccttagacgacctggaaagcggctcgacgacggttctcgcggaggcgccgggcaaaaaggtgatcgccgtcgggtccgtctcgctgtgccgctcaccaagtctcgaccctcggtccatgtcgagtgacgccaggcgatgcatggcgtggctggacgccaaggacctcaagtccgtggtgtagtgagcttcggccgggcgcatgccacccgctcagctcatgcagcttggcatggcgcttcgttgctgggacgttggccagaggagggatttataagannnnntatnnnnnnnnnnnnnnnnnnnnnnnnnnnnnnnnnnnnnnnnnnnnnnnnnnnnnnnnnnnnnnnnnnnnnnnnnnnnnnnnnnnnnnnnnnnnnnnnnnnnnnnnnnnnnnnnnnnnnnnnnnnnnnnnnnnnnnnnnnnnnnnnnnnnnnnnnnnnnnnnnnnnnnnnnnnnnnnnnnnnnnnnnnnnnnnnnnnnnnnnnnnnnnnnnnnnnnnnnnnnnnnnnnnnnnnnnnnnnnnnnnnnnnnnnnnnnnctnnnnnnnnnnnnnnnnnnnnnnnnnnnnncnnnnnnnnnnnnnnnnnnctannnnnnnnnnnnnnnnnnnnnnnnnnnnnnnnnnnnnnnnnnnnnnnnnnnnnnnnnnnnnnnnnnnnnctctcctcctaannnnnnnnnnnnnnnannnnnnnngnncnanccttnnnnnnnnnnnncnnnnnnccctcnnnnnnnnnctcnnnnnnctgnntnnnnnnnnnnnnnnncnnnnnncnnngaccgcnnnnnncgttcccgnnnnnnnnnnnnccnnnnnnnnnnnnctnnnnnntctccaanntcnnnncnnnntcntctcnnnnnnnnnnnnnnnnnnnnnnnncatcnnnngcnnnncntnnnnnnnnnttcttnnnnnnnncnnnccnnnnnnnccnnnacngntnnnnnnnntccnnnnnnnnnnntnnncnnnnnnnnnnnnnnnnnnnnnnnnnnnnnnnnnnntantcccncncnnccnntnnnnatcnnatctattcncacnnnctcnnncnnnnnnnttccccnnnnccncnnncncnnnnnnnnnngtctntcccccctccnnnnnngcntnnnccnntccacnnnnnctnnnnncctcnnnnnnnnnnnnncnnncatcnnnnntccttcat

SEQ ID NO: 4319 - DNA, 554 bp, Zea mays
agaaggagaagcaccacaagcacatggagaagctcggcgagctcggcgccatcgccgccggcgcgtacgccctggtgagaacaaaaaaaaccaacctcgatctctttgatcgcctgagccatgcatgccatggtccagttcttgatctttgtgtgtctgtgcgtgtgcatcgacgtgtggctgcagcacgagaagcacaaggccaagaaggacccagagaacgagcacgggcaccgggtcaaggaggaggtggccgccgtcgccgccgtgggctccgccggcttcgctttccacgagcaccacgagaagaaggacgccaagaagcacgcccacaactgatccgtcgcaggctgcctcagccgaagcagcagcacatcgtcgcggttgctgttccatctgttcttccagcctcgtcttcgtctactgtgtgccggccaggccttgatttgaggctttgagctaccgatatttgcatggacgtaggaactgtgttggtcggtcctcggcgttcttgtatcaagatcaaatcaggccttcaataagtgtgtgtgtaa

SEQ ID NO: 4320 - DNA, 782 bp, Zea mays
tctccggcccagacagccacaccaaccgagatgtcgaaccggaggtcacggtccaggcagtctggttcgtcgaggatcactgaggagcagatcagcgaccttgtatcaaagctgcaggacctcctccccgaagctcgccttcagagcaatgcaagagtatgtaactgaagttcatatcgtaatatcgtacgttaccactttatcagctgaatggtatatccaaaatctctactatcgttattaggttattagctgaaaaattagcattaccatgtggcggcattcgctacacattgaggcctaagaaatgtgatctgatacggttgtactggtacctacggccgacctgttagtacgttgttacaacgatcaaattggccaaaatttccagtcaaaagttgaatggcccctactactatattatatatgaagcatgaagcatcccatgcagcaattcgatgtactcacgagcttgtcgatcaaccctttagttatttgcttcatgtgagatgagcttgagccgacggtccggtaaattgttctccctttaatttgccgtcttccccatgcaggtgccatctgcgagggtgttgcaggagacatgcaactacatcaggaacttgcaccaggaggtggacgacctgagcgagaggctgtcggagctgctggctacgtccgacatgagcagcgcgcaggcggctgtcatccggagcctgctcatgtagctcagacatctcgcagcattcgtagcctaagtagagtgatttttttttgtacttgtt

SEQ ID NO: 4321 - DNA, 468 bp, Zea mays
agcctcgtgttggcgacggcgaggaggttgttgatgcatatgtcgcaggagaaaccacttcccggatccgacatccttacgatcggaactctagcaccggtgattgcctacatgagtttcattgtcagagactggagaggaactctagcactgaacgcaattgcaagaagaagtagacaagaacgctgcgtgattcagttgcaaaattcaagggaaggatttacctccacgttctcgaaaccgtcggccctcaacacgtctgctagtctcacaagaacctcgaccgcgctctcggcgccggtctccatctcgagacagacgtccacgtcgctgtgcgacgtgccgaacgaattggcgcacgatccgtagagatgcatctgcgcgtggggacactccttgcggacggacctggcgagggagtccacgagctgctcctgcttggacctctgctctcccgacggcttcagg

SEQ ID NO: 4322 - DNA, 376 bp, Zea mays
ggcgttacgatgcttaaggttgaaaggggaagaacgcccaaggatgatagatgttgcgattgaacttgaagcactgagaaggctgatgaaacaacacttcatcttgaagaacgagtctttgcttcaggagtcatgttgcaatgaagaaatgagcatcgacgcaccatcaagtttgttccttggcgttgatggcatttctgacgatgaaagcatggagatcattccacttacatgtccatccaaaattctcacatcctatccctaactcgcaactgtcacaaataaaaaggatttttgctgacttctaccttctcaattgccaattccgtcttagtaatctcttcgtcttatgattagcttccaacgtaactacccg

SEQ ID NO: 4323 - DNA, 754 bp, Zea mays
gagcgctagcgtggcgatagctgatgttactatagatgcttgcgtggcagaaaacagtatagtgtaccctcatcttgctgctgatatgataagcttaaatggattctgttcatctgttggaggtcttatcggattctcaataagtggttttcttgttcatgcaataggggctcaagtgagtatcactagttcatctcttaagatttgtttgagtttcgtgcttttgaaatttctttgatgtgcatttatcactgctagaattagaacccctggatatcttcatcttaatctaattcgaagtaatttcatccgatgcattttttctgcataataatcagtcaactttacttgtactgcttctcttttctgtgacttgtcaaatgtaaattagactgacagttaccattacttggatggtgctggtatatttttcttcctttcaaaatgcatatggtgttggtatctgataatggataaatcttgcctttctcaagggtgcccttggcctgttaaccataccctctgccttggtaattttatccggaactctgctaaaggaggttcatatccccaactttccatacgagcaggttaggaatgttgttgttcttgttttctatgagaccacatatactctcatattactctaatttttctttcctggcatggcaaattcaggcccataagaagttcgtagaagcaagtgggaaaatgttaacagctttgaaatgtcctgaagtatggcgaccatgtg

SEQ ID NO: 4324 - DNA, 386 bp, Zea mays
cgcccgttagttgttcgcggaaatgtccctccgccagctgcttcaccaaacgcgtccgtggcgcgcgcttgagcagcccacgaagatgtcttgtctcctctccatcttccgtgcgctctccattctccgttctgaaggctcggctgagccactgcgcagatcttcatctgtgccagccccgctgccaagaagcttgccttgctccagctctgacccccttggccccagattcagcatcgacgtggtcgactcggaccattggccctcgtcatttgacttgttgtccgacgctgcacggagcaatgaatgcccagatgtcttcgagcaacatgaggatgatgaactgcacgactctgatgatgagatagatgacatgaggcatcgaa

SEQ ID NO: 4325 - DNA, 560 bp, Zea mays
gcttgctcgctcgcttgctttcgttgctctctctacgcttcgctagagccatggccaacacagattcactacccagcgcacgacacactaggagtccactcgttttttacagcagccaaggagcagcagccaaggagcgggggggtggggccggcgcctcgaggaggacgaagcgaagcgccggcgacgcttcaaaatgtggcgagcttctttcatttgaggtgtggccgccgccataatcatcgggtcaccgagctagtagccttctcgcttggttacgattcctgagcctcggaccggtctctactacgttactgcaacaaggttgaggaaaccactagggtcagctgcttcaggcgaaggaagcatgtggcggtttcggaaactctaatgtaaagatgctctgctgctaaagggggaaaaaaggttgcgacgagcagttccaggttcattctgactatgcaaatatcgctttgctgggccgaaaggttcgcttactcgggagctgcagtggtctcgctgaatggtggtggcctcgtgttggaatggttcttgtaaaa

SEQ ID NO: 4326 - DNA, 399 bp, Zea mays
  misc_feature (392)..(395): n is a, c, g, or t
tagcagcctctactgcctccacctctttaatccttgtaccttcacagtgaacattgacgacgagattcctgagggtggagaggtggctgatgccgaaatcaggagaaccaaatctgcgtgcagtatgcatctcgtgcgctatgatttgaaactcaagagtttcaagcgctggaacagctccttctttgaacatcatgtttacccagccaacgaaactgaacttcttcagacatcggaatccatcgttgctgacgacaaggcacattgggcacattgcctcagatcctgctgcatttgaggacaccttcaggaattgtaaggcagggaaatctccgaggatctggagagtttcttgtctaactttaacctcaacgtccaggtaggttaggttnnnnagcg

SEQ ID NO: 4327 - DNA, 399 bp, Zea mays
gattctctatcaggtcgcccagtgaatgggacctcgacgatcgagcgggagggtgcacgaggaacaaccaactcgattgcgccacggacaggttcttgcccgtgcctggcgttcagttggcctacgaccccgtgcccatgaaagcaactgacgctgatggatgtggccaggcttgtgccactgattgctcttgcactgcttactcatatgctagcactactggtggtggtggtggtgggtgctctatctggcgtggagaattgcttaacaccgcaacagcaagtaccaccggcgacactctctaccttcgcctctctgccaaggatctgcagacgctaagagagaaccaaagatcaggccgcccatctaataaggcgacagttgttactgctgcaagca

SEQ ID NO: 4328 - DNA, 391 bp, Zea mays
tggtgggcttggccatcgtgtcagtgactgtccgaagttggagcatcaaaagtccatggcaattgctggctcgagaaaagactactttggcggcgggggttaccgaggagaaatatgattgctctaggttgatgcttgcgtgtggttatcagaagctaagatgctgcaatttcaggtcatacatgtcacatgtatcagccaccagaacatccttcctcccccatcgttgaagggagacggtctgcgttaacgaacttgtgatatgctgctgggtatgacactgcttgctactgacctaccatatatcttgtttgaaggacgcaagttgattatcctgccctgttgtaaaatgtaaccagaacaattgctggcgtatttcttaagcaccagt

SEQ ID NO: 4329 - DNA, 1356 bp, Zea mays
  misc_feature (1328)..(1328): n is a, c, g, or t
  misc_feature (1347)..(1348): n is a, c, g, or t
gatctttgacttctttggtgagcaattaaaaacattacgtctcgcattcatattcattacgctcacctattgtttttgacctctttttagcagcatacaaagagacattgctgagtgcctttcatctcatctaattactggtttccacttatgacaggttatcatataccaacagaagcttcgcttgctgtagtaactacctgtcttagtggaggcgtcatattaagtcttaggaaagcatcaaaagttgagggggacaagtagactgatgcaacaacacatgcaggtaaaggaatggatcagcttgctccattttttgggcagataatgaagttacaaaagaaattatgataaacatggcttaaggtgccacttcccttagcgtctgaaatgggttcactttgagctctagaattaggggttgaatatcatcaccatggcttggggtgccacctccctttaccgaatttcaatcatccagacatcatccacatagagcattgtgttgctaatactccctccgtttctttttagttgtcgttggatagttcaatttcgcactatccagcgacaactaaaacgaaacggagggagtaccataataagcataagttactgcgatttccagatgtgtcaagtgacagccatgtttgaaacctacggcgacttaccattgctcggagttttactgattttgttttctgcccttttctttctggtgtttcccagattctcattgcatccgtgtccactagttaattcacaaatgctgcattgtccatgccatatgcatttccttttgaatactcatgacatgaatcgtgagaaaagaaatgccatatgtatttacttttgaatacttatggctgcgacctcggtatagaatcacagaaatggtcaaggcaaggcagtggcattggtgcctgatcctaatctggacgtgccatgagcttgctctgaaacaatgatatgagctttctttgacgatggtacttgtaatgtaacctggcacatgcagtatgttttgagcatgatggattctgggccttgattctatactgcatctcaaacaaatgatacgagctttcttcatcacagaaaagaagatgatttcgttcgttttgagcagtatgttttgagcatgatggaatttaatcagtatatttcgttcgttcatgtaggtaacgcttttgacccgagatgtgaaatgaatttatcctctacgcatgctgtgtaggaccatgtgtgtaacgttctgagaattagtcacagaaaagaagcttgtagaaaagggaagaggaggaagaaagggcattgtgtttagtatnccttgctccgtattggtgnnttagggtg

SEQ ID NO: 4330 - DNA, 390 bp, Zea mays
  misc_feature (352)..(354): n is a, c, g, or t
  misc_feature (359)..(363): n is a, c, g, or t
  misc_feature (370)..(375): n is a, c, g, or t
tcgacgctgtccttggcatccgagaccgcctccatggtgcccctcgccgcgtcctccgcgccgtgttcgacgcgggacaccgcgtccttggctccctcttccactttcttaccggcgccgcagagtctatccttgcaccgcttgacggtaccgaggacaccgcccttggcgctctccttgacgtcggacaatctctccttgccttcctctgccgcaccggccaccttgccggccgcgtctgagaccacgcccctggcctcatcaaaggttccgccgtcgccctcgacgccgtccagtgcgtccgggggcaggacgcgcgtctccttgaccttgacgctgccgccgccatcgnnngacannnnnagctcgnnnnnntactccacgattacc

SEQ ID NO: 4331 - DNA, 395 bp, Zea mays
cgcggccgtggctgggaaacggtggccggcgccatccttgaggtggtgtgacgatcgacgacgtgcatggcgtggcgcacagagctagtaataaaagggtagtgtacgcttaccgcgtacgtacgtgtcaccgggcgtggcactctccagtctccagggacccatccaccaagtgctactgctccttcgtagggagacgtgggaataaagagtggtagctgcatgcacgtacggcggccatggctctccgatgagagagctagctgtgtacgtgtgttcgtgatgttgttccatgcatgacatgtatacgtcttgcctaagtacgcttgtactagttgagagactgtgtaagtgaaatgtgctataataataaataagtaaagggcgccttctcc

SEQ ID NO: 4332 - DNA, 397 bp, Zea mays
atttaatttcttggctctttacactgacttaattgcatgcattaaccacagcgtgcggtccgcatctgctcaagtggacgcattcacgttattatttctgctgtggccaccgcagccgaagctgcagttgcagttaagcttgtcggcctgcacgttcatagcagcagcagcagcccccgccgccgctgctgccggcggagcggtgagtggagctccgaagcaagagaagctgctgcggtgcgtcgactgcatcagtgcgtcaccgccaccggcggagactgcgtgaccgatgacatagtcgccgaccgcaggctgacgaggtgggcccgggtacgtcgccggcgggtagctcatcgggtgcagtgtggatggcgccgtgtagaggtaatggtacgaa

SEQ ID NO: 4333 - DNA, 646 bp, Zea mays
ccctgatgcttgaaaatagctgtaccatgatttggcatcagaacctatcatgacttctacaatgatctaaatgaaaacaattgatggacaacatcaccatggtcctcacacctgccactttctctcggccagcctcatataactttagctcaacattcctggaccagtgttgaaagtgcagcttaaagtcaacagtttcatggccttctgtcataataaatgtgtgaacgttgaatgacctgccttgggagtgcacataatcctatacatgacaacagtttaaaaggtattggtttcagacaccgagtgcatgtagtaatagaagaaaggaatataatgagtttcatgtgcttacttccaagacagcaacagatgacttcctctctgaaaccagtgttgtcatccccatccataagaatatttcagtgctgcagtccagcatgtaacttctgtctgagttcagcatttctctatccaacgggtgtgcctcgagtggaacaaggtttttcttattgatcctgcaggcaggaaagcatgccaaacatgtcgcggcaacttcagggttcaggctagttaagcttaaactgaacaggggagtagttaccaaaaaagtttcttagatggtgcagttagtggctcttccttg

SEQ ID NO: 4334 - DNA, 410 bp, Zea mays
gatttcgatgattccatgcttctccccggtattattatcagcccggaggacgcaccacggctgctgagctacatcaactccagcacggtgccaacgggcgccatgaagttccagcagacgatcctcggcacgcgaccggcgccggtggtcacgcactactcttcgcggggcccgtcgccgagctacgccggcgtgctcaagcccgatatcctagcgccaggggacaacatccttgcgtcggtgccgcccacaattccaaccgcgatgataggccaaacgcgactggccagcgacttcctggtccagtccgggacgtcgatggcttgcccgcacgccagcggcgtcgcggccctgctgcgcgcggtgcacccgagctggagcccggccatgatcaagtcggcgatgatgac

SEQ ID NO: 4335 - DNA, 367 bp, Zea mays
tagcagcacagacactctgccgcacgcacctgcgcttgtcgcttcccctcttgctatatctcctgctgcttttgctaaagccggaaaccaaaaagaaagttgagcttttcgtcacaattttgctttacttattaagtgctagtccgttttgtttatacgaccttactattagcttctgagcccggattcaaagtgctacagtgcgttttcactaacaacatttaggattatagcacatcaaacttctttaaatttgactagtgttacaaaaatatatattagcatcatacatatttagttaaagttaaaaatatttaatttgtatgaaaaaaacaagagtgacactctctatgggataggccgagta

SEQ ID NO: 4336 - DNA, 584 bp, Zea mays
actactaccactaaattactaatcaggcaggttgaccttctctagcccagacgaaacccaagagggcccaattccacaaggggctcacgtcgtgtccttgacgagcggcttcaccttgcgcttgtgcccgaagctgttcaccaggtccttgcgcgcgcaaaccgggaacaggtgaacgccgggcggcctcaggcgcctcaggacgtagggaaagctcagctgatcccgggacgtgaacctgaccacctcgttgaaccaggcgcacatgaagaggttggtcagcggcgcgtggttcctcacgatcactgaagcttctgcgagagctgtaaaaaaaaaggccaaaaagaaattgcattgctattaacaggcggtcgacgaccaccactggaaaaggatgtgcatgatatgaaaccatcaattatgaagcgaagcattatgttcgtttcacttctgcagtggttcccgttctaccaatcccacaattgtgggggcttctggtggaatgcgtgtatcactgtttcaggggcagaaaaggagcttgcttttatgctaaacgcgtgcaactggcccaactttattacttg

SEQ ID NO: 4337 - DNA, 756 bp, Zea mays
  misc_feature (682)..(691): n is a, c, g, or t
  misc_feature (707)..(709): n is a, c, g, or t
  misc_feature (740)..(744): n is a, c, g, or t
cgctgagctcgtcgagggcgcagtggacggcgaagcagaacaagctgttcgagcaggcgttggcggtgtacgacagggacacgccggaccgctggcacaacatcgcgcgcgccgtgggtggcaagtcggcggacgaggtcaggcgctactacgagctgctggtgaaggacttggagcacatcgaggccggcaaggtggccttccccgcgtacaggtgccccggcggctacgacgacgccgacagcgacaggtatggttggatcccattgggttttcgcgcgcgtttactaccgcgtcgtttccagttttcagccatctacttatagacactaccggaatcgcgttttttgccgagtgtctaagacactcggcaaagactattttacattcggcaaagactttaacgagtgtaacactcggcaaataacactcggcaaagatttcatcggtaaagggttctttgccgagtgcttttttttggacactcggcaaagactttgccgagtgttaaaaagcaatcggcaaagaaaaacactcagcaaattaagaatcgaaaaaaaaacagcaaaacattttttaaattctatgaacaactctctaaccctaccctgttaccttactcgttgtcatatcatttttcactattattttgaatcaaacttatatgttttgtaaatggtgnnnnnnnnnntcacaacctctctctnnngcataccctcctataccactacactactacnnnnnttatgtttatat

SEQ ID NO: 4338 - DNA, 374 bp, Zea mays
ggacgattcacatccgcaacaagcagcaacgacgcgctgtgccttgctcaggatctgttccatgtctgccgtcgtgccttgtccgattcttcggtgctcccgggcacggagaagcagcgtgccagcgaggagatcttcctgctgggatgggagcgcatgtgcaaggtggtggagatggagctctcgctcatgtacgaggccctgtacaccaaggccatcgtgctgcacacctgcccggttgcaggctacctcaaccgtctagtgtcgcccctcgccaccgctgccgcagtgttgctcttcaaccagtatatcggcagccgcagccgccgggccatcatcatcaggagatctttcgtcgacatcacctacctctt

SEQ ID NO: 4339 - DNA, 776 bp, Zea mays
gcgggcacgacgtgtccaaactcaaccacgcgctcgctcaaggcacacgccaatccctcccagcgcaccgctctcgtcgaagcccgcaagtacgttgccttctacaccctttcgcccagcgctcaggccttgaagggtccctttctgtgtgtagcttgccttgaagggtgtccaaacttgtgttttgtttgctctggatttctttacctctctctggggaggagacaagttgctgcaataacgttatgctctggattctgaatcatgtgccttcatcgttaggttgattttcctgattcagaaagatgatcgaggcaatctacgagtaccgaggcgaggatccgctccaaccgtggctggagtaagcgattctcgatgcctctctttagctcgcctctttcgatttgttcgttcgtggttgctaccctagccgaaagattgcttatctcttctctgcttcgtccgcgcgcagctgcatcaagtgggtccaggagtcattcccgaccggcggcgacagtgcgtgcggaccttatggcacgacgagcgctacaaggacgacatccgctttctcaaagtgtggctggaatacgtgagtcgtgcgatggcagcttgattttttttcctgtagttttagtctgtgcagtgaaggcatctcacatatcattccgctgccgatcttgttctctttgtaggctgggaactgtgctgatgccgaggtaacatacaggttcctggaggccaaccagattgggcagggccatgccatctactacatg

SEQ ID NO: 4340 - DNA, 732 bp, Zea mays
aggcccgattgctgaatgattggtttgttagcatcaaggtaattttgttggacccttagaaagttattccgttgtgtctcactctttagtctttacctgtctttgatgtgtcaaaagctttacatatgcaacttgaccatacctctttcagtctgattattaattttgataggttgaccgtgaagagcgccctgatgttgataaggtaagtttcttcaagtgctccaatgcatcagttccatttctagccgacttacggctccctttcccctttttcctgtagttagctcgaaaaggtttctgggcgtgtttgtattgggtggcacactaggttctttgttgaatatagcctcacatattttaggtttatatgacatatgtatcggcactgcatggtggtggtggttggcctctaagcgtctttttgtcacctgacttgaaacctctgatgggtggtacatactttccaccggatgataattatggaagaccagggttcaagactgtattgaggtataagcagaagtgcgtagtttcagaagctatccttcatccctactaaatatttactgcatacttaccttcaggaaggtcaaggaagcctgggaaactaaacgtgaagcgcttgagcggacgggaaatcttgttatcgaacaattaagggacgcattatctgctaaggctagctctcaagatgtgccaaacgacctagcagttgtctctgttgatcaa

SEQ ID NO: 4341 - DNA, 563 bp, Zea mays
ctgcaacgcatcagcaagaggagatcagtgtgaaacatgcagcaccttgttgaatccaactgaacttattgacccaaagtgcaaggtaggaatgtatactttgatactgtgctctgccatttttgcctctgtcaatataattgatttaagcgtataatatatcatagaattgtaattataaattgccttcttatcttgtgattttccatgtaggtttgtaagaacactccacgtattcgtgacacggatcacttatttttggagcttcctctattgagagacaagctggtaaactacatcaatgaaacttcagttgctggtttgtggagtcaaaatgctattcaagcaacaaatgcatggctgaaggaagggctaaagccacgctgcatcaccagagatcttaaatggggtgttcctgtcccccatgagaagtataaagacaaggtttgagcatagaaattacgcatttctgtctttaacgaattatccagtttcctcattttgattattttcaggtgttctatgtttggtttgatgcacctatcggctacgtgtctattacg

SEQ ID NO: 4342 - DNA, 438 bp, Zea mays
  misc_feature (408)..(413): n is a, c, g, or t
  misc_feature (419)..(429): n is a, c, g, or t
ctagtagataggataggaaatgggtatggattacgtattagttgctgtgctgtttgcgagcgtttcgatcaaaggctaccgccgggatcgaggggcttaccgctcgtcggagagacgctggagttcttcaccgcgtcaccgaccctcgagctgttgcccttcttcaagcgacgtttggagaggtaatgaaataatatatactacctctgtttttttatacatgacgtttcctagtttaaagatgaactgttaggcgtcatgtatttagaaacggagggagtactatagattaagggattaataacgaaacaaagaatacaaaacggaacaggtccaatttcgacatgaaagtttcatactttcatgtaaacatagcatgatatggaacaacaacatttggaaaaacannnnnntagccnnnnnnnnnnntcctaggta

SEQ ID NO: 4343 - DNA, 689 bp, Zea mays
tgcagggagcagcgacgcaaagcgccatcatcgcaggtccttccggcgacgacaataataatctcctagagtggccaccgacgtcgacgctggactccgtcgtcgtcgacaacagcgctcctacgcacaacgccgtgcttgccagcgatcctactactactgctacaagcggcgtgcaagacgacgccggcgctgcaggtacgtcgtcggcgaccgcaccaaggtcgtcgtcgtcgtcgctagactgcaccggctgccaggttcttcgagaagttgtgcactgcaacggtagacacacacacgtgcgctatatagctactactacagtaatatatagtaccaaattaattaatggcatacttacatatcaaacacacacttacgtctattattggctgcgaatttctagggcttcaagcaacaaagttgggtatccatggggtcgccgccggcgtgttccaccatgcaaccctagagttgtatcgcatagactccaacggcctggcagcgacaatgacaacacaactgacgcatcagtcctacgtggagtaagctgtttggactcctactagatttattcatttatttttcatgcatacatacacgtgatctgagcagctaatagctatagtaatctgatgatctgagcagttttagtggccgggactacgtgtgggtgaagcactacc

SEQ ID NO: 4344 - DNA, 720 bp, Zea mays
  misc_feature (563)..(609): n is a, c, g, or t
  misc_feature (617)..(622): n is a, c, g, or t
  misc_feature (628)..(632): n is a, c, g, or t
  misc_feature (637)..(715): n is a, c, g, or t
  misc_feature (717)..(717): n is a, c, g, or t
agttgattggccttgctgtgcacaggaatctcttgtgtttgtatggattttgcatgacctctaaagaacggttgcttgtatatccatatatgccaaatggcagtgttgctgaccgcttgagaggtaactcactcgtctacaacatttcaatgttaatgaagtctacaattggcattctgtgcaagtcttttgcatttcttgtaaatattttgtttaacattatgtgttttggttggttctttgccacggccatatactctgcttatatatccttatacctttgtaatatacggggttgcaattttcatattatcgcaatggaaaaccatctcttgattggagtaaacgcatgcggattgctcttggcgctgccagggggttactctaccttcatgaacaatgcaatcctaagatcatccacagggacgtcaaagctgcaaacatattgctcgatggaaatttcgaagcaatcgtcggggattttggattggtaaaacttcttgaccgtcaggaatcgcatgttaccactgcagtttgggacactattgggcatattgctcccnnnnnnnnnnnnnnnnnnnnnnnnnnnnnnnnnnnnnnnnnnnnnnntcaagaannnnnnccaatnnnnnatccnnnnnnnnnnnnnnnnnnnnnnnnnnnnnnnnnnnnnnnnnnnnnnnnnnnnnnnnnnnnnnnnnnnnnnnnnnnnnnncnttg

SEQ ID NO: 4345 - DNA, 436 bp, Zea mays
ggcacgaatctgttagctaccaaatttgtcatagtatggcctcttttgttaccagatctccgaacaccgggtcggtgctcaggtagaacaaatatctatctaccgacagctcgtatcagttcctaacctgatccatttttcagatctgactggaagtccccaaaaagcggtcagttgtatcaaacactaagattttagcgaactacgagagtacctccacaaactcactgccaacaccagtgcaccagccatgccagcgaggatctgcaagtagttctcaagttcagcatgctgaaaagagaataggacgcagcaaataaatgaaaacttcgattcgaaccttagcatctctgctgaccccattagaactccagctaagcattgacttcactgacgcccaacaggatgactttggcataagaataaccacagtgta

SEQ ID NO: 4346 - DNA, 382 bp, Zea mays
gtactcggggtccaggtacccgcaggtcccctgcaccagggtcatgaactggctcttgtccgccggcgccaggatcgaggccccgaagtccgacaccttcgcctcgtagttctggtccaggagtatgttggacgacttgacgtcgccgtggaggatcggtggcgacgcccacgagtggaggtagctcaggtaggacagcgccagcgcggactcgagggcgatgcgtatccgaaccgagaagggggcgctgcgagagccaccgtcaccatggatgaactggaacagcgtgccattggggatgaactcgtagactagcatcgggacctccacttcgaggcagcagcccaggagcttgacgatgttcttgtggttgatctgggag

SEQ ID NO: 4347 - DNA, 386 bp, Zea mays
tatgattttaatgaagaatgtattttgtgagtccacagttaggttgaatctgcttgatgagctttcttcaggtaaaaataaggattcccccaaggcaaaactggatagttctgaaaagaacagtggttgccctgatgttgatgcatatgttcctggcacacactccattgaaaaactccgggaagagatctatagacaagcatttcagtcatattaccaagcatgccagaaattgccagtatcagaagggtcaggtgcttgttcaagtggcttccagtcaggattcaagatgagtactcgtagagcatcagttatgtcagtatgtgcaaaagatgttgatgtgagcttatcaaagatcgatggcggtgatgaaggaatgattagtt

SEQ ID NO: 4348 - DNA, 370 bp, Zea mays
tgaatggaactcccacctggagccgaccggaccggaccggccgagcaaaggaaatcacatgttgcatgggtatgctaacgcagaagctttgcacatggcggggagttgtttgttatcaggtccatggtcgctggaggcttggaggcaattggtagagctgagcatcatgcatgggagggggtgaaaaaaaaggccctggaggtcaggacggggaggaaaaagcaggaacagggttttgaagcgtgtggagttgttgtgaacgagggatggatgatgcatgcgggagtggagtttctgcaggggatgatgtatgatggatgtagtaggctaggctaggccaggttgggtgtgtacaatgcaagcccccccc

SEQ ID NO: 4349 - DNA, 383 bp, Zea mays
cgacttccaggcggtgttcgacaagatcctcgaggtggccgttggcgccaggctggcgccggagcggatggtgcgtcgcgtgttcgtgttcagcgacatggagttcgaccaggcgacggagaacccgtgggagacggactacgaggcgatcgtgcgcaagttcacggaggctgggtacggtgcggccgtgccggaggtggtgttctggaacctgagggactccaaggccatgccggtggaggccgggcagaaaggggtggcgcttgtcagtgggttctccaagaacctgctcaaggtgttcctcgacggcggcggcatcgtcgcccccagggctgtcatggagaaggccatcgcggggccggagtacaataagctgaccgtca

SEQ ID NO: 4350 - DNA, 739 bp, Zea mays
  misc_feature (704)..(704): n is a, c, g, or t
  misc_feature (706)..(706): n is a, c, g, or t
ttttgtaactgacaagatctgtgttgtaataacaggaatgatgtagaatattctacatcacatgacaccatatgtcaacttcaaaagcatattctagtattacacacagttccttatttccattacatcagtatcactctaaacaaacactgcatcgtaaacagaaaaacatctgggctgatacaaaccaagcctctgagacttatcacggccaccagtaaagagccctcgaaaagcacgcaaacgcacttgaaactcattccggatcaatacagtgtcagcaagctacaagttccattcccgtatgttaaggacaaaaatctgaacaaaaatctcagcaaaggccacccaaaattgagtatcaacaaccatgtgctgtgcaggtgcatcaacacttcgcagccccaatcgccaaaccaatctccttccgcacgtgcatcctactgcaccgaaaagtaacacagctgccacagcctcatgactcatgatcacaccaaaataggcacggattcgcggcacgccacgagaccatggcgcggtcacctgaaactgaaagggggagaataacgcatgacgtcaccttcggagcagcggcccttggggatggacgacacggaggacggcacgatgaggcggtggtggtcgcgcacaccgccgccgcccgctgaccccctcgatgtggacggcgatgcgaccgccttctnanggtgcttgtctagcgcgtcgctgatccgtttcc

SEQ ID NO: 4351 - DNA, 398 bp, Zea mays
ctcattctctctcccctcagcctccccccacccccggccgcccccaaattttagtttagttttatctactccacagaagcatactgcacacgtacatagaaaacgccatggactacgtactgcatcatttccttaaccatcgctgctcaattttggcagttttcaagcccatggatttgcacatgatgatgaggagaggagaccgtcgcttccatgacatgtttctccatcgaggtgccgctgccggctcggtcatctcctccccgctgctccacaacggggatttattcgggtcacgggacgtcgtctcgccggaggccagcaggctctacgcgctcctccaacgccggcagcagccttcctccacgcaaacgttcgccctcatgaactacagtaga

SEQ ID NO: 4352 - DNA, 389 bp, Zea mays
ctagcaacctagccaagcgcgaccagggacactcacgggcatgttgaaccctccacctggtcggaagcgagcatgaacccagccagctgatggtcgtcgccctgaaggcgccaacattgtcccgcacgagcccgtttaaccccccgaagcggtaggcacatcgccgttggaaaacgaccgggtatggagatcccactggaccgtcctgttgtcgtcacggaccagcggatccgatctgctaggcagaatatcccatgcggcgccgctcgtcacagacgtcacagacaagacacggcgtcacgaaaacacgcgaccatcccttccctgcagtgcagggtcaacaggttgggaggagcaaaaaaaaactttcataagcgctcccaagaaac

SEQ ID NO: 4353 - DNA, 357 bp, Zea mays
agatgaatagcagagcagggagagaggcagcagaaaaaggaccaaagcacctcatgggcgaggatggaggacgcctcaagccggcctcagacttcgagcgggacggcgggcaactcgaactcggacgcgatctcctcgatctgcttccggacgctcatgtcgatcaagttggagccgtcgcggccgtactgcacggtgaagccggcgatgagcgccgggtcgagctgcgtcttgaggcggacgttctgggcgccggtcatcttctggacgtgctgcgcgatctgcgcgaggtcctgcgactcgagctgcacgacggaggtgacggtggcgacctcggtgccggtgagcgagttgtag

SEQ ID NO: 4354 - DNA, 500 bp, Zea mays
  misc_feature (424)..(430): n is a, c, g, or t
  misc_feature (454)..(456): n is a, c, g, or t
  misc_feature (479)..(492): n is a, c, g, or t
tgaggagataaaccacatgaggaacctgagagagctgctcctggcgttcaacaacttcaccggcgagctcccgcaaggcctggggtcgaacacgacgcatggacttgtttgggtcgacgtcatggggaaccacttccacggcgcgatcccacctggtctctgcaccggaggtcagctcgccattctcgaccttgcgctgaacagattcagcgggggcattccgagtgagatcatcaagtgccagtctctgtggagggcccgtcttgcgaacaacctgttcagcgggagcttcccttcagatctggggataaacaccgggtggtcgtacgtggaactgggcggcaaccggtttgacggcaggataccaagcgtgctcggttcatggcggaacctcacggtgcttgatctgtctcggaacagcttnnnnnnntatctccaacaagacccttcactnnnccaccccaagatatctttgattnnnnnnnnnnnnnngacttttt

SEQ ID NO: 4355 - DNA, 503 bp, Zea mays
gattgaagatcgaaacagactcggcagcagctgatctgtttgtagcatcatcaacatagatcacatcatcaattcttgcaattatgttaaatgccaagctctccagaacccttgagtagcattcaagtatggactgcccgacatcctaaaaacacgcaagaaacaaagtgaagattgtggtttgtgtaactgaaagaaagacttgatcgattttgatttggccagagaagaagtccatggttatttgtttttgcatgagctttaccttgttatactgtatcttgttcatgtcaagggaagtttgtggcaggcctggatatctcaatcttaagctctgcaatagaccatcagctctttcagacaaagtgtggctcttctccttatctccaacaagacccttcacttttccaccccaagatatctttgatttggcttgaggtgtcgactttttttggcctttcagtttccaaacatggatggcaccttctattctgtttgccact

SEQ ID NO: 4356 - DNA, 425 bp, Zea mays
  misc_feature (412)..(414): n is a, c, g, or t
ccaggtttctgttcttgatctctcagggaacctcatgtccggcgccctccccggcaggctcttggccacggcgccggccagtttgacacgcctgagcatcgctgggaacaacttctccggggacatctccaggtatcagtttggtggctgtgcaaatctctccgtgcttgatctttcgtacaacagactgagcgccaccatagggttgccaccgagtcttgccaattgccaccacctcagggaactagacatgtctgggaacaagattctgtcgggccgagtaccggagttcctggggggcttccgagcattgcggcgactcggacttgccgggaacaacttcaccgaggaaatcccggatgagctgagcctcctgtgcggaacgctggttcagctagacttgtcaagcaannnagagatttgca

SEQ ID NO: 4357 - DNA, 1131 bp, Zea mays
  misc_feature (1086)..(1094): n is a, c, g, or t
taccccgtcaggtcctgccccagcgcaacaggaagaagaaggcgcgtcccctccccttctccccggattttcatcctctcttcattcgcattccaggtctcatgctgtagtttatgcttctcgttcagcccgtctcctacgcacagctggcccggagcatccacgagctcgccgcgacgtgcgaccaggttcgtccggctgctgcttcggtttggtactttgattataatttcatgatgctggcttggatctgttaactttatctgctcttgtgatatgccttttgtagaaaagttcccagaggcagctcgtaaatagtgtgttccccaagcttgctgtgtacaattctgtggatccttcggtggctccatctcttctcatggtaagcttttcctgtgcccttcctcgactgcttctagctattttgtggaggtaggacttagatcagtcacagatacacaccagcaagcaaggttttaaagtcggctagtcgactctagtcgcctgagcaccgataaggtgactaatcgcgattagtcgtcgatttgctcgattagtcgactcctagtcgtccacctatagccgacccacataatagaggccggattagcggcccaaaacagacataactagtcgaccataacccctagtcgaacgactaatcgcgattagtcggtaactaggacgactaatcgctacctagtcgctctagtcgagtcgtagaccctaatcaagcttggactagcgataaggccgactaatcgcgattagtcggacgactttaaaaccttgccagcaaggataacactgtaacggcatgtgttaaattatagtttttctcaactggattcacacctttgcatgtcttcaacagaaattagatacttagataaatgtgttgtacagaaatcatatacttagcatagaccatggtcatgataaccttcaatattatcgattattttaggtattttctctctatcattacttcgactctcctttgtatttgcagctccatcagcaatgtgaggacagaaatgttctgcgctatgtatactactatctggcccgtatactgtcagatannnnnnnnncagggtttaagtgctgctggtggcatacccacgccca

SEQ ID NO: 4358 - DNA, 495 bp, Zea mays
gcacgtccatcctagtagtttgcactttgcagcgacgccatgaacgtttttttgctttcaccagcttgattgaaagctttttggcgcaaatcaactgaaacgtgctgctctatctgatgtgtttcagggcggcatcattctcggcccgtccatgctgtcacgcagcccggcgttcaaggagacggtgttcccggcgaggggcgacccggtgctgcacaccatcgcgacgttcgggctcatgtacgtcatcttcctcatcggcgtgcggatggacccgatgctcgtcgtccgctccggcaagaagggcgtgatcatcgccctctccggcttcatcctcccgctggtcatgaccaccgcgggcttatccggcgccgccatggtcgaggaacccgacgtaacgaggcgttccacgttcctgttcgcgctggccacgtcgctctcggtcacgtccttcgcggtgctgtcgccgatcctgtcagagctcaacctcctcaa

SEQ ID NO: 4359 - DNA, 290 bp, Zea mays
cgaattcacaatcctcacggaccacaaaagccttactcagcttaacgagcagcgcctgcacacgccctggcaacacaaagtcttcaccaaacttttgggcttgaattaccgcatccagtacagaagtggctctgacaaccatgctgctgacgccctgtcacgacatagttttgcagaatgtcaagccgtctccgttattttccctcaatggctagttgccgtccaagatagttatcaccaagataaacaagcactttccctcatctctaaattggttgttgacctagcgg

SEQ ID NO: 4360 - DNA, 499 bp, Zea mays
  misc_feature (453)..(456): n is a, c, g, or t
aaaggcatgcgactttctgttgtcaaaagaacttccttccggtggttggggagaaagctatttgtcatctcaagaccaggtaaactcactcagtcactcctgtcagtttctttaaaataattgcacttaacagtattatggatatactggcaatgttttttcatcgcctgtgtggtacagtcaagatttttgggggcaacctgcttttattagatttatgtaatgtaccaaacctagagaaaacctgtctatttagagctatcgttttatctgaagaggttggtacgagtagatagcagttgaaaagtaaacatgccagtcatttaaaaaaaatagtcatatgcccgtgtattgctacggtttttatacatatgacatgggataaaataaaatttaataaagcacaaaatatatgttttctattgatttagagggtgtaaatgtggagccaannnncaagattcaaacactcacttatacataatttcaacttattttt

SEQ ID NO: 4361 - DNA, 374 bp, Zea mays
tctgctgttcaagaaaatgctggcattaaaggtttggcctaccaatgcgacgtattcttgcatcctgaaggtgtttgatacgcccgatttgctatccgttggaatgcaacttcatggctgcttgctgaagatgggaacggaggttgacactgctttggggactgccttgatgacgatgtatggcaggtgtggtggagttgatgagatacctaggttggcttgtcgtataaggcatgatgcgctttcgaggactgccctgcttggcgcttatgcacgtactggatacaatgcagaggcaattggtgttttcaaggagatgatcatgaaaaatatggcaattgaccagtcagctatgactggtatgctgcaggttt

SEQ ID NO: 4362 - DNA, 379 bp, Zea mays
ggtaggtcatcagtgaagtctatcaggagctcagggagaggtgaaggcctaacagaaatggactgcaatcccttgtcaccaccaaagctgtttgacaaggattcgtatactttgccatattctgagcatgcttgcttttcagagctggaggattttatgcatacattgagtccattgacagtcagcggcatcgtcagctcatcgttctgctatgtgaatccccgtcaccacttcagacatctttgtttagacaataatgttaatgatgacactgacaggacgcccataaaaaataagggtaaggataatgataagctgacaccaaagagttggcgaaatggttctgtgactccaaaagaaaggaaggtcaggatctcca

SEQ ID NO: 4363 - DNA, 371 bp, Zea mays
cagtcgtgcgctcaacataaaccctcgtcacccccacatgccaatcttcgcaccggctgccttccaagtgttaaattaccttgatgaacaaagccctcttgcaacatagctacatgcctccccttgacaacaaaactttagagcaggcacttatccaaagtacaatggcagtgtaaacacaactcagtacatctataaaacactaatttcctactttccatttctgtccattttacaaaaaaaatcctaatatttatttctgatcttaggacccaccatttttgtgagtcatcaaatgactcgtatcaatatcttccataccataccgttaaaggacaccaacacaacacgaagccatatgtaacactccc

SEQ ID NO: 4364 - DNA, 608 bp, Zea mays
tgtccgtcagctccgccgcctcatccagcgtcaggttgtggttgcacccggtgaaggccagcatgtccttctcgtatctgacgacgatcaaggcaaaccaatgcaagttcatccattgattgatctgcagataatagccggccaccgaacgctgtgaactctcagctacctcaggtgaagcgcgatgtaatgctgggactcgtttctcagccgatcaaccagcgtgttgccgagctcttcgatctccttcctgtactggagcgcctcgtagttcgcgcggcaccgaagcttttgcagcgaaggagcgaggccgttgttcacgatccgtgaatccgtgtgtgtaaacctcaccactttgaacttcctcaggattttcgcaaagtctctgtagaaggaagcctggaaaacggagctggcgatgcatcagcctattcagtacgtattcggttatcctctaagctgctgcaactgcaatgcaatccagtagagcaaacaagttgttgactcgtaccctggaccaggaggtgggcgctctcacgtacggtttcacccttctgtaatgtggtgggagggaatccacgatcacaatgtcttccttcaacgactcc

SEQ ID NO: 4365 - DNA, 573 bp, Zea mays
tttgaggtatccggcaggagccaattcagggctgagggctcctactctttcttgttccaggtagatacgtacgccttattccaacttttgtcatctctggctctatgctagtttcctcaactagaaccaactcttaaagcgcgaacatgccgttgctttataggactacaattgtagcgtggagtttttccgctcccctttccttgttcaggaatgggagatgccaatcagcaacggaaagggtacccgggaaactctcaggcttgacgtcatcgatccagcgttcccgaggtacaagaacgcagatatcattatcttcaacactggtcactggtggacgcatgacaaaacttctctagggtgagcaaaacaacgcactgcctgattcactgaagatctgtgcagttcacacatcctgcatttccatttgccatgtactgttctgattattttttagaaaaaaaaaacgtgccgcaggaaagattactaccaagagggcaaccgcgtgtacagtgagctggacgtccacgatgcctttcggcgagctctcaacacctgggccaagtgggttga

SEQ ID NO: 4366 - DNA, 483 bp, Zea mays
  misc_feature (473)..(479): n is a, c, g, or t
ggccgccgtgccgccgacggtgtccgcgacgaagccctcgagcgggtgcccgtacagcgcgccgaaggcgtagggcaccacgaggcggtggtgccacgagtgcaggttccggtagaggaacctgctggcgtgcatggtccggtggcacgcgtactgccacacgtcgaagaagaccatggccaccaagatctggcaggctagcttcaggtacgacgatgcttcggtcgtcgtactgctggtgctccctcagtccctcctgtgagctgtacgcatgcatgcatggtgcggatgtatatatagaattatagattagtatatatatacatacacacataatcatgcaataataatactagctagtacgtacactactcctacgtaccttgaacaccatggcaacgatggtaacctgcacgagctgctgcttgaggacgttgccgatgacctgtcgcttcgacacatagttcttgctnnnnnnntggg

SEQ ID NO: 4367 - DNA, 1041 bp, Zea mays
  misc_feature (985)..(993): n is a, c, g, or t
  misc_feature (1017)..(1021): n is a, c, g, or t
ctcccttcgtcgcgctggtcgctgccgcctccccctcgtgttcacactcctctaggcgcctcaggcctcacggtcttcgtcctcgcctcggcgtctcagcctcgcgacccgcgtggagctcacggcggcgaccgccattgtagttcccggaggtacaaagctcgcctctctctcctcgcctggaatgcctagctagctttcttcgcttctagcgtttctcggctcccgtgtattgtaatcattatcacgcgcgtttgattgctttgggctttggcatcgtcccgtgcagttccttcagcatttgtgatttaggtgcttgttcaagtgctgcgattgggtgggagcctgatttggtgcgcaaggtgcataaaactcgcacacgtgcacgcacggcgcgctctgaggttgggatcgggagtagcggcaggtgtttcaggtgatcctgtgtttccgctcggctagaggtcctgtgattacgacagatttagggcttaggggggaattggatttagtgagcttactatgggaagagtactctttgggctaagtggagtttctgatcgtcagcttttgcatgccttgagtatgataattcgttgttttcatgcctaagtttctacatttcaagagataggaacgaaagtactccgtatgcgcgatttaaggtcaaatacattcgacaggctatactggcgatcactttatgggatgtgcttttatatgggactgtctatgtttccttaagtggagtaagacccataaatggcgtctgaaatttctttaagctgtaccactttttttatggtttggtaagttctgcagctaaaatagagtcttcaatcttgatacaggtcaatgaaggagtcagtgccaatgtcagtaatcagcagtatttcaaacttccgcacgctgtctaccagcagtgtggtagaaactgagctagttaagagatactgccggaagatcaatgaaatcctgggtcttnnnnnnnnngtcctggatgaagttctcacccannnnnagtctggatgataggatgct

SEQ ID NO: 4368 - DNA, 369 bp, Zea mays
tcttcttcttctctctcctccttggggataaattaataggtctatcctcaactatacttacaatttattcctatatatcgatatattgggatcaatatattgggatatatataaatatgtatatcaatgaaactgatatatacaaaatttgattctttcaattctttgggtggcagccacttggaggagtagctagtgagtgtgtgggagcaagtagagtagtgagcagtgacgagtgagtggtgggtgttctctgaaatgtgatgaaagcaagggtagtggcaatgccatgccatgccatgccaccactgttctcccaacttgaaactgagtgggtgcaatgttgtggcctgctactatcatatccac

SEQ ID NO: 4369 - DNA, 337 bp, Zea mays
ttttcatagcagagcaagggacatgcatgcacacactcgcataaaagcaaaataacggtgcttttttttactgcaaaacacgaggataataataatccgatcgaaacctaaggggccagactatcagagcaaagaagaaaaaaggagcagaaaacgcaccgctcccaggatccgccgggaaagcgtacgagttcttggactgcttcctcccgatcctcgggaagcagccgacgttcccggcgtcgccgaacacgctcttggcgttctcccaccaccccatcgccggcgcacgcggtggcagctgccgctcctatgtaaatagtagtaactcttatcg

SEQ ID NO: 4370 - DNA, 521 bp, Zea mays
ggcagcggaggatactgatggggacgcgctgcgagctcccgcggttcagtgggctcatactctatgacgagcacggccggcccctgcagagcagctcccagaacagagcaggccacctgacgagcagagcaagcagacacgagcccaaggtaaatggatgcatagcgctttgcgaactcggttttgaatagcgcatgcgtttttcagacgtctcaaaaatcaaatcaaatcaaatcaaatcaatcctgttttttgtcttacagggcaaaaagaaggctgccaggacaaccacaactctcagggacctcctgtagtcagttacctcctctcacatcacatgctattgcctcatttactggtagctaaaaatcgcgcctttgcaagtgctcccaggctcccagcaaactactgcgtttggtcttcccctcatgtaaagcgtgaaccattgaaggcatgcagattcagatactgaagcgttaatatctatccaaattacggtcagttggtcatcctattccaag

SEQ ID NO: 4371 - DNA, 379 bp, Zea mays
ctgtgcaacgggatgcagcccgtgagcgtcatctttccttacctcccgatccccgcgcaccggcggcgcgaccgggcgcgccgacggctgagagagatgttcgccaccatcatcagggcacggaaggcctccgggcggtccgaagaagacatgctgcagtgcttgatcgactacaggtataaggacgggcgcgccaccacggaggacgagatcgccgggctactcatcacggtgctcttcggcgggcagcagaccagctccataacctccacctggactggggcctacctgctccagttccggcgctacctggcagcagccgtggaggagcaggaggaggccatcaggcgttgcggagataggatcaaccatgacgtct

SEQ ID NO: 4372 - DNA, 455 bp, Zea mays
  misc_feature (104)..(104): n is a, c, g, or t
  misc_feature (122)..(122): n is a, c, g, or t
ttcttatgtgctgactggatactatgatgaagctcccatggatgaatatggtcagatcgactcagttgaccatgatatttctgtttttttatcttaatcatgtntgctcctattgacataanaagcacctaacgtagtccatgaattttcataggtatgtacaaggagcccaaatttgggcatctcagggacttgcacaacgtaataaggtcatatcaaaaagcattcctctgggggcaacattcgtctgagatattgggtcatgggtatgaggttgggaacaacttcttcaatcattttggtttctggaaacttatattattatttgacagtgttctccgaccttcaaatgaatcttctttggtgttgtgattatttttctatattgtaggcacacatctttgagttgcctgaagaaaagctatgcctctctttcctttccaacaataacacgg

SEQ ID NO: 4373 - DNA, 483 bp, Zea mays
gctattagagcaacgagggtggaggaattccttactggtaaatcactcactgcatcagctgtacttggtgcaattcaattacttagagaaacggttgtaccaatggagggaacatcacatcctgaatatagagtcagtgcagctgttggatttctcttcagtttcctatctccattttctaaatgcatcccagagcctggaaagtctctggccagcagttctactgattcagcagatacagatgatgttcgtaatctgccattatcaacacgtcgagaaacattttctagtgacgaatataaaccagttggtgaaccgattaagaagtatggtgttgaacttcaagcatctggtctgtggttacattacagtttttagtattgttatcatcatattctcctaatctttctgcagagcaagattttaattttctattgtgtaatacaggggaggcattatatgtggatgatattcctgctccaa

SEQ ID NO: 4374 - DNA, 1207 bp, Zea mays
  misc_feature (763)..(766): n is a, c, g, or t
  misc_feature (810)..(812): n is a, c, g, or t
  misc_feature (819)..(832): n is a, c, g, or t
  misc_feature (836)..(844): n is a, c, g, or t
  misc_feature (850)..(850): n is a, c, g, or t
  misc_feature (852)..(852): n is a, c, g, or t
  misc_feature (854)..(854): n is a, c, g, or t
  misc_feature (856)..(900): n is a, c, g, or t
  misc_feature (905)..(921): n is a, c, g, or t
  misc_feature (923)..(1065): n is a, c, g, or t
  misc_feature (1067)..(1178): n is a, c, g, or t
  misc_feature (1184)..(1198): n is a, c, g, or t
tgttcatgctgttcttttccttttgtggtctatcaggcgtcctgttttttgtgcatggtatggtatacacagaaatgacagtgagaagtaaatagtttgtcatttgttattaactccctggacatcttttctcagaaaagaagaaaaactctgcataaattgtctaagtggattatcaggagacctgagcatcattgcattaactaggaaatagttcaagaagaacgttaactccaaaacacactaacataaacacccatgaagattggaacctctcaactgtttactgaaacctgacatctctgtaaaacttgcacaactatccaataaaaagagaaagttattgccaatgccatgtatttttctaatactccattcttgtgtacatggaagtgctgatggaatcacacttataatgtagatgaatgtttctaacctcattattatgtttcgtgctgtgtattatctattatgcttaaacaggtcaaaagccataagcactcctgatgtgaatatttcaactgatgatggtgttcatgatgtaatctatgggataacggttagtgcaatcaacaatcctactttttgttactacttatacttcatgtacagtcctactttttgttactacttatacttcatgtacagtttacgtacttgaaccttagtttacaaaaccttttgttttatctaatcatcatggacccaataaatgaaaatggccatcatatttatgttcttttctgacctgccattttgtctnnnntatttcatgacttccatgcccattcctttttactgcaagtatgnnntacaagnnnnnnnnnnnnnntagnnnnnnnnnagtgcngnancnnnnnnnnnnnnnnnnnnnnnnnnnnnnnnnnnnnnnnnnnnnnnatatnnnnnnnnnnnnnnnnnannnnnnnnnnnnnnnnnnnnnnnnnnnnnnnnnnnnnnnnnnnnnnnnnnnnnnnnnnnnnnnnnnnnnnnnnnnnnnnnnnnnnnnnnnnnnnnnnnnnnnnnnnnnnnnnnnnnnnnnnnnnnnnnnnnnnnnnnnnnnnntnnnnnnnnnnnnnnnnnnnnnnnnnnnnnnnnnnnnnnnnnnnnnnnnnnnnnnnnnnnnnnnnnnnnnnnnnnnnnnnnnnnnnnnnnnnnnnnnnnnnnnnnnnnnnnnntttttnnnnnnnnnnnnnnnccccccccc

SEQ ID NO: 4375 - DNA, 641 bp, Zea mays
  misc_feature (354)..(364): n is a, c, g, or t
  misc_feature (375)..(384): n is a, c, g, or t
  misc_feature (410)..(412): n is a, c, g, or t
  misc_feature (424)..(428): n is a, c, g, or t
  misc_feature (482)..(486): n is a, c, g, or t
  misc_feature (500)..(504): n is a, c, g, or t
  misc_feature (520)..(525): n is a, c, g, or t
  misc_feature (529)..(532): n is a, c, g, or t
  misc_feature (536)..(575): n is a, c, g, or t
  misc_feature (582)..(586): n is a, c, g, or t
  misc_feature (591)..(593): n is a, c, g, or t
  misc_feature (606)..(629): n is a, c, g, or t
  misc_feature (631)..(638): n is a, c, g, or t
ggcggtacttggtgtctcagtgactaaccgactattgtaaagtagaaaggtaatctgtgtaggccagaggaaagttttgtggaatcacctacgagttcgtttgttgtaaatcgatgcgtaataaatacgcttctgggagacagagacatactgaatctgaccctaaccccaccagtaagatcaagagctaactctgaactttaggatcccatttggttacgaggcatatccctgtatataattgtcattgtcacggaggttcttatcctttagcagttagtcttctatctgtatcgtaattgatgagcaacatcggttttatatgatgatgtgatggagaagcaaaggtgtaannnnnnnnnnngcacacgtgcnnnnnnnnnncgctctgaggttgggatcgggagtannngcaggtgtttcnnnnnatcctgtgtttccgctcggctagaggtcctgtgattacgacagatttagggctnnnnngggaattggatttnnnnngcttactatgggaagnnnnnncttnnnnctannnnnnnnnnnnnnnnnnnnnnnnnnnnnnnnnnnnnnnntgataannnnntgttnnnatgcctaagtttnnnnnnnnnnnnnnnnnnnnnnnnannnnnnnngta

SEQ ID NO: 4376 - DNA, 356 bp, Zea mays
cccgccggagattggccgctgcaagaacctgaccacgctcaacgtgtacagcaaccgcctcaccggcgcgattccaagcgagctcggggagctcgccagcctcaaggtgctgctcctgtacggcaacgcgctctcgtcggagattccccgctcgctcggccggtgcgcgtcgctggtttcgctccagctgtccatgaaccagctcaccgggtccatcccggccgagctcggagagctacggtcgcttcggaaactgatgctccacgccaacaggctcaccggagaggtgccggcgtcgctgatggatctcgtcaacctgacatacctgagtttcagctacaactctctctccggac

SEQ ID NO: 4377 - DNA, 352 bp, Zea mays
ggacggggttcgaagacatatggactgcattgatgttgtcgcagtaaaccaaagtggtacgatgcaacgaatgacgaagctcagcaagaagctgacgaagccaggtggattcagctacgatgttggcgacagcacggtactcagcttcagcactggaacgagacacagtcacctagcgtctggaggaccaggaaatcaggttatcaccaaggaatactgcaaagcctgaagtggatcggcgtgtgtcaggacacccagcccagtcagcatcagagtaggcaattagctttgcctgagaagaagggcgtagctggagacccaagtgcagagtgccacgaacatagcggagaat

SEQ ID NO: 4378 - DNA, 404 bp, Zea mays
ggagcgcttcgacggtccaaacgtccgcttctgtgcaatcggtgatggccacgaggagtgcagtgctgcgcaggtcatgaaatggccattcatcaagatcgagttccgccctgaagcccatcacaggttccctggcctagacttgcccacagtgcagacctacatggatgtgatatacgagtcatccagcaaagatggttgaccgacgattgatgtcgattctgttttctcctctgacctccaccacccatggagctattgtttgaggaaactgtaagcaaagagatgtcgtgggaaaggaacgtgtcgtcctccctagatctttcaccttggcgaattaggaggcaggtgtgataaataagagtcttgctagttcgtcgtcgtcgtccatgttgtcatagatc

SEQ ID NO: 4379 - DNA, 559 bp, Zea mays
tgcccgtgagttcatggtaaagaccaggcgaaggaaggtaagggatatagttgatttatggcaaccatatattcgtaacttttatcgtagttgatttataagcaaccatataatttgctcccgtaacttttatcatacagtaaaaatccttgtcagtgttatactagccataatgctaactgtatgcaccatcacacttgcagggcatgagtgaagatgtgagcatcaataaattcttcgacgaggccatgatgaatgagctggcccaacaggctgctgatatccacttgcaaatgatgtagtcaaaaagcgagatgaagtgcacacgtggaagatgcaaatgccctcagcttcttcataccatacatgctgcagatgggactgccggagttccagtcgcacctttatgctggcatttgcccctacctgtttcgttttgattaacacattatgattgctgggtatcatgtagcgaatgtttaaagtgggtaccgtatgcaaatcatgtatgtactgtactagtttttacaccatctgaccaatcagcacccttgaggac

SEQ ID NO: 4380 - DNA, 345 bp, Zea mays
gccaggacgcgtgctgcggacagggcccccacaacggcctgggcctctgcaccccgctctccaacctgtgcgccgaccgcagcaagtacgtcttctgggacgcctaccaccccacggagcgcgccaaccgggtcatcgtcagccagttcatgtcaggctcgctcgactacgtcagccccatgaacctcagcaccgtcttgcaaatggacgccgcatttcaccagatcgagtactgactcatcgtcccgagagagtagagacccaaccaacaagcctgctgtcgtctacctcgtttcgttttatatctctgtgactgccgtgcgtgtgtctgtgtacgatcacata

SEQ ID NO: 4381 - DNA, 853 bp, Zea mays
  misc_feature (24)..(26): n is a, c, g, or t
  misc_feature (743)..(746): n is a, c, g, or t
  misc_feature (760)..(765): n is a, c, g, or t
  misc_feature (774)..(779): n is a, c, g, or t
  misc_feature (787)..(788): n is a, c, g, or t
  misc_feature (795)..(798): n is a, c, g, or t
  misc_feature (803)..(807): n is a, c, g, or t
  misc_feature (809)..(816): n is a, c, g, or t
  misc_feature (820)..(842): n is a, c, g, or t
  misc_feature (850)..(850): n is a, c, g, or t
agagctgggaaacgtgatagcaannntggttgcaaatgtgacagagctgggaaacgtgacagagctgggaacacgggcaatggatgcaaatgtggttgaatcgggtgcccagttcgagaacatgaccctgtatgttcaggctggcgaccttggccggcccatccctctgctcactgacctgcctctaacagatgatccgatcatcatattggcgttcacggtcgattcaccaggtgagaaccatataaatactctgctaatagaagctcagatctggaaagttccagagaaacatatgatgcctacaaagggatggagaaactccatacagtttgagccctgtattaggatctgtacatagggacagaatggtgtaagtatgttctgaatctaactaagtggttggtcacactattttgaacgtatactaggattttgcttctcaagaaattttattggttatccatctatctacggtattattattcccgaaaactggatccactggatagatagtatcagtgagcagcaaatgttaagtattccagtttaccatatatgacttcgatagtttttctgaagttcagtctaaagcgctattcatagtttaaggtgtattggcaaaggtaaggttgtattcgtagtttgatgcaggtcgatatggagtgccagtactgttaaaaccaatggtcatgctaaaaacgatgcccaattttaagtgggttaaccaagcttcttacctnnnntatgtgacctagtnnnnnncatttttcnnnnnntaaactgnngctttcnnnnatttnnnnngnnnnnnnnaagnnnnnnnnnnnnnnnnnnnnnnnatactttngaa

SEQ ID NO: 4382 - DNA, 383 bp, Zea mays
gtagaccttctctaccaaaaagctcaataacacatgcataatgcatggcccgtggttttatcctcagattttcagtcatcaactggaaaatcctcttcccttcgtcaacaagacctgaaaacctacatgcattcagcactgccagaaaagttacatggtttggcacagcaccctcagctatcagcctctcgaacatctcgatcgccttatctcccatgccatggtagccgtatccagctatcagagcgttccatgagatcaagttcctcctaggcatcctctcgaagacatatctcgcgtcctccattcttccccatttgcagtacaggtccacaagcgccgtgttcccaacaatgtccagtggcaatcctctctggatcaag

SEQ ID NO: 4383 - DNA, 503 bp, Zea mays
cgtacgatccagagtccggtgccaatgtgttgctgtacccaagcctggtggagcagctccgccagaccgagctcgagaggaaggagagcaagtcgctctccaagatgccggcgggggcggcggcgggggctcaggaggatacgacgtcgacgtacctgcagatgagcggcgaaccttccgctaacgaaccgaagcttggatcctcatcggcgttcagacgcctttgccaaaaagacgctacgtatcggctgtattcgcgcagggtacgtacgtacgtacgtagctcgttcatcatccacgtcgtttgatttggttgttgatcgatgacatatatacatgatgccccactacgtaccaccaggtcaactgcatcaacaggaagatcacgaagctccagcagactgcggctagggttggcccgagggggctgttcgccgtgaagcagaagatggaaatgtacaagcgcgagaaggcggagctttacgacgtgatcaacaaaggaa

SEQ ID NO: 4384 - DNA, 705 bp, Zea mays
tgctacagacctacagctatgaacactttttgagtatctgacatcgtttcttttagcaaattccctttccccttcatattgttgtttcactatttttaaaacattaaatgttattatgaaagatttaggtatccattttgtgtagttaattttgagccatgactagaatgctaaaaggctatccatgtgcctgaaccttgacttgtgggttctgttgggttttaactctagcctatcccaatttgtttgagactaaaaggctttgttattgactggaatgctaatacaatatgaattcttatgattttcagaagccaatataggactgatgttcctcctcaagtatctcaaggtgattccagtgctgtccattttgactttgagactcagagtcaaaacccaccattcaagggtcttagcagaaatgatgtactggatggttcagatagtgctgaagcccaaaacacacaagaaccttctactcgatggggtctaggggactcatctaatttggcatctggccttgaggatgcaaacccttcatatccttatcttcctacagttcttgaggagcctggttcttctttctccgaaggtaattattattgaattaagttcgtattgtttaacgctgcatattaatggatgcctattatgaacatacagctgcagaggatgatccattgccaggcatagaagggcttc

SEQ ID NO: 4385 - DNA, 566 bp, Zea mays
acgtggatgtacttggcagtccctgtcgtcttctatgcctccgagagaagtatcagaaaaattcgtgagcaaagctatcgcgtgagcatcataaaggcggcaatctacccgggaaacgtgctctcactttacatgacgaagccaccaggcttcaagtacaaaagcgggatgtacatgtttgtaaaatgcccagacgtttcgcctttcgaatggtacgtcgtgacaatgccattttccatctgcaatgcttatctagaaaattaaacgaatagatccgttaatgtctgcgctgcaggcaccccttctccatcacttcggctcctggagatgactacttgagcgtgcatatccgtacgttaggtgattggacatcagaactcaggaatctgtttgggaaggtcagttcactgagcacaacacaaagggatctattaaagtttgacatgaataatatgcatatatatatatatgcatgcaggcttgtgaagctgaagtaacttcaaagaaggctacactagctagactcgaaacaactgttgtggcacatggtctcgcagaggatacta

SEQ ID NO: 4386 - DNA, 350 bp, Zea mays
ggcttacatacatggcatacatggctcagcagctcgtcgcccggatcacaatggaggtggcgccatcgaagctgccgtcgacgatggccaggtgcgctaggctcccgaggaacctcgacacgatcgcggaggacgacgacgacgacaaggaggcagcagccatggagtcgacaagggagctgcctctccgcaatgcgagccgcggcgtgcaggtcgtcgtcgtcgtcgacgcccctgtgcactgcgccgacaagctggcctgctacctcgcccccatggccaagaccgagtgcctcaagatcaagatcaaagcctaagtttgtcaggacatagagagagacgagggtgag

SEQ ID NO: 4387 - DNA, 381 bp, Zea mays
cggggtccgcggccttctcagggttgacatggccagcgccagtggcgaaccagtctgccgccacgcgctgttcgtcgaggatgggattgccggcacggtcggtggcatccgcggtggtcatgatggccgacttgatggcggcaggtgaccagcgagggtgcttgctcttgatgagcgccgcgacgccgctgaggtgaggcgccgacatggacgtgccggagatgacgttgaaggtcggtccagggaggagaggtgccgacgacggcgggccaacctggaacggccacgcggcgagcacgttgacgcctgggcccgtgatgtcgggcttcagaatgccggggttctcgaggctaggcccacgagaggagaagaagacgatcg

SEQ ID NO: 4388 - DNA, 378 bp, Zea mays
ctggtgatgttgcgtgcctggccattgcaccggtccctgaggggaggcaaaggtccagatttcttgccgtaggatcctatgataacaccattcgtatcctctcattggatcctgatgattgcctgcagcctctaagcgtccagagtgtatcatcggcaccagagtcactcctattcttggaggtccaggcatcagttggtggtgaggatggtgcagattatccagccaaccttttcctcaatgctggtttgcagaatggtgttcttttccgtaccaacgtcgacatggttacgggtcagctatctgacacacgttctcgattcctaggcctgagacctccaaagctgttcccttgtatagttagccacaggcaagcaa

SEQ ID NO: 4389 - DNA, 517 bp, Zea mays
  misc_feature (371)..(385): n is a, c, g, or t
  misc_feature (387)..(387): n is a, c, g, or t
  misc_feature (389)..(396): n is a, c, g, or t
  misc_feature (404)..(404): n is a, c, g, or t
  misc_feature (406)..(406): n is a, c, g, or t
  misc_feature (408)..(421): n is a, c, g, or t
  misc_feature (437)..(439): n is a, c, g, or t
  misc_feature (470)..(474): n is a, c, g, or t
  misc_feature (486)..(504): n is a, c, g, or t
  misc_feature (508)..(514): n is a, c, g, or t
caactgcacgtcccttgtccggttccgagtgagcggcaaccacatcaccggcgcgataccgaccgagatcggaaggcttggtaacctcagcttcctggaccttggttcgaaccggttgtccggctctctgccagcagagatatctgggtgccggaatctcacgttcgtcgacctgcacgacaacgctatttccggcgaactgccaccggagctgttccaggacttgctctctctccagtacctcgacctctcctacaacgtcatcggaggcactctcccgtcggacatcggcatgctcacctcgctgacgaagctcatcctcagcggcaatcggctgtctgggccggtaccaccggatattggttcgtgannnnnnnnnnnnnnnantnnnnnnnncctaacgnantnnnnnnnnnnnnnntctaaaatttgtttgnnntcacagtttgaggactttgcaaaccacaatnnnnntacacttcttgnnnnnnnnnnnnnnnnnnnatcnnnnnnntaa

SEQ ID NO: 4390 - DNA, 630 bp, Zea mays
cagagattggtatcatgtcgcagtgttgcttggataaaaatgttagaagtgcaggccctgcatattttgctaatgttgctattaagatcaatgccaaggttaatctcaacttgatctcttcacaaaatttgttgagaagcatggtgctaatgtattcattctttgcagtttggaggaagaaacttagaatttgctaatcccaaagaaagcttaccgggtgttacaattgaaccaacaattatatttggtgctgatgtcactcaccctgccgctctagatgataccgccccttccattgcttctgtaagatcttttctgtttacagtagggatagtatcatatatcattataataacactttatggttctatgtaggttgttgcctcccaagactggcccaaggtggctaactataatgggattgtccgtgcacaaggtcatcgtaaagagctcatcaatggcctggaagacattgtcaagtacgatcatcgtaatctctgaaatttaaatgacaccccactgagagtttacacccgaataagagttcctcaatttacaaaatatctgcagggaactcctacttgcattcgaggagaggtctaagcggagacccaagcagctgatcttcta

SEQ ID NO: 4391 - DNA, 366 bp, Zea mays
cggatctggtgttcatagtagaagaacgggcgcaccccaggttcaggagagacgggaacgacctcatctacactcataagatctctctggtggaggcattgacaggctgcacagtccaagtgacgactctggacgggcggaccctgaccgttccggtgaagtcggtcgtcagccctacatacgaagaagtcgtgccgggcgaaggcatgccgatcacgagggagccgtctaggaaggggagcctgaggatcaagttccagatcaagttccccactagcctaacaggcgaccagaaggcggccatccaacagcttctgtcttgaagctctctctctctctctctctgtgtgtgtgtgtgtgtgtaca

SEQ ID NO: 4392 - DNA, 307 bp, Zea mays
  misc_feature (301)..(303): n is a, c, g, or t
tcgctgttgaacctccatatcggcacaggtgccactctgcccttcgaggcatgctgctgcctatgtgctttccgcgatcgaaagagagactggatgtcatcatggccttgctggtcagctagagctctcgccgaccagccattgttgtcctgcttgtcgatgtcagctccgtgttccagcaacaactcaaccatctggacgttcccgtcacagaccgcgcggtgcagcggcgtggttccatctttcattgagctgtttacgttgccgccgtaacggataatgttctcaagcagctcaatgnnngacg

SEQ ID NO: 4393 - DNA, 372 bp, Zea mays
cagccacataaatgataagtcataaactactagaatgatgctttttaagcagaaacatcttacagatttgctgcggttggcagaagagggatactcttataaaaaaatatagttcatcaaccaaattgtgatcacagtagttatgatcagattgaccattaaactttagtttgatgggtccattggtaaggtcaccaatcatagtaaaatgatgctttttaagcagaaacatcttacagatttgctgcagttggcagaaggatactcttataaaaatatgtagttcatcaaccaagttgtgatcacagtagtgatgattgaccattaatagaaacacactgagcattgcgttgcatatgtgtggatagagag

SEQ ID NO: 4394 - DNA, 663 bp, Zea mays
tagcagtctcatgatgtaatattctcctccatgttgattcatagtgcttacctattaccattgatgtgggaacaaataatgaagacctactgaaggatgaattctacattggcttaaagcaaagaagagcaactggccaggttccatgctacttgtattggctatgctcgttcaattatcatgattcatgttaacctttttgattgtggattccaattgcttatatccattttctgaatcaggaatactctgaatttctggatgagtttatggccgcagttaggcagaactatggacaaaaagttcttgtccaggtatggaaaataattgaaaataaactatttgtttcctaacgaactgtagcagaccactttctaaaatttgtttggcctcacagtttgaggactttgcaaaccacaatgcatttacacttcttgagaagtacaggacaaaccatcttgtatttaatgatgatatccaggtaatcaaatcagatgctagttagtttatcttgcttttcttaaaagccaatgaattttattccagacagcagtactaactctgaagccatgatatttacagggcacggctgctgtagttcttgcagggattattgctgctctgaagtctgttggtgggactctagctgatcatacattcttg

SEQ ID NO: 4395 - DNA, 357 bp, Zea mays
gtacgaggcgaggctgtccgtctgcaagtacctggccggggacgacatcagcgccgccgacctctgccacttcggcttcatgcgctacttcatggccacggagtacgccggcttggtggacgcgtacccgcacgtcaaggcctggtgggacgcgctgctggcgaggccctcggtgcagaaggtcatggcaggcatgccgccggattttgggtacgccagcgggaacataccataggctctagagcggtgggcgtccgtcattctgcagatctgaggtctctgaacctcagcgtttccgataaacatgcatcctttatctactgtttaaaaaaacaaacctggtcggtgcataggtat

SEQ ID NO: 4396 - DNA, 331 bp, Zea mays
cgtggacgacgacgacgacggtgggtcttcgagccaggccgcgttcccgctgcccgtctacatggccgcgtcgctccagtaccacagggcgaactactgccctaagctgctgaacctcggcgacaacgggctcaccggcgcggtgccgccggagatcggccgcctgaagggactcacgcagctcaacctgagcttgaacagcctgcgcggggaggttccacaggccgtcggcaacctcacaaacctggaggtgctggacctgtccagcaaccgcctgacgggcgagatccccagggcgctggagagcctccacttcctctcctacttcaac

SEQ ID NO: 4397 - DNA, 389 bp, Zea mays
ccgaagtgcggagactcgtgccgggacaaggcccgcgccgagggcagcagcaactacgcgtcagcatgcgagcctgccgtcgcgcccttcaagtgctgctgcaccgtcaaggacccacaccacccctggcctccaagctcctcctccaagaccaacgcctaataaatatgtccagtccaaacattatatttagatagcatgcatatagtgtgcctgctgctatatatatatgtcatcgaattaataatgaagatggggtggtttaattatattccactataccatgacataaaattagcgacaaacatttatcggtaaaaataggcttttggcgacagccagtctgtcgcaacataataccatcacagcatccgtcggcatatagtatt

SEQ ID NO: 4398 - DNA, 369 bp, Zea mays
agaaggtcttcagctctcatctaatgtcctcactaagagagatgtgtggaacgataccttcgaccacatcttcaccgagctcggccaaccacaacgcctggaagctgtcgagcttccctgccacccgcgtcatcgactaccggacttctcccagctagagttcactaacaaggtgtttgctacacaggaggtgttcgaggaattgcctcttagctcccttgctgcttgggttagtattgggaagctcttagcctatctgtgttggaaaattccttggcccccaccacatatgcatgttgggttggggtgtggcagtgaggctttacattcaattccatggctatctccatccatagctagtaccaacga

SEQ ID NO: 4399 - DNA, 411 bp, Zea mays
aaagggaacacctgcctccacatcgcggctctctgcggccaccagaacttctgcagcgaggtcctggcgcaggagtcgcgtctccgtcgtcccggcccgtcgtctctgctctccaccaccaacgacgacggcgagacgccgctgctcgtcgccgtgaagagcggccgtgtctctctggcccttcatctgctcgaccagcactactcgaggcacaatctgctggtggagcatcttcttaagcaagacactggcaaatgcaacgttctgcaccacgccatccgcaacggctacgtggacctggcgctggaactgatccagcagcagcccgcgctctcggagtcctgcaacgcgcgcgaggagtcacccatgttcatcgcggttctcaaaggtttcaggagcatctacatggag

SEQ ID NO: 4400 - DNA, 402 bp, Zea mays
ccttctacactggttcaatccttcgttccaatcctgctttccattccgtatatgcttttaacccgagaccgaaggtacctgttcatatgttacacttggaaaacattgttaaatcatgtttttaaggacattcggaggacgaaggcccccaacactatcctcgcattcctaaacgcgcttccctactttcggtacccctaggcaaaccaccatattttgatggtaaatattattgtatgtggagtgataaaatgaggcaccatctaacctcactccacgaaagcatttgggatattgttgagtttggagcgcaggcaccacaggtgggcgacaaagactacgactcggatgaggccacccaaattaggcattttaattcccaagcaacttctatactcctcg

SEQ ID NO: 4401 - DNA, 1220 bp, Zea mays
  misc_feature (445)..(453): n is a, c, g, or t
  misc_feature (717)..(727): n is a, c, g, or t
  misc_feature (732)..(736): n is a, c, g, or t
  misc_feature (746)..(755): n is a, c, g, or t
  misc_feature (764)..(764): n is a, c, g, or t
  misc_feature (769)..(774): n is a, c, g, or t
  misc_feature (786)..(1094): n is a, c, g, or t
  misc_feature (1100)..(1216): n is a, c, g, or t
tttcaaacacccacaactaatatcccaattatttgttagctaactcacagctaacaattagttcattagctgactcaacccagctaacaatttgttagctagctaactaatatctctaggggttccaaacaggaacctatgtacttaggtgtacactatgtctgttacgtacaacacattaatggatggcatttgcagtgatgttcttgatcgagctatgatacttactggcaggcttattaaaatggcttttaagccaaacactatcacactcaacgttttcctttctcatttctgcaagcaaggatttgggaatagagccctcatgtgggctgagaagctcagagaagattcttttgttttttatggtgctacaagaaatataattgactgggcacgaagggaaatggaggatgacccccaggctaacaacgaggacataggnnnnnnnnntgcatatcctcatgtgttttacttctgagcagccgcaatctgatgaggttgtttcttttctgtcagacagtaaagagtaaatgcttgtatggtaaagcctagaaccactcctaaggctattaccaactgatctcctatcccatcccctatctcaaactccactctacaaacagtgtcaaacaatatcatctatagttccacatctaaatgtgatatctttgctctgtttgggaaaagccttctccaggcacatggcaggggctnnnnnnnnnnntgctnnnnnatgaactgcnnnnnnnnnnatgaatatntcgtnnnnnngacatacctgannnnnnnnnnnnnnnnnnnnnnnnnnnnnnnnnnnnnnnnnnnnnnnnnnnnnnnnnnnnnnnnnnnnnnnnnnnnnnnnnnnnnnnnnnnnnnnnnnnnnnnnnnnnnnnnnnnnnnnnnnnnnnnnnnnnnnnnnnnnnnnnnnnnnnnnnnnnnnnnnnnnnnnnnnnnnnnnnnnnnnnnnnnnnnnnnnnnnnnnnnnnnnnnnnnnnnnnnnnnnnnnnnnnnnnnnnnnnnnnnnnnnnnnnnnnnnnnnnnnnnnnnnnnnnnnnnnnnnnnnnnnnnnnnnnnnnnnnnnnnnnnnnnnnaaaaannnnnnnnnnnnnnnnnnnnnnnnnnnnnnnnnnnnnnnnnnnnnnnnnnnnnnnnnnnnnnnnnnnnnnnnnnnnnnnnnnnnnnnnnnnnnnnnnnnnnnnnnnnnnnnnnnnnncccc

SEQ ID NO: 4402 - DNA, 404 bp, Zea mays
ttgtgtcctcttctaaattttggtgttgaaaacagtcaaactactgccaaatgctgctctctagtttccatgagttcctgaattaatgatccttgttttattagattacatgtcctttgaatttactttaggaaatttcaatttgaagtggagtaatcacaataaactgacatattctcctgttcagaaaaaagtgaaagaaaacaaagaagtggcttgtgcaatacatgctcactagatcagaattcagaactgtaggccgttctcttaagatattatctagctctagtgtcttgaacatctcatgaaagttgtttcttgggttcttttaggagatttcaagcactgtatgtcagtgagaacttagtaccatctggtggggagattgatgagcttggtggtca

SEQ ID NO: 4403 - DNA, 692 bp, Zea mays
  misc_feature (372)..(372): n is a, c, g, or t
  misc_feature (388)..(389): n is a, c, g, or t
  misc_feature (391)..(391): n is a, c, g, or t
  misc_feature (409)..(413): n is a, c, g, or t
  misc_feature (420)..(425): n is a, c, g, or t
  misc_feature (427)..(429): n is a, c, g, or t
  misc_feature (431)..(440): n is a, c, g, or t
  misc_feature (451)..(476): n is a, c, g, or t
  misc_feature (482)..(494): n is a, c, g, or t
  misc_feature (496)..(501): n is a, c, g, or t
  misc_feature (503)..(504): n is a, c, g, or t
  misc_feature (510)..(513): n is a, c, g, or t
  misc_feature (518)..(524): n is a, c, g, or t
  misc_feature (528)..(532): n is a, c, g, or t
  misc_feature (534)..(534): n is a, c, g, or t
  misc_feature (540)..(548): n is a, c, g, or t
  misc_feature (550)..(556): n is a, c, g, or t
  misc_feature (558)..(558): n is a, c, g, or t
  misc_feature (560)..(563): n is a, c, g, or t
  misc_feature (565)..(571): n is a, c, g, or t
  misc_feature (578)..(579): n is a, c, g, or t
  misc_feature (581)..(587): n is a, c, g, or t
  misc_feature (589)..(590): n is a, c, g, or t
  misc_feature (593)..(598): n is a, c, g, or t
  misc_feature (601)..(605): n is a, c, g, or t
  misc_feature (608)..(616): n is a, c, g, or t
  misc_feature (618)..(618): n is a, c, g, or t
  misc_feature (621)..(633): n is a, c, g, or t
  misc_feature (637)..(637): n is a, c, g, or t
  misc_feature (641)..(653): n is a, c, g, or t
  misc_feature (659)..(663): n is a, c, g, or t
  misc_feature (666)..(668): n is a, c, g, or t
  misc_feature (670)..(681): n is a, c, g, or t
  misc_feature (683)..(689): n is a, c, g, or t
tctcttctattcacaactcgtcttcgatctgtgctcgcacctcttctcttcctctccctgtcttccctgcccatctactccatccgcatggtgaggtccgacgccatgagctcggacgctgctcgctccagtgctagtgactcgacaagctcgcaggccgcacgccgtccatcgcagagggagattctgctgctgggtgcacaccgtccattcgatcagggatcttcacccgccggtgaacaccgctcattctgcaacatctccggcgaccatggggtcggcggcgccggtgtgcgcagccccttcgtggccccagggcgttggtttcatatgtgtatggttaatttatgtgacctgttctgcagcaaaacnaagtaccatctggagnngngattgatgaacttggtgnnnnncacttannnnnnannngnnnnnnnnnntctattctccnnnnnnnnnnnnnnnnnnnnnnnnnnccctcnnnnnnnnnnnnntnnnnnntnncccctnnnnccttnnnnnnntttnnnnntncccccnnnnnnnnnannnnnnnancnnnntnnnnnnntcccacnncnnnnnnncnnccnnnnnnccnnnnnccnnnnnnnnncnccnnnnnnnnnnnnntcgnctcnnnnnnnnnnnnnccctannnnnacnnncnnnnnnnnnnnncnnnnnnnccc

SEQ ID NO: 4404 - DNA, 220 bp, Zea mays
tctactttttcgtcacctacaattccatcgcttcatacaacatggtaagatgtacaaatcatgcaaggcatgaacacctccagtatttctggtgaaaaaactttgaaaccaggaaactagcagtttaaatactgtaatctaataccaaaaaaaactacaattcacaccagcttccgtcaaaaataaatgccacgtccaaacacctatagcagctcatcga

SEQ ID NO: 4405 - DNA, 1108 bp, Zea mays
gctgcgtgggagggggagcggcggcatcaacagccgcagaggaaggcttactctgaagcggaggggaagcaggctggcattgctactgggagcatggcgaggtgctaaggacgtgcaggttccgcaatcaccgcatcttggtgttcttatttcaggtcgtagtgggagatgaacctctcaccgcccaagatgtcggagccatcgcttgaaagtgacggtatgtcatggatcacaattttggcattgattcagttcagaacttctcaacttgtgttgatgtctgcatgggatagtggattatgcaatgttgtcattgtgcattgatgtttccaaacaaatgatgaaaaccagcttgctcttgtatatatgcacgattacattcgttcattcatattcttcattgatttgctcaaaaagaaaaggttcatgcattgctcggcttcactcatggttcacatgttctagtattattggtattcactgaacctcctcttgtctgtagccaagtacgaatagtagggttcacatgaactctgctttctggtggcttcctgttccactcatgtgtgtttggcattttgcaggggaacaaaggtgtctgaactcggagctatggcatgcatgcgcagggccccttgtgtcccttcctgtggttgggagccgggtcgtctactttccccagggccatagtgagcaggtcggtcactcggtcacaaagcagtttctttgaataaactagacatgaccgagtttgttgacttcagactatcaggttttgtgaatggggaatgaaaatgatcacttgagctgctacctttctggttcttttgattgtatatgtcaaatggatcgactgaacataacacttccgaagattcaactgaaaaattactttggccaactatacacataaagataatcttgtattcaaataatcaaatttgttcaaaggttgttatcacttgaaatcactttttaagtcaatctagttttgtacaggtttatttatagagaatcacttgctctcatgcctttgtgcttaagaggttcttttgtttgtttttattttcatgcaggttgctgcatcaactaataaagaagtgacgct

SEQ ID NO: 4406 - DNA, 447 bp, Zea mays
attgacggatcgccagcgacattcccagcagatgtatgctgatgggaaccagacccgccggcgggcatggcggccgacgaggaaggagcatccatggtagccgctgatggatcgtcggcgacatccccagcaggcgtatgccgatgggaaccagaccccccggcgggcattgcggccggtggggaaggaacgtccatggatgccgaagaagaggaggccctgacaggcaaagggtggattaaaacctgtcgacataaaagctacgctcgagcgaacattgggagggcctaagcttacttgggaccatgaaccttccagtggccttggaagcgaggcacacgttgtcgttgctgctgctgctacccctgctgctgccactgcccccgtggtgatggcggtcggtctggcacaagcggcggcggtggtggtatgtgatctgaagatggt

SEQ ID NO: 4407 - DNA, 442 bp, Zea mays
tctaacttgccgtggatgagcagcagcgtcgacccaatctgcgcagccgtgccggtccacagcagcaaccccgcagcaaccccgcgtcgcacgcgctctgacccgatctgcagcctcgaccacgatgtcgaaaaccccggtgagcctctcgctgtcccgcatgcattcttcgtttcaatgtaatgatcaaatctgtaattgtgtatatcgtttaatcgcagcctttatcgtcgtcgcgccttacgcatcgcttgatcgatggaagtctcactcgtgaacgacatgtgcgactcagtcgattcggccaggttatttgatgtgtgcgatttatagtttgtctaattatgttttggtcgatgcggtgtatattggtgtttgaatatgtatgtgtataaaatattttggttatatgcattggtagggtcgtatttgcgatttgaaa

SEQ ID NO: 4408 - DNA, 1221 bp, Zea mays
  misc_feature (1158)..(1161): n is a, c, g, or t
  misc_feature (1210)..(1214): n is a, c, g, or t
  misc_feature (1216)..(1218): n is a, c, g, or t
tttttgataactgagctaatagtttcatgatgacgtatagctgtatctttcaatcccaatattgatttagcatgattgcttagtttttgtggagtttctgaaacatgtgtacatgcttttgggtgcatagtctcactttgtctgacgcccaacagttctcactcttactagttcttaccgtatactattttccaataaatattgtaccctccagtaacctaaaatatataggctgtcttcatgttgaatgtatgtttcatcattttgcaacagggaactttacagtaacaacataagtgggccaataccacctgaactggggaacttgactaacctggtcagtttggacctgtacctcaacaacttcactggcggtattcctgacaccttgggccaactatcaaagttgcggtttctgtaagttaattcaattgccctggcaacagaagtgatatattcatgtggtactgtccatcaatacaggttgatcctgttagtataaattatctggttgttattcggtcttggtcatgatttatctgacaatgatgtggagaaatagaaaattcttacataacattaatatatgcatgatgtgcccattaataggtttgcacaaagttttcctccaaatgcactcttcagtttgtgttagtagacactaaggttttcataacttcagtcattcacttgtccgtttgtgtctccttctcttgattcttaaaatgaaaggcaaaaggcaaaatccattgtctagttcttgtcttgttacttattacattatctataagcttatctattgactattggagggattgtaacatttttatttccttggatatctacttgcaaggacagccgtcttaataacaacagtctttctggtcaaattccgaaaaccttgaccaatatcaacactctccaagttctgtaagttacctgttgcccttttatacatcattacagctgtccaggatggtagataacagcaaaagtgtttttgacaatcttgcagggatctatcaaacaacaatctctcgggaggggtgccatcaagcggttcgttttctctctttacacctataaggtaatctctggatgaattttggatgcttagttgcatcttctgatgcagctctcctgccagttgaaaacaannnnctgtgtcttatgatgttgacaactctgacccttttgtaacagtttgctnnnnncnnnaaa

SEQ ID NO: 4409 - DNA, 972 bp, Zea mays
  misc_feature (51)..(53): n is a, c, g, or t
  misc_feature (939)..(939): n is a, c, g, or t
  misc_feature (942)..(942): n is a, c, g, or t
acatggcttgcggtgttaacattctgggtgtcttttctttctgagtacctnnntaacgccattgaggtattcttctctaattcaacaagaaaggataaaaaagtcagcttttattaatctgtaaaagtgaaattcgttaaaggtagctttctaaagttgacagacaattatattttggtgatactgaagcactgccagggaaaatgttcatgttaaatttggaaatggttaaaagcagctatctctaggaaaaatgtaattacttactagttattattattaccatgatgtacatcagtagtattacaggtcatctgatacctctgcgatgatgtaactggtcactgttttgatctattgttgtcagggagcatctgattcattgaacctaccggtggcttttatcagtgttattttgcttcctattgtgggcaatgcagctgaacatgcaagcgcaataatgtttgccatgaaagataagcttgtaagtgttcaaatgagcttgagcttctctttcatggttctgttacttagttgttcagtattcatgcacgtgattatcctccctgcaggacataacacttggtgttgcaattggttcatcaacacagatatcaatgtttgtggtactttttttaacttcttattccattttccgacctctgcatccacattcccacttgttatgtcaagcataaaccttttgaaatgttagcattggtccactactccacaccttagtacttgtttatcatatcctttttttcattttatttttcttttcaaacattcagggaaaccccctgtctgaattttagttgtcaaggacacataagtacattactgaattacataaaatgccttaaattcttctgtctctgtgacgtttgacgtggtatatactttaatacagattccattttgtgttgttattggttngangatgggacaaaagatggacttgaattttca

SEQ ID NO: 4410 - DNA, 390 bp, Zea mays
gccatcatgggcaccactcggccacccttccgtggcgatgccaacaacgaaagatacaagggcacatgctataagaattacaagagtagtgtcttgcagtgcctcccacacgaactcccataagctgcgggcctcactctccgtgaacttgttcactccatacatgccctgcctttgattcaggctgagctcatccgtggtgatcccatcagccaacgacgtcgccaacttgtctgcgattccatccagctggccgagcagagtcaacttcccggtgtcacgattttcaacaagtgatgctaggtcgtcggcagagatctgaaacccagcagcagctttgacaccttgaggaacaacacgctcactctgaagtgaggcacctgagtagat

SEQ ID NO: 4411 - DNA, 370 bp, Zea mays
gacgtcctactatatagatccctcatccaaactcaactcgcacatgatgagcacggtcgagagcagagcgcgtccggccgtttccatggacaccatcagccttgacgactgggaggtcctgcctggccacaggactagctccttcctcatggacgcggcggagtgcaggcatggcgtcggcggcggtagtaaggaccagctctggctcggggccgagctggtcgtgatcgacatggaccacttcggccctacgtcgtcgtcgtcgtctcaccctcaccctcaccctcctccctgtgaccactgcgtcctagacgaggaagccaagcagaaaccgctcctgctaccaccgtcagaagacgcctatgcgtgt

SEQ ID NO: 4412 - DNA, 400 bp, Zea mays
cacaatggctgtcctcgtcctcctccttctcgccaccttcctcccgcccaccgccctggccgctttctccccgcccttctccttcttcctcgcctgcggcgccggctccaccgtacgcgacagctcagcgcgcaactttacaccggatgacggttacctgaccaccaaaagcgtcccggcggtgacgaactccaacgccaacagcgccgcctccccgctctacgccgccgcgcgcgcgtccagctccggcgccttctcctacaggttctctttccccaacttcgccgggcaggccgcgttcctcgtcctccgcctccacttcttccctttcaccccggccccgccgtccgccttcagcatctcctctgcgcgcttcgcagtctctgttcagcttcaggac

SEQ ID NO: 4413 - DNA, 396 bp, Zea mays
cactggtacctaggcatctggttcaacaagatcccagtcttcactccggtctggattgctaaccgggatgacccgttcaccgacccagacgcagaccccaataataagctcctccccaaacggactctgcaaatctctagagacgggaaccttgtagtagtccaggaggacaacaacgctcctcaaagaactgaaaccctagtcgtttggtccactggaataatcaccaacaacgcatcctccaagaccaccaccagcaccaacaccaacaacaccagcaccaacaccaccaacaccgtcgccgagctcacccacaatggcaacctggtggtgcgcgacgcctcggcctcggacgcgtccaaggtccggtggcagagcttcgactatccaacagac

SEQ ID NO: 4414 - DNA, 523 bp, Zea mays
gcagcagagaagccaaagccgccccgagccgtcagcgaagaagaggtgcgcgcctgcctgcagcgcctggacagtctcgagtcgctgtgcggccaccttgccaccaggcctgcgcagatcccggaggacaaagagcgcgttctgctgagctcgttcgagcggatccggtctgttgaggctgacctcgagaggaccaaaagagtaagctaagttgttgttatggtttatatatatatcacggaaacatcacagcatagtagcaatcggcgccatttgaaaaacctggcctggccttcctgcgtttcctgatccttctcactacttttgcttgcttgctggtcaggtgctgaacgcgaccgtggcgaagcagaaggcgctggtggaggaggtggctctggagtctgtgcaggagctgcctagagccaaggtacacaacagttcgccgattcaatgtcctccgccctcttccaatggtctgctggaatgaatttcgcccgccggtttcggtagttctgctaatgag

SEQ ID NO: 4415 - DNA, 797 bp, Zea mays
ctcgggttcggtgagtctagtggcttgcccagcgaaccatgacatctacagaaaaccagaaacacaactagttagcaagaaaaatggtggggttacattgcatggtcactacggaacactgaagaggacaacctacttactgaaaccgaaccaaagcaaaaagaataagttgtcctttttcagtattttctatgtaggtggactttgcaacttaaattatacatcaacgttgattttgctcatggatgtgatgaacctggacgctctttaagaaatgtgcttagtcaacagtacacctatcctcagccttcaacaggaggggtgtgtgcttggtgatgaacattactctctccagctcaaaatacatgtcactgccctcatttatacaacaccagaaaaatatgtgtcatttatttggcaagggcgaggaaggaaggggggaaatagatagttctaggatgacctgtattttgaaggaagttctgaatcagacggggtaacttgtaaagcaatatgccaaccacattcatcttcattctgtatagtgcctgagtcagaaatattatgaacatgtaactgatcctgaaaagagttccagacaaattccttcactctaccacacatagctcttctggatgcacagccaagggatgcacagaaatcaaatgatacgacagctgatcaactactgcataaatctcgcttgagctttcatgtctaatatcttcaactccaaattcatggatgctgttgtttatttcgattgaactaacacccatatcctttcttgttcctcg

SEQ ID NO: 4416 - DNA, 482 bp, Zea mays
  misc_feature (442)..(448): n is a, c, g, or t
  misc_feature (454)..(460): n is a, c, g, or t
  misc_feature (462)..(465): n is a, c, g, or t
  misc_feature (470)..(471): n is a, c, g, or t
  misc_feature (475)..(476): n is a, c, g, or t
  misc_feature (478)..(478): n is a, c, g, or t
tgcacctggactactgcccgagggtcatcttcgtgctccccttggactcatatatgtcgctgcctcagcttgagaccctagagatcatttgttgcggtgatcttagggagatctttcgctcatgggatcccaggctcgagaaccaagaggaggttgtcaagcatttccccaagctacgacgcatccacctccacaacctcccgacgctgcgcggcatttgtggccgcatgatgtcttcaccaatgctcgagactatcaatgtcacaggctgtccagcactcaggcgtttaccggcggtcggcggccgtctcgcgcagccacccacagtggtgtgcgagaaggactggtgggacgccctcgagtgggatgggttggaggccaagcaccacccttccctcttccgctccaagcactcatgccactacaggaagagtagttcagnnnnnnntaggtnnnnnnncnnnncgacnnaagnnantgaa

SEQ ID NO: 4417 - DNA, 435 bp, Zea mays
tctgcactggcaacatgttttttttatttaggcgccgttcggttgatagggattggagacccggattgattcctagccggattacttctctaatttatatagattttgataagctgaaataaatcctggtctattccggtgaaaccgaacagggccttaaagaaaaaaaggacgggcgatttggaccatcgattcgcgacgacgtgatgccgcccgtgatgcatgatggcccgatgggcgctggctcgcgcccatgccgccgctacgtcctcggacatgctattgctattgctgccgacgcggcctcctccgcaccgcgcaactcgcacgcttcttcccatcgacaaaattcgcggggggagtgcccggtcctgttcttccaggaaggtgcagtgcattgcagtgcacccacgacgcaaccagaaaatgctctca

SEQ ID NO: 4418 - DNA, 450 bp, Zea mays
gggggacacgacgacgaccacgagcagcaggcgtaccgaaagccgaagccctcgtacgggcacggggacggcgacgacgaccaccaggcgtacaggaagccgaagccgtcgtacggggacgagaggcccagctccggccggaagaagaagaatgtgagcgtaggctgccgaatggccgatgggccttgaactcgtaatctgggctgttttaaacatgcatggtgaaattacaggacgacgacgatgactctgatgacgacggcgcgaggaagccacgttacaaaaagaaagacgacgacgactcggatgacgatgacaggaagaagcgctacgagaagaacgaccgccgccgccgccacgactatgacgattgagctatatgcatgcagtctcgtatatacacatgtgctcgagtcacgcgttatgcaatgtatcatccccagtgcatct

SEQ ID NO: 4419 - DNA, 509 bp, Zea mays
  misc_feature (486)..(489): n is a, c, g, or t
  misc_feature (491)..(494): n is a, c, g, or t
ctatctttactcatgcatatatagacttctttgtttgccttcttgccaaggtgttgtttatgatattaaaaaaatggcagagagaaggacttgttacttgttccatactgcaaagatcgtgatatggatataatccaatggccaccattcctgcttgccagcaaggtatattattcttgtaacttgtttgccgtctatttctgtgctatctatttcgatgagttttttttccaatttttttatcgactgtatttcagattccaatagcattggatatggccgcagatagtggtggaaaagatcgtgatctaaagaagaggatgaaatcggatccatattttacttatgctatcaaggaatgctatgcttctttcaaaaacatcatatatgaactagtgatcgattcacgagagagagggtacatttgatattattatgctttcattcatattactacacccttgactgttaagggcttgtttgctnnnnannnnattcccctcaatccc

SEQ ID NO: 4420 - DNA, 382 bp, Zea mays
atgctatgacacatcttgatgaatttgaagtgagtttgtgcatgattggttagtggttatactttttttgttacttatcctattttaaatgcttgtgacagtgcaatctatatgccttggttattgaccttggcagacccaaattacatttcaaagttcatgatgccatcaaatgctgaatgttttaccattttatgtcacggtggtacctgattccagaagcaagattctgctggaaaagtaccagttttggttgtctaattgctgttcttttattctttaggtggattctgagtacattccggacctttcagcaaattctcctttgtgtgtgtctggaaaataccgaggaaaattcccagacacagtgaaagctaaaggt

SEQ ID NO: 4421 - DNA, 1203 bp, Zea mays
  misc_feature (1148)..(1149): n is a, c, g, or t
  misc_feature (1151)..(1153): n is a, c, g, or t
tgttgcagtattttgtatagcatcttggcattgtttttgagcactaatgttgtttggatgtcatgtatgcagcatgtgcaggaattccttaattatgctaaatttgtgtcgtggtgggtttcattaggtgtggcttcatcaattggactaggcaagttgtattttcgcacctctaaacactgagactctgaaataaaagcacattaataaaatgtcactggagtttgcttatgtcaccctttggtcctgtcctacaaatatttagttatcatgtcttaattgtatagtcttgaaggctttgaaacatatgtacttcaacaaattagttaggcagaaaaggcactttattttggttttcattgctgaactagtgtattaaaggattgatataaaccatcctattcctgcttagttcgtgtttgcaaccatatcagacttcataaagaaaacagttgaaggtgggcagggcaccaatcgcctgattacatatcaaatacagacaacaggtgaaataacgggcactagtttgcagtgaatagtggcttcactgtttaccttttttatgccataattatttgcttctcaatatctagctgtcacatgatccagatccttgccagttttttgtgaatggttcatgtttaactgattcttcatctatttcagtacactagatttagttaccctacaacaatttactgtacttgcacccttttttttgggctgcatgtacctagctgtctatgcagagcagcgacatcaataaagtatgcagaaagctgatgccttctttcccttatttggaaagttatttatggcctctgtatattcagttagtcttgagacattactctgtcatgcactcatgcttctataatgttatttggatctaccacattgaacagcctttttttccatatacagggcttgttaaagttggaaactgggacatgtaaatttggaatgctttattgctgcaactgcaatagagaagaaaactcattttctaagctgatgatttgaaatttaaatgcaggttctggtttgcatacatttgtgctgtatctgggtcctcatattgctctgttcactattaaggctgttcaatgtggtcgaattgatctaaaaattgctccatatgataccannannntaaaggttgggccatcatggcttgacaagaaatttcagaattggaccacc

SEQ ID NO: 4422 - DNA, 730 bp, Zea mays
tggagtgtttggtttgaggaatgatgtagttcatcatcttctctctcctcacttttttgtttggtttgtggaatgaagtgagttaatccatcaccaccttattcctcatagctagttgtttagtactaatatgtggaatggagtcatcccaccaaatttgaggaatagattcatgatgcaccacttcattttggatagagtgattcatcaaaccaaacacctcattacttctcggtccgatccgggcatgctctgtttcagttattgctgtagcctgtagggctgcctccacgagcaggcgcacgccaaggtttgcttcacgcggcagggcgtcgaacagcaagctcattatgaccacaggcatcgcagttcaacacttcacaggccgaaacgcctgctgcgtcgcttactattgtctgacactgacagaagttccatattgcacgggcggacgtctcgaaaccagccgagcctcgtggatttcgttgaggcccgacccccgctcgcgcagcgctggcgcacgttcacccgacccgattcaccttggccgttgcgcggagggcggcggggaacgggggcgatctcacatcggcgatgacgaagacgacggtgcagtgcggtcaggtgtcagcttgtcgctgtcagttggaactctggactcatcagagtttttactcctagtactgacgcattcgtcaggcaccgtcggttaaagttcgttacaacaacg

SEQ ID NO: 4423 - DNA, 519 bp, Zea mays
tcctgctgccggtcaaagtacaggcttttggaagctctttatgcaaggcactgattccctttgtttgtaggagagttaattgactgggatgcggcctccaaagctcctgaatggccttatgaactaatacctccaattttctatcttgggcagcagatgcctctgaaaattgaactgtaagtttgtggtgactaaatggataatcccctgtagcatcacctacagcaacccacctgaaacaacagaaggtataacattgtcatttccctgtagaactttcattcaggtatactcgtctatgtgaacagtcaaacactatggtacacaagtgacaaaattagtaacatgagtacagaaatacactcacctgttattgggatggtttgttacatattttattacttgcaacacataacgtgattgatgcttggtgacagaatcggctgaagtacttgccctaaattcttccagttctttagtgagaagttgtcctgctcttgtatttcttgctcccaaacg

SEQ ID NO: 4424 - DNA, 377 bp, Zea mays
gcccgtggccctccaccaggtgcggcacgcagcatgagaggagcggggagtgttgcggtcaggcccctacctgctctcaaggaaaacgtgaagcgtgtcatgttttactgctgagatgctgagctaccttcaccaagaaaatatcctgacttgttccatgtacccgcactgtttcggtgatactatctgacaccgaatttatgcattaagtcttccagtggtctggagattttaagtaacgcctgtttttattcgtgagttgtaacgctgcagttcgaggagctttagtgctgtatgatgtgtaaactatttgttgtaacttgtaagttgtaaccaattgttgtaagttgtaaccagccactatgttatggtcctgt

SEQ ID NO: 4425 - DNA, 393 bp, Zea mays
  misc_feature (382)..(387): n is a, c, g, or t
gtcgcaaatgagacaatgtgccggcctatacgccaactgactgaaatgaaggggcacgatacaaagaaccatgccctcgcatgctttggtggtgctggtccacaacatgcatgcgcaatggcaaggtctttgggcatgtctgaggtacttgtccaccggtactgtggaatactaagtgcatatgggatgggtcttgctgatgtcattgaggatttgcaagaaccatactctgctgtttataataccgattcttctgcagaagcatctagaagagaagcccttttagtaaaacatgtgaaagaaaagctgagggagcagggttttggagaggagagcatcaggacagattcatacttgaatttgaggtatgagggaactgatnnnnnnataatg

SEQ ID NO: 4426 - DNA, 370 bp, Zea mays
cccaattcgtcggtcaatttcgaggtcgagttccccatgaatccacacccatccccaccattctactgatgccgtgagggagaaacatggaggaggaggcatggcatacacctgaatcaaagagttcacacataatcactgcagacatagcattgccgccataaaacttcctcattccctattattttttttatcaaataaaccattttagataaaatcaatattctatatgcacctgcattctagctatagatgtagcatttcgtgggatgcttatttctgtgctgaatggaggctggctagagaaagaagccgcattgcaggaggacgcacctgggcgaccctgctgatgtagcactctcgtcaagct

SEQ ID NO: 4427 - DNA, 554 bp, Zea mays
tacaagctcaatcagaatcagtgcgggttccgcggatcatggcggccgttggggccagaccccgggtagtcctgagtctgcagcagccccgccctcctggccgccgtatccaccaccatcgtctcgtcccgctcggcttcagcgagctcagctcccagcacggcagcaccctcctccgccgccgccgtcgtcgtcgtcgtcggcaacaccacctgtccacgtccaccaccggcgtaggtgtcggctggctccctcggcagcagagccctccggttgcctgccgctgcaaggaggaggaagagaaaacacgaggcaaagatcagcagcgcgtggcctccggcgagagaggtccggcgggccgaacagctcgagcaggccgtacataccggagacgaggagcaggcaggagaggacggccagcgctagcaggatggcggggacggacacatgcttccttgtcgtcgccatgggcacgctgcagctgtgcacagcagtgagcaacgtgtgtgtatatatatggatcggaagctagctcagaagtcaagatttgcttg

SEQ ID NO: 4428 - DNA, 380 bp, Zea mays
  misc_feature (13)..(13): n is a, c, g, or t
  misc_feature (44)..(46): n is a, c, g, or t
  misc_feature (48)..(48): n is a, c, g, or t
ctgcatcccctcncccgatggtcacccaagacggtgaccaccannngnatggtggggagaagcaagccgggctgcggcctctgccccgccctcagcttcaaggatcttcatcatccttgctggggaggagggcgaggtgagccggggcctgccttcgcgtgggccggcgtcccgcttcttcctccagcttctgggggtggaaaccatcctccagctctgcggaggaggcgccctccagccatgccggggaaggcgaactgttgctgcccagccagggtgcaacattccgtcctttgtccgggcgacggtggccagccgcaccggggggtctcccaacacgtcctacgccgcgagggcggtactcgtgttctgggacggta

SEQ ID NO: 4429 - DNA, 374 bp, Zea mays
gcttgccaagtgcaagaaattctccacagtgatcagtgggtgttttgccttgctctgtgaggagtatggtggctctggtagtaaggcaaagaagagatttatggtatctcgagcagccttgtcgcttattgggtacccaaagttgggatttttggatgaggcagtagagaggtgtgcagagatcatggcactggatgttgttgatgggcttgatggagtgacaaaagacattggtgaagggtcacggccatctccagtcgtgatggagcagtgccaggaggccatgtcttgcatgtactacttgctgcagaggtacccgtataagtttattggccttgacaaggcgtcaagtgtcttcaagagtgctgtcagga

SEQ ID NO: 4430 - DNA, 679 bp, Zea mays
atggataaagcaaaactagatgagggattgtcacattgccatctgaataacttcaacaagacaccgccatttcgataacttcgaccggcttatttcgatgaaaaagtaattggcttacttgcgtctagaacaaggccaggatcaagggcgccttttgggttaacagcgccactgccacaatcgaacggtgtggcccgtgaaagtgtcatcatttctgatgcggtgtactgctgcgctctaagaggatggctccctttgtccagtgtattggccgttgtcatcagggcagattttattgctgaggggctccactttgggttcttctgctttatcagtgctgcaatgccggcaatatgcggcgcagccatgctagttccagaaaccattgcaaatccttcacctgcgaaaatattaccacaacaattttgaattggttcaagcacagaaagatatcctcaagaatcactagtccacaaaatatgcaaaaggacggcaaaagcgcagaactaaaatgctggcgataagccgataatcacatgggtgcttccttgaggaaaaagagatctacatacaaagcttaccagcataatttgattcatctgttccattaggcgcccatgcagcccatatgagattgccaggagcaagtatgtctggtttaaggacatcagcatcttga

SEQ ID NO: 4431 - DNA, 377 bp, Zea mays
tctcctcgcacagatcatcgtagcagtcgtcatcgctgtcttcgtcccagtcctcctcctcctcctcttcgtcagtgtactctgctgccagctcctccacgcccagctcttcttcgtcgcccttctcagaggtggcatggacctgaatggaccaggcagaggagctgtcgtcctcaggtgatgatgacttgtccacgtagctgccggtgctgctctcctggagggagaaggttgacgagacggatgatccactggactcttcacatttctcaggggagtcatcgaacaccagcgcacggttcagctggcagtccccgagcttctcctctgcctgatgaggtggatgtagggaagctgcaatgacctgaagcttagga

SEQ ID NO: 4432 - DNA, 538 bp, Zea mays
atcgttatcttcaatactggccactggtggacgcatgacaaaacttctctagggtgagcaaaacaatgccctgcctgactcactgaagacctgcatttcatttgccttctgattatttttaaattgccttctgattatttttaaattgtgccacaggaaagattactaccaggagggcaaccgcgtatacagtgagctggatgttcatgacgcctttcggagagctctcaacacctgggctaagtgggttgattccaatgtgaaccccaagaaaaccactgtgtttttcagaggctactctgcatcccatttcaggtatgaaaagctatttctgaacctctgcaagttcagcaagaatgtgctctatgagttactggtgtttactaactgtttctgttatgcagtgggggtcaatggaattcgggcggcagttgtgacagggaaacagagccaataacggatgaccagtacctcacgccatacccaacaaagatgagcattttggaggaggtgctccgggggatgaaaactcccgttg

SEQ ID NO: 4433 - DNA, 336 bp, Zea mays
tattgcctgcactggcaaaaaaggaaaataggaaataagattgcacaatttggatcgtgcacctttacgccgaggactggaaagacttcggcggaagtcgtggagatagtcccttgtgccaggaacaagtggggcaactggtgggacttttggttttatgtttcttgtggggaagtcgaagatctgcctgggctccctccggccattctgtgctctcactgctatgtggcgttccctcgattcgaggtggcggaggatgatgaggacgaaggggcccttcggtacgctgcccgcatgagtagcgggcgcgatttggttgaggaatttatcggctat

SEQ ID NO: 4434 - DNA, 507 bp, Zea mays
  misc_feature (500)..(500): n is a, c, g, or t
cagggcgcaagctcgccgtggattgcaccggcgagggcgtgctgttcaccgaagctgatgccgacgtgcgcctcgatcagtttggcggcggccagggccagctgctgccgccgttcccatgcttgccggagctcattttcgatgtgccaggctcttccgccatcctagactccccactgctactcttccaggtacgccgtacccttgcctgctcgatcaattgatcttcttctagtcaagatggaatggaatcgtatgcaactccgatgatccggaccatgcacgtgcgtgtaggtgacgcggctggcgtgcggtggcttcatcctaggcctgcggttgaaccacaccatggtggatgggcagggagtggtccagtttctgggtgcagtggcggagctggcgcggggtgcacaggcgcctacggtgcggcctgtgtggcgtcgcgaagtgcttgaggcacgcgacccgccacggccgcgtttcccgcaccacgagcttgnacgagac

SEQ ID NO: 4435 - DNA, 524 bp, Zea mays
agtgtcgaaggaaaacacacacaggcatgaggcatccctgtgagtttgttggtcttgaactcttgatgctgaaaatggagattaaagagcattattttgaggtaagtttgtaagaagaatgcattatttaattgtctaaagcagtcattattaattacaacttttacacaggtctgtgacattatagatgacttgtccgtatcaatattaaaccacttgactgaaaactgcaagaaagaactcgagacaataaacgggcagtatccattttgaacctctgaaggtaagcattctggcttgttttgtaatttgactatgcagttctctggttctgtagtctaagagattgacggatcactaataatcttatgcagtatctagacaaaaccttgaagatcacttacgacgaatgagttcaaatgttaaaggtacaaacttacagctgtctcttgctactgtaacggagtccttctgttagatattacgatcctaacaccttcctttgcattttcccatgctttgct

SEQ ID NO: 4436 - DNA, 664 bp, Zea mays
gccgttctctgtcaaaccctgtagtacagaagacaaagaggtaatcttttttttgtcctttttattaactaggcacccttttgaaacctttcatgtagttaaaacaattctagtctttcaatgaagcaaaatttgaccattctttaatacttagcatattaatactaataattatcgtaatcttctctctctctctctctctctgcaactgctcttgctcttccttctagcatcacttattattagttggatatttctgctatggttcgtgcactacatggatgtgacactatcaagctacctccagtcatatatatactaatccttccccttcttgacaaatgatcttttattgttacaggaaaccgcatgtgtacatcatgttcaagagggcaatgatgggctggaatctcattgcttacccaaaggaactccagagttacaagggttgattgcaagaatagaagcacttcaagtagttgtatcaaatgctaaagatcgtcaagatcaggagtcagctgagtctgcagctaaattggcggcagtaagtgcagaaattcaagaccttaaagcaagaggtggctcacgcatggagggaaaagaaatatattctgatcatgagaaacaagatgttgagatctccaaagggaagcaagtccagatc

SEQ ID NO: 4437 - DNA, 400 bp, Zea mays
cgcagcgaggctggatgcagccgtccaaggtgaagagcaagctgtgttggccgccaaagtagtccaaccggaaccggaggtcgctcaagtttctgcacgatcatacaaggggtctggaaccgaatcgagcaacagagcagtccaattggagacaggggaatcttctagacgagtgattgctgccgcggtgaaggaggggactgcacacggagtgaagggaaagggcgatgtggtcaaggtggatcagctacgagtggaaagaacaaaagcggtggttgtcgaggcgccaagagagactaccgctgccgtggttcaagctgtagcggagtccccttctcagagcaccgagtatttgatctcgccgtcgccaaataggcggtttaagagaactaatcacgtc

SEQ ID NO: 4438 - DNA, 396 bp, Zea mays
atcgtgcggttcagctgctgcagcgtgcgctacggggactgccgtcggaaccatgcagcgagtactggaggccacgcagttgatggatgccgagagttcatcgctgaaggggaggagggcaccagtggtgctctaaagtgcgccgcctgcggttgccaccgcagcttccaccgcagggttcaggtgtatgaggttgcatggggttatggatccgacacgtcgtcgactgagtagagaggggaggtgcaagccacttggagcttggatttgtgcttcctgcagcggcaaacgcccaacaatattggccccccttcttctctgtttccggtgacaacctgaccggccggtggatgtataggaggctaggagccttgtgattgtttgtagctccgtacg

SEQ ID NO: 4439 - DNA, 373 bp, Zea mays
  misc_feature (365)..(369): n is a, c, g, or t
gaggaggagaacggagggggctgggcgagcagagctccgtgcaaaaccccagggcgcagccatggaatccagggcgcggcgagctggaggagcagggacggcgcgacatgctggagaaattccgcgcgcacagagcagagaatcgcgcgtgaagagatggagcgtgcaggggagggagtaggaacagccgagcgccgtggagagaagcaaggaggagctcgacgagctggagccggcggtctggagagcgagcagagggagcgcgcaggaactccatggctcgggagcgagcaaggagaaatcagggagcaggggctcgcggctagcaggagaagcagagatcgagctgggcgagatccaagcannnnnattg

SEQ ID NO: 4440 - DNA, 536 bp, Zea mays
  misc_feature (477)..(483): n is a, c, g, or t
  misc_feature (529)..(532): n is a, c, g, or t
gggtttcctcttgggttttgttctgttggcaaggcctcaatttggctggatggaacaccacgagctgccgcagactaaccaacctcccaagtacaaagcgtaccagtatattttgtgggttgtggcactcgtcttgctgttagttgggtaagtaaatccagttcggtatatttcctgtagacatgtttttatgtgtttaaacatatattgcagaaaatgttgctgcaaagattcgtgattctggactaatgctacattttatacgagcaactagtctaagatgttacatgttttttttttgaaaacgtggaatggtactgatgtcaaagtccttgcgccgcaggtttgtgatttcacttgtgatgcttttcaaagggaagaacgggaacgacggctgccactggtgccactatctaaactgcgtgccaacatcaaagtggaagtgcaacacctagacacctcaggtttctgttactnnnnnnnaacatgtagtattcagattcagaagaccattttttttatgcgtgtnnnnctgt

SEQ ID NO: 4441 - DNA, 779 bp, Zea mays
gaagaggtaaactgtgtttttggataatcatctagtttatttatgaacattgcttttacacttccattttgtgggacagcattatggatcgtgagaagcggctaagtatattgtaccaaaagcagggaagggcgacccaattcgcaaacaaagctgctagagataagtggcttcaaaaggaaattgaagatctcaagcctgtacttttatcaaataaaaagcaggtaataatccagtgactggtttgcggccttactggttgctacctcactgtgggcattttttctgttgcactttttttgcttaaacttggaataatcctgcatttgtcacatatattagtttgatccgtttcatcttaaattctgctaataaagccatactatggcatgaacgaataatcttttctgattgtatcttgaattcattccatgaatcaagaatcttttttttgtctttcaccctccaattgtttgctgacatagttgaaatatctgttacattcttgcaaatatggcaggaaggtttacttcaagaagaaatccagaagcttaaagatgaaatcaatgatttaactaactacatcgagtctcggaaaagcgaatcaagtaagttagaggaaacacttgcgaaaagacataatgactataacgatttgaggaagcagagagatgtgcttcaagaagaaaggaagtatgtaaatttcttttgaatggtcatggcattgccattgaatggatgatgtgttgcattaaattttatatacttagtagaaggaa

SEQ ID NO: 4442 - DNA, 428 bp, Zea mays
tgctaatccttgtcgtccccttcctcgccgcatcgacgtcggcggacgggaaggccggagacatgcagcggcggcggcggcgacaggtcctgctgcgggacaaggcgactctgctggacctgaagcaggggctcaggctgtcatcttcagcggccctggcggactggaacgagtccaacggcgacgtctgcggcttcaccggcgtcacctgcgactggcggcgggagcacgttgttgggctctctctcgccaacttgggcatcagtgttgctattccacgggtcattggcaatctctcgcacctccggggcctcgacgtgtccaacaacacaatctctggccagataccgacgtccgtcggcaacctcacgcgactggagcgcctcttcatgaacaacaacgacatctcgggcaccatctcttcaatc

SEQ ID NO: 4443 - DNA, 717 bp, Zea mays
tttttggttctgcaggatcattgcgtctctgcgagctaatcaggttgggatactttgttatgtttggacagttctatgattgggaactgtgtagaatgtgacagcatttcttattttaatgtgcattgcagctctgtgagcgtctccctagccccaatggcgagtcaactgttgattgccatcagatctcaaagatgccaaatcttgcattcaccatagcaaataagactttcaccttaacaccagagcaggtaactccctacttacagtttcttcagtgtttgaattagtagtgaaacattgtctagggaaccatgatctcattttcaaagttacagtccatttattggatattctttggtgcaaacatatacttcttctatttctcttgaatccactgattgcctttgtgctgcagtacatagtgaagctggagcaagcaggacaaactatctgcatcagtgggtttatggcatttgacgtaccgcctcctcgtggtcctctctggtacgctgaacatatatgtacataagtggcagtaatccacactctacacagtctttgctttctctagcaagaatcaagcatgcaatctgacatctatcttgtaaacattcaggatacttggtgatgtttttatgagtgtctaccacactgtttttgacttcagcgagaacatgattgggtttgccaaatctgcatgaggactggagttct

SEQ ID NO: 4444 - DNA, 993 bp, Zea mays
  misc_feature (950)..(956): n is a, c, g, or t
ctttattatcagcttacctactgtccttcttgtcatgtcgaaattctcatcaatcattgtttttttttctattagatatgggactctgttcagaaaccagaagcttacaaggaagcagcgctcagtgatttcttcgatgtcggtgcatcagtttttttgaaattaaggctttcatgcatcgactaactcatattttccgcaacataaaggtggaggccactgctctatcgagttatgaagagaaagaagaactatttaaggagcaggtagattagacgtacaagtactaaatttttatctctccagtgcaccccatcctttttttctctattgtatgattgtatccaattgcatttgttatgaaatttccatcttcagtggaacttatgagttcatatttatgcatgccatatttcactttaatgatacaaaagaccttttattgtactatgtcatttttatgcaggttggacaactgaggcagaggttttatcattcaattgcaccaggtggtcttgcagccgatagaagaggtgtgatacctgcttcaggcttttctctcagtgcactgcagatttgggaagtaatacgtgaaaataaggacctcaaccttcctgctcacgaggttattctgccattatttgccatcaatgctaaaaaactaaatagtaataatttgtgtacgtggacatgttgacactatatttgaagtgtaacttttcttgtatgttgtgtaggtcatggttgctactgttcgatgtgaagagattgcaaatgaaaacctcaaacagtttttgtctgataaggtggaaatgttcttatgtcattctatattactccatccatcccaaattataatacattatgacttctctagatacattgcttttagtatgtttatagacataatatacatccatgtacatagagaaaaactgtgtatatagaannnnnnnaatgtcttataatgtggaatggagggagtatttgttg

SEQ ID NO: 4445 - DNA, 484 bp, Zea mays
cctggcctgctcccatggcgcgactgctccctgccgcgcgctcttttctgcaccgcgtccctggcccctctgcccgagctcatccatagtaagcttcgagctcgctggtgttcggaccgcgactccctcctccggcgcgctcaactccctcaagccgcgcctgctgccgcgctcggactgaagctcccctgcatcacgccctgctcgcccagccgcgccgagctctgcctttgctcctcccctgctcctatggaggcgccgatcggatctccctattgcctcaccctgctctttgtccgcccatggagtcacccagcccagccgcgtctgctccgtcgcgcccagctcctgtgcgccgcagttcaccccagcttggcgtctgcttctctgctccatattcgtgctccgagttccttgctgctactaccgtgtcgtgcgctgcaggccgccatccaagttctctacgcgtctgcttctctgctcc

SEQ ID NO: 4446 - DNA, 379 bp, Zea mays
ctaccaccactgggccagttaccaacactacaaaagctagttatgggaggaatggacagcactttgacagttgatgagggtttctgctgcgccggcccgggagcctttcctctattacaggaacttcaactatgccaaatggagaacctggaagtgtggaacacaacatactcctgtggccagagcaatgaggatgtgcaggaattcatgttcccaaaccttagggaactgttaattcgtgattgccccaagttgagactgaaaccatgcccacctaaaactgtgggatggaagatagagaacagcgacaatgtactgtcgtcatgggatgaggagggagatatcgaccttgcagcattgttcccatcaaggaaagagt

SEQ ID NO: 4447 - DNA, 419 bp, Zea mays
gcggagaggagctcgacggggcgcgccgcagggagatctctgggcgaggagaggacctcgacgaggcgttggcgtctcggtggccatgaagccgtggaggtctctgggagctggtagaggaggcgaggagctggcggcagggcgacgaggagctggcggctgggtggaatcgcgacgaggagctggtgaaggagcggcctagcggcggtgtggactggcggcgaggagctagtggtggagcctggcagtggggcggccgacgacgatgaaatggggatggggatcgatttctaggaacatagaagatggggatgttcgttgtgggctccacctgtagcaacaaacgtgggcccatgctgtcaggcacgttaactgtgatggagacggtgtgcgagtgtttctctgagcaaaggaacaaa

SEQ ID NO: 4448 - DNA, 762 bp, Zea mays
  misc_feature (452)..(452): n is a, c, g, or t
  misc_feature (698)..(701): n is a, c, g, or t
  misc_feature (703)..(709): n is a, c, g, or t
  misc_feature (754)..(756): n is a, c, g, or t
atctttctgatcagtgatttcatttgaggttccaagaggggttcttcgctgtcgtttgacggttttatttgggttgtttctgtttgctgtgccatccatgtcatatttctatgagacgagaggttgatgacttggtggtgattggtacatgcaactgtgcaaatctcttctgtttttaagtgcaggctactggggttctagggctgaggctagggtaggatttgactttttgattgtttttttgtcccccacttgctgtttgttttttttctttggagccccacgtttgttagaaaaggagataatgtgtggattatccgcactgttttacctttcatttcggtgagataacggacaagtcaagccagattcttgtacagcaaaagtgaggcatttccttttactatcttgatgtgtgcttgttgaatggcttctgtggcgtcgggatttgntccttcttttatatgggcctgtcgtagtgcatcctcctagtataaatatttgctccaaatactgcgttcttatggttcttgtgtgtggtcttgtgcagtgacttcgctaaaatgggtcatgtcctcatcatcaggaccacaatttcatgtcaaaattgaagataccatcttcccctattccactttcatgtcaaaactcaagatgacggaaatgaggcgtcgctctgtggatgtcccgctgtcaannnncnnnnnnngctcaagcgattgagatcgctgcgggatccagcgacaaactcaannncaagtc

SEQ ID NO: 4449 - DNA, 385 bp, Zea mays
actttgctgtattgcctctcgaagaatgatatggacaaagaggcagttgaacttgcgaagaagatgagcaaaaggggatatctccttggcagcacaacattcagcattgtgatcccttgcgctgtgaaagtcttggagtcaagtgatctgtgtgagttggtagatgatttcatcaagaaaggggggaatctgggatttgatatgtatattatgattattaaatcctttctgaggtgcaaggatatctcaaaggcaaataagtattttagtcagatggtttcagatgggcttttgtctagtgtggaatcttacaacattgtgatagattgctttgccaaggcaggtgaagtggaaagagcactggagaccatcaaagttatgcaag

SEQ ID NO: 4450 - DNA, 373 bp, Zea mays
tcagcgcggcgtcctcggcggcgtcgatgaggaggtggaaccctgccacgacgtcctctggcggcatgcagagcgaggagagcagcaccgacgccatttccttctcgcggctcttccggtccatggcggcgttcaccagcttctgcacgaagatggcattgaaggagggacaacacgagtagttctctgcttccaaccagctcatgacctcgatgatgtcgccggtcaagaagtactcctttatgatcaaaacggccttctccttgaactgccgcaccgcggcgtcgtcgacctcgctacccttcttcggctccggtggcaacggtttgaggcacgactcggacagccagccctccgacgaagccttatggat

SEQ ID NO: 4451 - DNA, 1049 bp, Zea mays
  misc_feature (989)..(992): n is a, c, g, or t
ggttgctcaagcaaagcgcaaaagcaagttcaggagcattgatcaactgaagggacatttatactgcgtgcataggttgcacatgtgcaatctttgtttggaggggaggaaggtgaaatacttgatgaatttgcacatttataccttagttgatttcatggattatgctgtcaaatttagcatcaaactttagacatgttttgaataatctagagctgatttttctttgtttctatttcatgcataatggtttctttttagtttataggcctttcattgtgcatgtacagttcagtgcagtttgtcttgtctatcagtatatgacgctggtacctatgctatagcttacctagtgagctgttatgttactgtacaatatatttcgaaattgaaaaatgttgtttccttcctgtagtttttttgcttagtataatgagcagaatttattcgtttatgtatataacatggtttaatttgaagatgttttccagagtatgcatctcaacccactacaggcaattgacatgaatagcctatttgaactatttaagctgaatacctaattattgcttgcaactagcatgcttgacattgtgctatcagttgctaattatgtgacttggccatacgagtgttcactaattttttattggtcattgttgtcctatagtcaacattgtagaactggggtcatgtaatttacactctaaattacacttgcggtttttatattcatgattatttattgaaatggtttcgtgtgttttgaaggtgttcatttgtgaacaaaagctttatttgaagtcacagttagctcagcatatgaagactggcgactctgaagtggatggctctgaggtagagcgcaatggttttgctgggcatccaatgtgtgagttctgcagaagttcattttatggagatagtgagctttacatgcatatgtctagggaacactattcttgccacatatgcaagaggtaggtatnnnncaacctttgtccttagctaagcttatgtagcgatttatctgatgtgtgaattgtgat

SEQ ID NO: 4452 - DNA, 625 bp, Zea mays
  misc_feature (593)..(593): n is a, c, g, or t
  misc_feature (601)..(605): n is a, c, g, or t
  misc_feature (619)..(620): n is a, c, g, or t
tcgcgtttggcacgacaatacacaagtgtccacgggagtagctggacctctcacaaccgcacggtaggaggacgtgcggcggtggctgcgcctgtgcatcggatttcgtttgttttctccatgaattttgcatcgcgtgttagtgctccctaatatttggggcaacacatatgtttagtagagggatatgggtcgactcagattaagtaattagcgagccaaatgtggtatcgtcgtccggttattgcattggtaatgtatctgctgtggtataaatgtatctgctgttggtatatatacattatgaaatcacattttaattttctatgtagagaccgacgggccattttatcctcttgtacatcacatgtgtgaaatgaaagtgtgggttctacatcgatagaaaattaaaatgtgatttcataatgtataccaacagcagatacatttataccacagcagatacattaccaataaccggacgacgataccacatttggctcgctaattacttaatctgagtcgaccatatccctctactaaacatatgttttgcccaaatattagggagcactaacacgcgatgcaaattnctggagannnnnaccaaatcgatgcnnggcgc

SEQ ID NO: 4453 - DNA, 413 bp, Zea mays
tctcctactcctacatacgttgatcaatggctctcctgcgtgtcgtcagcacggctgtactgcctgccgcctgctgcgtcgtcctcctcctcctgtccaccaccacggctccggtggccatggccggctcgttgcgggatgactgccgcgcgttctgccgcccaaggtgcgagggctacggtgcggatttgtgccatgccctcgtcaacggtttcccgctactgcagaacgtcctcgaggcgacatgcgcagagcgcttctacgaagtgtgtcaacccatctgcatgaacatctgcacggccaacaccctcactccggcagcggggccgggaactgccccgccgccgccgccgccgccgccaccatgcggcaagcaatactagctggctagctagttgatgcctccgtacgtt

SEQ ID NO: 4454 - DNA, 367 bp, Zea mays
tgtggtcgcggagttcgccggcgagaatctcgagtcctgcgacgtgttcgacggcgtctgggtgccggatcagaggcaccccttgtacaacagttcgcagtgcccatttgcagagagggggttcaattgcctggccaatgggcggaaggacaccgagtacctcaagtggcggtggaagcctcggggatgcgatttgccgcggttcagtgcccgggctctgttgcagtggctgagagggaagagggtcgtgtttgtgggggactccatgagtcgaacgcagtgggagtccttcatttgcatgctcatgacaggggtggatgatccagagacggtttatgaggttaatggcaaccagatctcaaagaca

SEQ ID NO: 4455 - DNA, 482 bp, Zea mays
cttgatgctaatctctcctcccatcagacgtacctgtgatcaagatcaacatagatcatcgaaaaaatgaacaggagatacatatatgtacatactcatagtacatatatttgagtggtaacttacaaaggattgcacgattccgagccccaagcccgtgccgccttggccattgttcacctgaacatagttttcgaacacggacatcctcttctcctgggggatcccaatgccagtgtcgaccacttcaaagtaaaactcaaccaaattggggtcattctgcacatgatcctggtcaccaggacgcttccttgccctgaacaagcatcccaagaagcctccgccgccgtgccgtgggtgcacaaaccttgacggagctctgacattgctcccggtgatcggtcgggtcgcccagctccgaaggacgacgtgaccttcatcggtgaacttgagggcgttgccgagtaggttgtctaggatct

SEQ ID NO: 4456 - DNA, 352 bp, Zea mays
ctcctttctgcatggaccttgagttaaaagatgctccagctcttcctaagttaaattcaatgaagctgatcgaaggatatttcatgagagctggttttgtatcagcatttaaagatatacatgagagacttggggaagtatggccaaaaaagttttccaggttagctctgttgtcagaagaatgtagggatgaggttatcaaggctgatatacaaggaaggaaagaaaaactggagagaatgaagaagaagggtattgtcacagcaagaaaatctaaaacaagagcacgacgaggaaaatttgttaggcagcagaaatagaacacgaaagtagtgttggagtagtcgtggcc

SEQ ID NO: 4457 - DNA, 912 bp, Zea mays
  misc_feature (844)..(851): n is a, c, g, or t
  misc_feature (881)..(895): n is a, c, g, or t
tgttgggatgaatgtaagcttgatgtggaactctgttggattctatcaggtgcagacagaaacttcgatattctataagtatatcggaatgaaacttgtatactgacgctgtctgtcttgccttttttttcagatcgcaaagctgtgtatcattccagtcttatgcattctggaaatcatgttcgacaaagtccgttactctagagatacaaagctcagtatagtgcttgtccttgtaggtgttgctgtatgcacagtcactgatgttagtgtgaactctcaagggttactagctgcagcaatagctgtttggagcacagcactacagcagcatgtgagtattgttgatgttgagacttggtactttgttgttcatatatctgtatatgacatcttttcctaattggagctatccttcttcagcacctattttatagcttggcttctaatttagaagttattggttataattttagatgaaagcaccttgcacagaattttagtaactttttggtgagtatcctgaaatctaaagtccctctttgtttgggtggacttgattcagtggagcctgtctacttgtggcctgaggtcttgagtttgaagttttaaccaggtttcttgcaaaatcatgcaagggtaggctttctagaaattcccttccacagacctcaccttgtgtgggagctctcaacttggcacactttttttcctgaagtaaagtaagcaaaataatccagtactctgctgctgctttgattacgacaactttggtaatagactaacagctcaacaaactttgaccttttggaccttgttaatctttacgtaactagtgttggcnnnnnnnncccccctgccatgatatccttattaggacnnnnnnnnnnnnnnntctatttggtttcctcc

SEQ ID NO: 4458 - DNA, 342 bp, Zea mays
gcacgcgccgcacccggtgccgttggtgtacagcgacgggcccacggccgccgtcagggtgccgtagtctttccccagctcgcccttgtagccgcacgcgccgctgtccgtggtgtcagttaacccgtcgcgcccgccgtagtacgtcgcgtgcccgtccgtccacggctccgccttaaacttgccgtggttgacgtggggcttctttttgccgccgccgtcctcctcctcctcggagcccgcggcgagcccgacgagcagcatcgacgccaggagaggcgccattattgtccacgaacgaccagacatgattgatgctatggtttgatttgtccttcctgg

SEQ ID NO: 4459 - DNA, 376 bp, Zea mays
  misc_feature (57)..(57): n is a, c, g, or t
  misc_feature (59)..(59): n is a, c, g, or t
ggcctcgcctcctcttccgtcctctgtatataacaataataacttgccaggcgcgcncnatctcgctccgtccatccctgtcgccagcgccaccaatccatcgcttccgcttcggcctcaacgacggccgccaccaccgctcccctccctcccatcctcctcgcccagcgggcagcggccattaccacagcctcccccatcaagccgggatggctgcacagcctgcactcaaggcgtcgttccgaggggagctcaacgccgtctccttcctcgactccagccggggacctttcggccagcacaaaggttggatcttttcctcttctggtgcctccttttttttcccccgaccggtgcatgagcctgtcttcttgct

SEQ ID NO: 4460 - DNA, 425 bp, Zea mays
ttgcggttctaacacaccttcaagtagtgatgtagatgtggacaatgtccctgagaaggagggcaatggtaatgagaaggcgaagcaagcctcctgcagcaactcttcagctggtgacactaaccaccgcagatttagaagcagtggaagcacgagtgattcatggaaggaagtttccgaagaggttgtaatctaccaacactatgccaattcactctgcccaaacctttgagcatgccgcactgcctttctaattcactttttttgttggcagggtcgtctggctttccatgcgctgttcagtagagaaaagcttccgcaaagcttttctcccccacaagcagaaggctcgaaggaagttggcaaggaggaggaagatgaagtcaccacagtggcagttgacctcaacaagagtaccacaagca

SEQ ID NO: 4461 - DNA, 689 bp, Zea mays
  misc_feature (401)..(409): n is a, c, g, or t
  misc_feature (416)..(419): n is a, c, g, or t
  misc_feature (447)..(447): n is a, c, g, or t
  misc_feature (449)..(451): n is a, c, g, or t
  misc_feature (514)..(515): n is a, c, g, or t
  misc_feature (577)..(579): n is a, c, g, or t
  misc_feature (585)..(592): n is a, c, g, or t
  misc_feature (603)..(608): n is a, c, g, or t
  misc_feature (614)..(618): n is a, c, g, or t
  misc_feature (633)..(647): n is a, c, g, or t
  misc_feature (654)..(660): n is a, c, g, or t
agttcaaagatcacagttgcactttgtcgaagatccacaaacaaagaggattaaaacttgcccagcttgcccagctggtgcgaaacaaaagaatcggatgtggaatgaggtaatttctcatgttgtaagtcaagctgcctctgaaaaggggagcgaggacaaccgaaagcgccataagtgtttgctgcgcaaccatggtttccatgttgagacaagtgatgatagtggtgggtcaaatccccaagaaagaggtgaagcggttccgcgacatccggctaatcaagagaaagctatgacgatggaaaatagtttgtcatccaccaaaagtcgacttcgggttcaggctccaaaatgtatccctatgctctggtccatagtcccagcaatggtcaacctaaaannnnnnnnncataacnnnnacaactatcctgatttgaagttatgtangnnnaatgattttaatcactgaaccacttcaaagcttacttgtggctcccgagcaacaatatattgnnaatgtagtcctttgtctttaaccatcgaatctccaagaaattcggcaagtctttttgctgtnnntacagnnnnnnnnttctgctctcnnnnnncaactnnnnntttactcattgtgcnnnnnnnnnnnnnnnaatcaannnnnnnactgtcagcaatatcaattccttgattct

SEQ ID NO: 4462 - DNA, 779 bp, Zea mays
atagcatgagagtaagtaaatgaacagtttgactgatgtagaaggtgcggttttcatgtaaaatggtaccaggatctgtctcgaatatagctaccggaacagcacgctcgctcactggagtgccctaaatattttaagaaaatcaagttaaccatactaaagacaaatacaaataattcaacttgcccaatattacaatttacatgggcaaactaatgccacaaaatatttgccaacaagaagaaagaactaattccaccaaaatgaatcaagggatgttcatgtagttccttgataggatcacattagggatgccaaaataggacaggggaaagaccacggaaacataacattgacaactatcctgatttgaagttatgtaagctgaatgattttaatcactgaaccacttcaaagcttacttgtggctcccgagcaacaatatattggcaatgtagtcctttgtctttaaccatcgaatctccaagaaattcggcaagtctttttgctgtagttacagcacaagacttctgctctccgtagtcaactaaagatttactcattgtgctcgactccgatatgaaatcaagcaattcactgtcagcaatatcaattccttgattctgtaacagaaaaatatttttatatgtattgatcaataacataagttggttggcttgttgaggatttagagaataagaatataagaatatagttcattatacagatcgcttacatccagtaggtccaaccaccggttagcaacagaggcaacagca

SEQ ID NO: 4463 - DNA, 323 bp, Zea mays
tcagcgcgcccgcttcactcgccgacatccccagggacgagcccaccatcgccgcgcacctcctcgcggcgctgcagtcgttcatggcgctcgacgcggccttccgcgcgcgccctctgttcctcgcaggagagagctacgccggcaagtacatccccgcggccgcgaggcacatcctcgacgcgaacgacaagctccccgcgggccagagggtgaacttgcagggcatcgtcatcggcaacggcatgactcaccccgtggcgcaggtgaccgttcacgccgaccaggcgtacttcgccggtctcatcaacgccaagcagaag

SEQ ID NO: 4464 - DNA, 493 bp, Zea mays
  misc_feature (52)..(56): n is a, c, g, or t
ccatcaattgattgtcatatcgataaaatagtgtcattaatcaggcaaatgnnnnnctaagtgtgtctaagaatcgaacatcatagtgtaatttgggacaggagtacatatacccatccatgcaccatgggttgatccctctaatgccctgttcgtttttatcaaacccatggggattgagagggattgaatccactacaagtcaaaatccccctcaatccaccccaatccccctcaatccccatggattagggatgaaacgaacaaagcctaaaaggatcatctgcccaagcatggcacattaactttcacttccttcgcgcatacaatatagcaacaacagctgatatcccaattacagctgctgggattgcccagtactgcaccacgttgtccataagcttgctggcaaatcccgtgtcctgctccttcctgaaaacctccatctcaggaatgtcaggagttaaacctccatctcaggaatgtcaggagt

SEQ ID NO: 4465 - DNA, 463 bp, Zea mays
tcgcgtctgatattctaaaaagcctatgtgaatccaaggaaggccgtgaaaccgtccaagcgctgagtcacctcatcaaaaggctgcgcaatctggtgcatgacctggaaaagaaggtagagcttgataagaggtaatgcaatacatcaattcgcaagattacgcccttgccaccgatgtcgggtctgctgaaacgggctcctcttgtcctgcaaggaatgggcgcaccggagccgtgaaggcgaccaacctgcggcggcttcgggaggccgccacactctatcatatcctcaccagtggtacttaacgcgtcggcagcatagctagaaaggctaatctgacgttttgttgtacaataatttagtctaagaaggttttcatgtaactggaggtgactacggtgcaattgtcgaaaaccttcctaggtaaccaggatcttctaagttctgttgctgcagttggt

SEQ ID NO: 4466 - DNA, 368 bp, Zea mays
cgctcggctgttcgtcgtcgtcacccggtcgcgcgacgaattgacagccctatcactcgtcctttgtccgtgtcatttaggtcatggtttccttgtccgagtttcaaatccatagtttgttgctcccgtcaactagctcgccaaaacgtttctcgccagggaagcatagtcgtcacgccctatgtccttgccgtgcccgtgaagacgttgtggaattgtcgtcattcgtctccacgccgtgggtacaacaatgttgtcgttcactccacggaactcgtcgtcgaccttatctcccggatcctggagttggatgaaaatgtgagagaagtccgtgcaacaattgccaggatctcgactggatgtctaaa

SEQ ID NO: 4467 - DNA, 393 bp, Zea mays
cgagagcgtgaagcaccgggtggtgaccaacagcctcaagtccagggtttccttcatctacttcgcgggaccggcgctggagcagcggatcgcgccgctggcgcagctgctggcggagggcgaggagagcctgtacagggagttcacgtggggcgagtacaagacggccgcgtacaagacgaggctcggcgacaacaggctggcccagtttcagaggtgtagcatctaagctagctgcttagctagcactctagcagggcggcccccggccggtcaagctgagcacacaccagctgctttacaggacgacaacagcaacaaccatgacgaacgaggacgagcgagtctgcttgcgagaaatgatggcgaagaagaagaagaagaagaaaaagc

SEQ ID NO: 4468 - DNA, 507 bp, Zea mays
ttctctctgtcattctcctcagatcaacggcttccagccgatacaaaatcaacctgaaatgtcgaaatcagttcagaacggtgtgccaaagagtaatctgaaaatatataaaaaaaattcccatcgaccaaagaggcagaaatatagctcacttgtaagtctggagcaggtcctcggcttctttcagcctccgactgtcccggctaatcataggaacctcaaccattgtgttgtaaggtccactgaactccttcagaccatcgacatggaacgggtttatcagacgggagtccagagtcgcctctctcctgtatttgggactccacatgtcccccacatactgcggagagattgcgctagtggaggagaacgacgacgacggtgaagaggacgagccgtggtgaaccaagggaggatctgcgagtctgcagtatatccccgccatgcatctcaccatctcctctgacaggttgtttggagtttcagggatgtggtcagctacattaa

SEQ ID NO: 4469 - DNA, 784 bp, Zea mays
acaatgaaataggatttgaatcgacacctggtccttcaaactggagcgggcctgggtttctgtagacatcttccaacaaaaagctggaagaattctgtctcaacacactgcaaaaatgcaagtattattgacaccaaaggccatatgtacaagatacttctagataagaagctaagacagatgtcgaagaccaagagtaactacgtaactcttggtacctaggaaagttgagctgaatcatcagattcgggatgtagtagtagctgcattagagaaacaaagatgttgaaacaactgaactctgatgtgaaatacaaacatcctagaattatcaaatgaaacaatacatacctgcttccttataaaagggggcaaaaactcagagtgcagatgcccatggtgaaagctgagaagagatattctcaacagaaacacctttggcatggaggccatggatttcctataaacaaatagctctagtgagtaaaattataaatgggtagtcataagacgtgtaaacgtacctaaagcagagcatatagttcaggaatattctccacaaggccctcaggaaagaataaccacatggttcttgtctaggaaaggtacaaggacgatcaataaattgtcattataaagataaaataacacatggaacatctcatcttctcatagacaagaaagatgtagaccaacctttttcagcccttgcctaaactacatcacaaatcagcttcgtaatatcaaaaattgtaagtttggaagcagccacctcctgtcctag

SEQ ID NO: 4470 - DNA, 359 bp, Zea mays
acataccacgattcatgatgcaaacttgaaggtaagcgcaggcatccactctgaaccactgctgtcaatgcaagcaaaaaacaacttacaagggcaatccacgccgtcttcagtgccgccaccatgttcctgcttggggggacatcaccaaatgatagcatcttgagttggctctcctgcaggcgatcttcggagagtatataattctggggaatggtgtgtgccttgtcgaggcatgtgtcggagtgttttactgggaccataatcttccatgaaaaaaaatgatataagccttcggtatgtaatcctgagttttcggtgtaattcaaaacgctggtcttgtgacaacatgtcgctag

SEQ ID NO: 4471 - DNA, 839 bp, Zea mays
  misc_feature (795)..(797): n is a, c, g, or t
  misc_feature (807)..(808): n is a, c, g, or t
  misc_feature (815)..(824): n is a, c, g, or t
  misc_feature (826)..(826): n is a, c, g, or t
  misc_feature (828)..(828): n is a, c, g, or t
caggtcatctaaaggatcttcaggaatttgtggcaaaataagcacatgtaccctaaacaacaaaatcaatagagtttaaagttattataaacaaaagtaaagcagcaaaaccactcatttaataaaataatagaattaaacaggtggtcatgaactacctgtttctcaagtaagaaagcaagaatttgtcatttgataactcacgatcttccaaaataactgcgctcacatcataccctcttagcaacaaagtttcatacgcagacaaagtggatgaaataccaccaagacggccatctccaacaagaatagcaggtaacctaaaaggcctgtcaagagttgaaagaaatcaataatagccagctgaaagatcaactcaacaaagagatgtttaaaatgttcaagctaacagttaacatcacaaggtgatttaagaggttaaacaacatcatctcctttttagtagctaagttttttacattggctcaccaagactaacacaaccctcctccttaatcaggacttgggacccgctatgctgaaacaccatagcaccccaacataggcggggctatttaagagattaaagcattttgaattttaatctaaaatgtttggtaacatcgcttgacctaacagttatttcacatgcaaaacttaaactgcaaaagagggaaaagaaataaaatatgcagattatgggcgtatgcctctaacacagatcatcacaagctttattcgacgaattcacaagctcaaaaactacgattcaggaatcaataattgccaatagtnnnctatccagannatatccnnnnnnnnnnancnggagtatataa

SEQ ID NO: 4472 - DNA, 544 bp, Zea mays
cacggcttccgggacctgctggggctcatgatcaatgccagcgacaagaaggaggagaagaagcaggaggaggcgcgggcgatgcccgtggaggacatgctggaggagtgcaagacgttcttcttcgccggcaagcagacgaccaccaacctgctcacctgggccacagtgctcctggccatgcacccggactggcaggagcgtgctcgccaggaagtcctcgccgtgtgcggcgccgacgagctcccgtccaaggagcacctccccaagctcaaaacggtacaccagctccccgttgcacattcattctttccaatccaaaccaccaaacatatgcaggggcatttcggtaactctgctgcgacaaaaagtctcactttgtttgttacttgctcccctctctctctctctctccttctcagctggggatgatcctgaacgagacgctccgcctgtacccgccggcggtggccacgatccgccgcgcgaagcgcgacgtgacgctcggcggcatgtccatcccgcgggacaccgagcctgctga

SEQ ID NO: 4473 - DNA, 629 bp, Zea mays
  misc_feature (458)..(471): n is a, c, g, or t
  misc_feature (478)..(480): n is a, c, g, or t
  misc_feature (566)..(566): n is a, c, g, or t
  misc_feature (568)..(569): n is a, c, g, or t
  misc_feature (587)..(588): n is a, c, g, or t
  misc_feature (607)..(610): n is a, c, g, or t
atttgctgatgtgttaatttagttactgcttgcacactaattaaaatcggctgtttgctttcgaagatgctcatcgcctccgcaccagagaacagttcgcccgcggtgctgctcggagtcggaggatggacgaaatcccagctggtccaccggtcagtggtgcctccgagagggcgttgccggcacaagaaaggagcaagcaagaggcggcaggacaggaacatcacatccctgtcttctccaaccccgatcttggccagcaagaacaggaggagcagccatcgtcatggccaacgcctgctgctcctccagctagagcgcccaaggatgaccacagtaagacgcaggcagtcaaggataggctgaaggacaagaattggggttggagaagacagggatgtgatgttcctgtcctgccgcctcttgcttgctcctttcttgtgccggcaacgccctcnnnnnnnnnnnnnntgaccgnnngaccagctgggatttcgtccatcctccgattccgagcagcagcgcgggctaactgttctctggtgcgaaggcgatgagcatcttcnanngcaaacagcattttaatnngtgtgcaagcagtaactannnnaacacatcacaaatggaat

SEQ ID NO: 4474 - DNA, 760 bp, Zea mays
ctactgtaacaaaggtcgaggttgttggtatgggtgatcgcgtttgtgtggatctttgcagtatcatgcgacctggtgaaggccttctggtttgtgtatatctctcacctgttcagtgttgctacacataggatttttttttgtaaaactgttaaattagttcaccacgttgaactagatcaatgcaccctcatagatttacctttctgcattactacctctattgacacgtggcattttctttattcctgttatcgacataagcatactatcctgcctctgaagtctcatgacatcctacttctaggttggatcctatgcgagaggaatgtttcttgtgcattctgaatgcttggagactaattacattgcaagcaggcctttcagagtcaatgcagtaagcttaaaacaaaatagatggccacaagctaaactattatatgtatgtagtgtattgcaacagacctagacctataagagtttgttctctcccacttttaggggcctgtacatgcatatgtcaccgttcctggtggcaagacaagctacctctcagagttggggtcaggaaaggaagtcatcgtgatcaatcagagtgggctatggcgtactgcaattgtcggtcgtgtgaagatcgaatcaaggcctctgatccttgtagaagcgaaggtaatacagaaaggacgttctttactgcacgtgtaatgtgtttatccatatacatgtccatttgatatccatatacttgcaggatcactct

SEQ ID NO: 4475 - DNA, 408 bp, Zea mays
atgcaggggtacctcgacatggcgcaagggatgctcattgatccgccaccgatggccggttcctccaccagtggcggcggcggcgacgacgatgacgacgacggtgaggtcaagctctggagctactgatggccgatcgcacgtgtgtctgaaggaagacaggttgcattgggcaaataacttccctgtacagccttgggaagaaccggtaccggtgaaatgtactggccgtggccctttcccttcggttcgtctatgctatgtaatgttatgtatcctgctcttctgatgattaagggtattcaggagaagcagaagactgggtttactcagttagatcgtttagtttaatttggagctagagatgtacctgcatgcatatataatgcatgcacggtaactgtgata

SEQ ID NO: 4476 - DNA, 369 bp, Zea mays
ctagccgtcacctgctcgtatttgatccgcgagaggaagaagctggccgacatcaagcagagatacttccgtcagcacgggggcctgctgcttctggagcagataggcagcagcgcgggcgcggggcaagcgttcacaatcttcacggaggcggagctcatggaggcgacgggccgattcggcgacgagaacgttctcgggcgtggcggccatgggaccgtgtaccgaggcgcgctcaaggacggcactgtggtggcgatcaagcggtgcgtatcgacgacgacgacggacgagcggcgcaggccggaaggagttcggcagggagatgctcatcctgtcccaggtcaaccacaagaacatcgtcaagct

SEQ ID NO: 4477 - DNA, 525 bp, Zea mays
tccgaagctgtccagcttctgcatcctgctcttcatggtgcagtccgtggaccggatcgtgcagtgcctcgcgtgcttctggatcaagatccgcggcatcaagccgcgtgtccccgcgtccggcggcaagccccgtggaactactggaaggaagagcgcggatgccgagaacggtttcgccgatggcgacgccgacggctacttccccatggtgctcgtccagatgcccatgtgcaacgagaaagaggtcagtagctagtagcacaagaaaactcacagttcgatacaccagtcgatcggtgcttcttacgacgtgacatgaaggagggacggatgaatcaaacatgttatgcatgcaggtgtacgagacgtccatctcgcacgtgtgccagatcgactggccgcgggatcggcttctgatccaggtgctggacgactcggacgacgaggtgtgccggatgctgatcaaggcggaggtgaccaagtggagccagcgcggcgtcaacgtcatctaccgccaccgag

SEQ ID NO: 4478 - DNA, 361 bp, Zea mays
atcgctccacttcccagcctctgcatagatgttcgacaagacagcgtagttccctgcacttgagggctgcaaattgctcagctcgttcactgccagttctgcatactccacattcttgtgcagtcggcatgcactgagcaaggacccccatatgacctcattaggctcccagggcatccttttgatcatgtcaacagcctccttaatgagccctccacggccaagaagatcgaccatacaaccataatgctctatctgaggcttaatgccatagtctgtctccatgttggcaaagaacctccgtccttcttccacaagccccatgtgcgtgcaagcgctgagaacattgatgagtgtcaca

SEQ ID NO: 4479 - DNA, 502 bp, Zea mays
  misc_feature (395)..(396): n is a, c, g, or t
aatcactctcctcctccccgtcagcgtcagcgtcagcgtcagcgtcacgctctgacgacgacggcttctttcttgcatggtcatcgatgagcgtatcgagcagttcgtcccacatcttgttcacccttcgtgccctcgcacacaccatcctcttgaccatgtccagcttcaccagcaccgggaagtagtcctctaggttgaaaccccctatgagcgacgagttggcctccaccagctcccggaagagcttgttccgcccttcctccctgaagaacttgccggacacagcgtggcaaacgatgtcgttggcgaaggagttgagctgctcgctcaggtcgaaggcggcgcctgcggtggccgcctcgcggatcttagacatcaccagcctcacctannatatcatttgtgggtgcttgttttcccaattgtttgggtcaccttacataaagaggaacaagttgccctagctaagccaataatcgcgcttctatcgaaagattac

SEQ ID NO: 4480 - DNA, 790 bp, Zea mays
tggagcagagatggcagacggagctgcactcgcctcttcactcggctgccgcctttttgagcccgggcatccagtacaacccggaagttaagttcttccgcactatcaaggaggagttctaccaggtcctggataaggttcttacgacccctgaccagaggcatgatatcaccgcacagttgcatgctttccgcaaggcacaagggctgtttggttcgaacattgctaaagaggcccgcaacaatacccctccaggtatgcatcgtgtcttatgtctgctgtactgttctggtattgttatgaatgctgcaaaattgttctagcattgttggattgtttttatgtgttgatgttgccatttttttcaacagaaaatcagtacattggtatcactggccatttatatcgttaatataataatatgcaatgtactgttgatttctagtcaaaataattgctgctatatgcctatatgtgaagttctctcttggtatctcactggggcttgattttacatttcaaaatatggctaagggcctgtttggtagagctgccactgattccgattctctgttagaagtgattctctgagagaagtgattctgtggctgaaagtggttctcaagtgaaaccatatgataaaccctatagaaagtctgactatatggtaggagtgaatcaggagattgtaaatggaggacctgggtcagaatgttactcgattcatctaaaacctccatccttgtaaatggcaaccctggccccttgttcccttgtaaatggggcctgc

SEQ ID NO: 4481 - DNA, 412 bp, Zea mays
ttggatacgatgagatcaagaaccatgtcatggacacggcaagcgtcggcgcgaccatcacactgaatgccaacaggctggatcatgctcctgttgataaggtcgttgaaatagcattctcctatctcctccatgtcttgtccaccttctgcggtgataaagccttcagcgacccaccttcttatcaaccggtccctcttgatctcatagtcttcaggaaacacgcctagatacaacaagcatgtcttcaagtggtaggggagatcgttgtagctaatcagaagaatcttcttcatctcttccacgtctgtatcttgaatctcaagtgctgaaccaatggacttgagcgtcttctcccattcctcttttgtgatacccttagtggccaataggctagcgactgtaacgattg

SEQ ID NO: 4482 - DNA, 493 bp, Zea mays
  misc_feature (403)..(407): n is a, c, g, or t
  misc_feature (411)..(424): n is a, c, g, or t
  misc_feature (427)..(427): n is a, c, g, or t
  misc_feature (430)..(432): n is a, c, g, or t
  misc_feature (441)..(441): n is a, c, g, or t
  misc_feature (455)..(455): n is a, c, g, or t
  misc_feature (464)..(464): n is a, c, g, or t
  misc_feature (467)..(474): n is a, c, g, or t
  misc_feature (483)..(490): n is a, c, g, or t
agcgggacgaacatgcccgacccgacgctggacgcctcctaccgagccttcctgacacagagatgccccaggaacggcgaccccacagccctgaacgacctggacccgacgaccccggacaccttcgacaacaactactacaccaacatcgaggtgaaccgaggcatcctcaactccgaccaggagctcaagtcgtcgcccctagcgcagggcaccacggcgcccatcgtcgaccagttcgcggccagccaagacgacttcttcgcgagcttcgcgcagtccatgatcaacatggggaacatcaagccgctcacggacccgtccagaggagaagtccgcaccaactgcagaagggtcaactgatccaattaagtcgatcggtcgtaattaatgtgtgcagaannnnntgtnnnnnnnnnnnnnngtntcnnntctttagtntgataatcctgatncaaaggganttnnnnnnnngcattttgnnnnnnnnggg

SEQ ID NO: 4483 - DNA, 380 bp, Zea mays
agcagagccatggacaaaaaggagcaggggcacgattcggcgacattgcggaataaggggcgctcggccgggcgcctgagctggaggagaggagcaccggcagagagagcggaggccggggagaactggcggctgggcgagctgctcggtagagcaggaaatggagacggagctagcagctgtgagcggatgaggctgagggagaagttcggctggggaaagaagtccgcacccgtgaaaaaaatcaagcgagggccggctggaggatagagccgactaggatttttttagatttttctgttttcttcttaatttttttaataaagaaaattgctgatatattggattaagatttttagtgatgtaaagtgggtctgcca

SEQ ID NO: 4484 - DNA, 550 bp, Zea mays
  misc_feature (446)..(447): n is a, c, g, or t
caaggagaactagacatttgcactgtgcaattgaactcgaatctagtcctcgtttactcgaatcccttactgtgtgtttaaatatatgagatgaatatcttgtaatgggatcgagttttggaggtaaaaaaaatcgtagatccgggccccgcgatatttctgttattttctgtgatgattttagtgcatctatgcacattcacgcggttttaaaaaaaattagggttctaaccctaattttattctgtgactttttcttatctgttcttgaccgtggttcaaaatcacgagtctctttttgtctctgttgacatatgtagcgattaaggttaggtcataaaaccctaactctaaacagttgtgagagctctctggtttgaggccgagacataatatgtcccttacagtggccgaacctaaatcttatggtaaaagatcccaatgtnncatatcatttgtgggtgcttgttttcccaattggttgggtcaccttacataaagaggaacaagttgccctagctaagccaataatcgcgcttctatcgaaaga

SEQ ID NO: 4485 - DNA, 526 bp, Zea mays
ggttgaagcaaggtcttgatctcgttttggcaatattagtagaaaatgaaccaattacacttgcagcaaattctgctcgagtaccaacgcttatgatagctgggcctgttccagatcgcatcaccatgccacagcaggttcctgatgctcaggaaagcatggatggtacaacactatcgtttgactctcttgctgcaaggcatgctcagttcttaaatgacgcgaacaagcttgtggtaatttcttgtgctctgatctatgtggtgcccacaatacctgtgtggctgcatattgtacattttaaatatttttagttaggtcaggtctgaatgtttgttctgaaatcatgtaggtggcagatatcatggctccattgaaggaacttgcatttgctgatcccaatgtcgcatatcatttgtgggtgcttgttttcccaattgtttgggtcaccttacataaagaggaacaagttgccctagctaagccaataatcgcgcttctatcgaaagattaccacaagaggcag

SEQ ID NO: 4486 - DNA, 524 bp, Zea mays
ttctcgccgcgctgctggtgagcgaggagttccaaggcatagtgtcatccgaaacaggaagctcgtcaagagaaggtgagcaggcaggcagtggaccagaaggcacagacagcgtcgctgtccctactagcgctgcggcggctgatacggaggcatccaccgtgccaaatagctccacaggtgaagctaatgttgtgtgggcttttatatcatgcatgatctgcttaccatagtgactagggggctcatgtgttgggcttcaaatctagcttacctaacttgcttggtactgaacggtatgacgttggttgggttggtggctttcgtgcagatacggctctggtgtggctggcggccataacgagtgtgatggtgctggtgtcctccaacctcggtggctcaggctacttcaacccgtgaccgtgagtgaaggcaacactggctgtaacttgtaagggtgacaacaagagagttctcttcttgttcttgtttttttttcttttcttttggaaggctagtgaaga

SEQ ID NO: 4487 - DNA, 389 bp, Zea mays
  misc_feature (381)..(381): n is a, c, g, or t
acagcttcagaaacccgatgattcattgcgagtaaatttaacatgcggccaaaagtagccatcgatggaacaaaacccttgcttatcatttctgcaagatgcgcatatgcacggtcaacatttgccgccttgcacaacccatcaactagaatgcgataagtatacaaatcaggtttatatcctttgctgatcatttcaccaaaaatcttttcagccatttgcatattcagcttactagaatacgcaccaatcagaatgttgaaagtatcagctgttgcagagtaccctttctcatccaacttctgaaagagtaggtatgctccatcaagatcaccattcctgcagaatccatgaatcagcgtgttgaaactaactgcatcnaggaacca

SEQ ID NO: 4488 - DNA, 381 bp, Zea mays
gttagcttttcttacacgcggtctgtgaagccacaaatcaccaataaacaaacacaagatcgacgctgcagaggaaggcatccggcgggtggagcgtggacatataatatactagtagggagacgtagctcgtggtcgtcgtcgtttaataagaagcacttaattaaccacggcttaaccttaatcaagcgatcgtgacaagtacctaaaacaaacagcctagggtagcaggtacatcatcatgctcgggtccggcacgtccgtccagcagctcccggcgttccagtacgccgccgcggccgacgcgtcctcgccgatctcgaacatcccagcggcgtccagggacgcgaacggtgccatgtcctcggatactgaggagta

SEQ ID NO: 4489 - DNA, 378 bp, Zea mays
tccagctagcagcccgtccgtcgtctctcgtccaagaagcatacaactactaatggggaggtcaccgtgctgcgaccaggacgcgggcgtcaagaaaggcccgtggacgccggaggaggacaagctgctggtggactacatcaacggcaacggccacgggagctggcgccgcctgcccaagcacgccggcctcaaccgctgcggcaagagctgccgcctccgctggaccaactacctccgcccggacatcaagcgcggccgcttcaccgacgacgaggagaagctcatcatccacctccactccctcctcggcaacaagtggtccgccatcgccaccaggctgcccggccggaccgacaacgagatcaagaactactg

SEQ ID NO: 4490 - DNA, 904 bp, Zea mays
agggcgagcagttggtgtcgaacatatcccagagttggttgctacttctactgaaaacatcaagaaaagtgcagcagccccacatctaaatgatggatccctcagtatacacgtttctggtaaatattagcttgttttgtgctaccataaaactcagccatgctggagcagcaaatttccaacaggtccgatgctgacttaggtgtgcacataacaacttagttgctgtgagctgagttatagttcagatgaatatatcattttaatagcacttatcctttttcttttattgactgaataaaggaacctgattcagctaatgaggttgtccaatactgctctactagcagggttttgttatattgcttgtcataccatgtggatctcccccatttgtgaggttcttgtcctcgtatgatgaaatttgctgcagctttagagcctgtttggttcgtggctaattgtgcacactttgcttaagtttagtcgtctaaattgaagaactaaccttagacagaaaagttagacaaaatgtggcaagttaggcagcaaaccaaacatacctttagtattccttagtttggcactctggccttatgtgcattcagcattgttggttgttctatatacccttaacacttgatgcaccaagagatgtttaaaatggatgcagatggcagggaaggttggccagaactggcaccctatgaagccatccatgttggagctgcagcaccgcagatccccgaggcgctgatcgagcagctgaagcccggcggcagaatggtgatccctgtcgggacagtcttccaggagctgaaggttgtggacaagaaattggatggcactgtcagcataagagacgaaacgtctgtgcgctatgtgccgctcactagcaaggacg

SEQ ID NO: 4491 - DNA, 378 bp, Zea mays
gatcatgcagctccgacgatcctctccatgcatgggaattgggagcacaagagctagccttctcgtacgtacatgagaccattctatttaattagctggctatatatttactatatcttgctacatacctagtaggctagtacaacataacacgccgccactgcaacaaggaccatgcatgcatgatgtgtatatgtggtacgtctggttattattaggaccagaaaagttatgttttacgatgtagaaagatgcatatgcatgtattcgaccaatattacacataagaatctacgcatgcctgtagctagctagggtcatgttaaagcaaaaggtaggcaggcttgtctatcattgactgtaaccttccgtgacaca

SEQ ID NO: 4492 - DNA, 501 bp, Zea mays
  misc_feature (492)..(495): n is a, c, g, or t
gtcaaggacctcaacaaggagcagcggctggagctggagagcggcaccttcgatgccgtgctctgcaccgtcagcgtgcagtacctgcagtcccctgaaaaggtacttaccaaattcatctttttggcctttgcagttcctctctactggcatcggcatcagcgcatttggcgattaatttggcatgaatccaggttttcgcggagatcttccgggtgctgaagccggggggcgtgtgcatcgtcagcttcagcaaccggatgttctacgagaaggccatcagcgcgtggcgggacgggaccgcgtacagccgcgtgcagctcgtcacgcagtacttccagtgcgtggaggggttcacgcagcccgaggtgatcaggaagctgccgtcggccggcggatcgccgtcctcgccgctggacgccgtgatgaggctgttcggcgtggcaggctccgacccgttctacgcagttatctcgtacaggaacttcaagnnnnatgtga

SEQ ID NO: 4493 - DNA, 450 bp, Zea mays
tccataacaaccaccaccgtgaccaaccaatcaataacattcccccgctcttcattttcgcaattttgtatggaagcaccaacaaggcaacaattccatcagatctatgaacaaaggcacaggccattcaactcgctgctactaattacaatgactattagcttctgtattcccacagtaggctttcttggcttccaacaacactagtgtgcactaagcccttgaagccatgtcaccccaaaaaaaaattctggaaagaataaatccatctatcaccttggccgtgtgttcagttcatacaacaggtgcaaaaatgcttgctcctgaagcagatgccaggaagtgctcgagacatggagagctcctcggcgcaaaatgagacaagctcaacgcttcaactgcgggaagtgaagcctcgtgctcggattctaccgctattgcttgcaagag

SEQ ID NO: 4494 - DNA, 1005 bp, Zea mays
  misc_feature (921)..(922): n is a, c, g, or t
  misc_feature (960)..(968): n is a, c, g, or t
ggaaaaaaaaggaacatgaggaacataaatatattgaaatttagaaattaataaaaataggcatttgaactgcttcacttattctaatggcagaacagtctgatccagaataaggttaaagtagtcctctaagaaaatcaactacaaaaaatggccgcaattaatacagaaactgagaaaccaaacaatgatagcaacaaataccataaaaagtagcacgaaacaatcctttcatgctcgtaagtagcaactggccgacaacaatcttttttttcttttgagtcctatgtttatgtggggaaaaactatacaattatcctaagaaaccttcaatagggtgcagattcgaaaagggaaaaaatgaagcaggttgtctaaggaatctagactacagttttctttaatgatgtcacaagtctttgttagtaatctgtaagaaaaaatgaactactaacgtgccttctttatccttgggtagcatcgtagaggaccactaaataatagagacaactactaatcatctaaaactttgtaacttaatacaccctcagagaagcaatgatgtctcaattaagtatcttaagcagtgatgtctcaaaaattgattttacaagatattaggatcactggcctctaatatacaaatcatagtagtctttgctgctacaagtacaactgttacaacctacaaacaggcaaaaagataataaataatttgaagaaagcattttatccttatccttactgaccgagaagaataggaagacagggcatctttccccactgtccattaaattttgagcttcatggtatgcagcatccagcttattgttcccatttggtgtacttgcccaaacgttgtatttgatacctttatgaatgtcatcttcactatatgactttatcataaaaaacttggcnngattatattgaactgaaaaatctgatctattatactgnnnnnnnnnatcaatggacttgtgatatctttcacagtggaggata

SEQ ID NO: 4495 - DNA, 395 bp, Zea mays
tctcaccgataaccaccaaaacttggttgtcattaacagcactgatcagctcctttttcagcctgaatattggaaggctttgtctctgctcctggatcgaaagcctcgacttctgcccatatgttccggccttcccatatgtcatcttccattccggcacactctgcgctgatagtcctgtgcccatcagctcctgcatcagataccgtccacttgaaatgggatcctcccatgagcggttaaggtcctcggggattgcatcaaccattcctctttgctcctgcgtgtgaatatcacgcctctccttagtaagtgcggattgtagcgctgccgcacggctcatcgacccctcaggattcatggaaatcctcactggagacatgtcagaatgagga

SEQ ID NO: 4496 - DNA, 477 bp, Zea mays
tgttgacgaaatctttcactagttccccgtcatcttccagcctgatgtctgcgatgtctccaaattgtgaggcaacaagtccatatagtgtccaagccactgggcaagcccacgagtaccatctccaccatattggtatcctctgcaagccagtcacatgtatgattcagcatcaacagtacaacgaaaagtgaggtttagcatagtacaagagtttctcttgggcacttaccgggcgggggataaggaagccggcaaagatgttccatattgcgtagaatgcagttgagactatagccgcaatgtcgctgtttggtgtcatggcgactgccatcattccataaaatgtgaagtacatgaaggtgaagaacatgaagaacatataccagaagaactttgcaactgtccaatcaaagccaatcaggctgtagacaatgagaccatacacaactgtctgaaggaagatgtgtgggatct

SEQ ID NO: 4497 - DNA, 330 bp, Zea mays
gcgggtggatcgagactgaggcaacgatggccagccattagagtgagtactcacgttgggcaggatcttgcagtcgtattttttggcacatttgttgttgtcccacacttctttgccctggccgtcgagggtgcccttgccggtgatgacgaggttgtcaacgtgcacggcccggagaagttgaggggaccagcaaggtagtcgcccttggggatcatgagcgtctgcttcccttccttgccgcacgccgcctcccacgcatcattcagcgctttggtgctgtccgtcttgccgtcgcccttggctcccagcttggatatgtcggaagac

SEQ ID NO: 4498 - DNA, 383 bp, Zea mays
acggtgctgaagaggattctttggctcacaaaatcaatcagacatggttatgcagataacattttgcaccagtgggcaggagttaatctgcagcctgctttaatggaacggttgtttgtggaagaacaccctaagtgcctttattataatctgaagatcatcttttcatggaacatggaattcccattcaacaatggagaagattctagcacacttttgtccttgtgggataggttagttcatttaaacagcaccatgtcacatgcaaaaacgagagaaatagttctatgttgcatgggtatgtgcatgaaattgttcactaaacaatctaggggtggtatttcaatggattgtcttaagaccagtgagatctctgcatcctt

SEQ ID NO: 4499 - DNA, 1181 bp, Zea mays
  misc_feature (837)..(837): n is a, c, g, or t
  misc_feature (880)..(880): n is a, c, g, or t
  misc_feature (897)..(897): n is a, c, g, or t
  misc_feature (958)..(959): n is a, c, g, or t
  misc_feature (1019)..(1021): n is a, c, g, or t
  misc_feature (1063)..(1063): n is a, c, g, or t
  misc_feature (1088)..(1091): n is a, c, g, or t
  misc_feature (1094)..(1095): n is a, c, g, or t
  misc_feature (1122)..(1126): n is a, c, g, or t
  misc_feature (1128)..(1132): n is a, c, g, or t
  misc_feature (1135)..(1138): n is a, c, g, or t
  misc_feature (1153)..(1155): n is a, c, g, or t
  misc_feature (1175)..(1175): n is a, c, g, or t
  misc_feature (1177)..(1178): n is a, c, g, or t
agtatgcattctagcagtatgtaatatgtgcaacttccaatatattactgttatagttttaatatattgttttctccgaacccctgtctgtccaatataaagcgacaccatcgtacatgtgagaacgaccatgactaggactgaaccttaaacatgtgctttgacgaatgatagatgagaggaccttttaaaccttagactgaaatttgctctcatggaaagtcgaacacaagaacctaaggagtgctactagagccatctaaccaacttgaggccctttcagaaatgatgtaaaaatattagtgaagacctgtttttggtgatgttattgaggtgacatacttattaatgcacttttcgtgtacaagtgaacacagttttaatataagttgtttagagacgatacatatctttctttggtagttgtgcatgctagtagttgttgttcttttgggtgatgtttattttggttaaagcttgcctatgttgccaacttgacatggggtccattactcggtggctgtgcattatatttcactaggaaagcattttttttcttacaggcagaacttatatggctcttaaactttaacctcttcaggttactcaagagaagaaatattgggctgtaactgcaaagtcttaaatgggccaggcactagcttggaggttttagaggaggtgcgggccaggattatatagcttgtatgaccacattctccataatatagcttaccttttaaaatttatattcaaaattggacgtacagataaatcagcatatttgttctgagcaggcatgcacggtggatctactgagttacaggtgcgttgctntgtgtttgtacttgtagctagtagctaccagctcaggttatgnggttatgcaaggaactnaacagaagttttgttgcctgtgctttctatcaggaaagatggaagttcattctgcgatcanntacatgtatctcctatccgagatacttcgggcgaaggttcgcttacatctttctcaggtnnntccctgaaagcaccgtctctcaaatgcattaaataatcgccncgcaattgctatgtttgtgtgctannnnaanntaaactacggaacagaatagatttgcnnnnngnnnnnaannnnatattgcgcttttannnaaccatcatggggaaaaagntnngcg

SEQ ID NO: 4500 - DNA, 402 bp, Zea mays
ttttgcaagtgtggcaacatggggctggctctgcaagttgtattggatatggaagcaaacaatgccaagccaaatgtcgttacatatagtacgcttatggatggattctccaaactggagaaatatgatgaggcactcaagttgcgtgaaaagatgaagtctttgagaatacaactggaccgagtttgctacaacaccttactggccatatatgtgaagacagggaaatatgatgaaattgctactgtatgtgaagaaatggagaaattgggcattgagaaggacactgttacttacaattccttgattaatggatatggaaagcaaggacgcttggacatggtcgctttccttgttcaagatatgcgggcgcaaggcgtagctcctagtgtgctgacataa

SEQ ID NO: 4501 - DNA, 542 bp, Zea mays
gacgcctccgagcgcttcctgttccggcaggtggtggagcccagggagttcagggtgttccgctgcgtggcgcggtacgggtaccgcgactccctcggcgacgaggcgcaggacttcgtcgccgcgctgctcgagagcctccagtgctacgtgcgagacgtcaacctctactcggtgcacgagatgcagaacgtcagctatccggtctctcgggaccagagcttgtctcgggagaagccttccggaaggcacgccgtctatgctgaggagatgatcacgcccatccagtccttctccgagctgtcccatggtgccagcagcaatcgtttaccgcagtttcagcaggtgatgacagaatctacgtgctaatcagtttagtttagctatgagctaagtttcagtgatctatctatattgtagtatatgtatatatgttcaagtttgcgatggttcatgagcaggagcaggcatcaaagatgaatattgaggagttggccaggatcgaggaggaacagatggtgattcagagagaagcagagaag

SEQ ID NO: 4502 - DNA, 627 bp, Zea mays
gcaagaataatggggatgatgaaccctgacgctgttcttcgcttccgctttcaggacgttctggggaggtcgagctccgtcgtgtacgccgtcgcgctgctggcgtccgggcagagcaccaccatcagctgcacgtttgccgggcaggttatcatgcaggtaattaaccagattgatccggtactactggtgaatcatatagtggatagagagaattgagcatagctgacgggattggcgacgtgttgcttaatttgcaggggttcctggacatgaggatgaagagctgggtgcggaacctgaccacgcgcgccatcgccatcgcccccagcctcgtcgtctccatcgtcagcggcccgtcgggcgctggcaagctcatcgtcttctcgtcggtgagcaaataaaatactcgttccagcctcgtcatctccattgcaagcagctgctagctgtctgccctgttctgacggcaggcaagcgggtgcttgattgaatgcttgattgtttgttgcgtgcagatggtgctgtcgttcgagctgccattcgcgctcatcccgctcctcaagttctgcaacagcagcaacaaagtcgggcccctcaaggagtccatctacgtgcgtaacactg

SEQ ID NO: 4503 - DNA, 370 bp, Zea mays
  misc_feature (361)..(362): n is a, c, g, or t
aaacacttctcctgttttccctcacttgtgacctggcttcacctctgttaattagagttgttgctcagatgccaatttgacacctttaaatttctgaatacactattcctactccctcaataacgtgcaattgtgcatttgatcaaccattagtttttatatatattgtgaattgaaaacaaaatataaaaggttcagtcttgctcctcaagcaagattgccacatggtgaaaatagctcaatccattgtacggcttggtatgggactatatatatataatgttttttttaaaaaaaacttgtgcacgaatttctttttattctttaaaaaatcgtgtacgatagtcagttggttctcatnntgtggacg

SEQ ID NO: 4504 - DNA, 705 bp, Zea mays
  misc_feature (697)..(697): n is a, c, g, or t
tcggtacttgattttcaagacagaatgtacccttttttcttctttttcttaacaaagttaatgtgaatatgtgattcgataatgcaaaaaaggctacattttaaagacttagagcctgtttgtttgggattataatctgaataatcccaaacaaacaccccattagtacaaacctcatcagcaagtataaccagaccttccttccgacaaaactctactatctcctcctggtttgtgacggatagcacctataactaaaggaatgagatgtgttgacgaagagaaactctggtacaacctgagctgaaacgagattaaattgaaaattttccaataaccagatcatcactggtaagaactaccctgaaaattttcatctggatgtccgttttctttattctctaacatgtaaaaggattcaggaaaacaatgtgccatatatacctgtccagtagggttgccgggatttattaccaccatagctctaacagtgaggccagccgaacgagcctcttccaagcacctcttgacttcaaagatctctaggccccaaccgttatcttcagtgagattgtacggcacctggtcacagttcagtattgtagttatcccaacccaagcatagagcacacacgtgtgttttgtcttctaatataagaaaccaaaaaaaaaaaaattgtttgaaaaaggaaaaaancaaggaat

SEQ ID NO: 4505 - DNA, 376 bp, Zea mays
cttcggcctggatctagggttgtgtggggaggggttctggaagccttggccgcgatgggcgagtcagacgatgacgcccgcaccttcaaggtcgttttcaccaccaccggagaggagcagttccgggagcttgtgagggagaagctgcgcggattcaggaggggtctggacgacaccctcgtggtacgatttacttctctcaccccggctcgctagattctggtcttagcatttgatttcggttgtttggggacttgggttctctgcagctgtagattctggtcttagcatttatcatttgatttagatggaacttaattggcacttaacagtatgtaaaggactagctagaattcaagatggttgcccaagtacg

SEQ ID NO: 4506 - DNA, 690 bp, Zea mays
cgactccgtcggaccaacagatcaccatggtatggttggtgacttgacatggtatgcggtatgccacaacatgaaaaatgctttgagccctggactgaagcacacgctgaattctacaggagagcgtagcgaaggagagggaagataggaaggagacccttggagaaggtgaagctgtgatgggtgatgagacgtcactgttctattcagacatcatgcctcttcttgtaagcatgccaatgcaaagaaattactggttaccagtgtgtcaatttgctctaagcagccaccaatctcgcaaaaataaaaataataataatattggttaacaggtgaatgaagagccaactgttggggaagaagcgtacgtgtggtttggatctgtgttccctttggcttgtgacgtggtcaatgctcgattcacattcgaagctctcactgccaccacagctaacaggctgcactaccctgcctatgacaggttcctgaaagagatggataagtatgcctgcctgctccatgattgcaccaacaattcttcatctgtcggcactatcgttagatgtattgatgagcattacaaactcaaaatatgtattgatgagcattacaaactcaaaattcatttctaggtccttcaagttcttccaagatttgccaactccgactggagttgaattcgcctgagga

SEQ ID NO: 4507 - DNA, 1443 bp, Zea mays
  misc_feature (1385)..(1389): n is a, c, g, or t
  misc_feature (1430)..(1430): n is a, c, g, or t
  misc_feature (1436)..(1440): n is a, c, g, or t
tcttcctgattattttcctatatgttgctccagaataaatggtaagtgttgatcggtaattcttgtgaacgtaggtaatactgaatctctgactgtttgtgacctatatcccctgaaaacctgaatctcagattgctttagcttagcgcctacatggcagtcctcttgtcgtgaacattttgatctgtgttccgtatatgcttgtaggatcatagtgcggtggtcatgggattgggatctgctccgtatttgcaggtatcatgattgttttgcctggttacttgccttgttgtctgcattgaactacctgctatatgattggatatggacaactctgtggagtgtggacatcatattcgttagaaatcatcaatattcagtacccgcctcagtttttgtaagcaattgtagtacatgtttgttttttaagttgtccatcccattttagatcacaaagccagaacgcaatcgagccaaacaagatcatcttttctcacggaactatcctgcttaggctgaatgttctcatgaaattgtgtgttttgtgtgccagaggtatacttttttatgaatgcatgatgcttatttggttagatttttcttctgagttcatatatttggtcgattggaatacaaattctaggaatttattggtattaaagaagacaatagtctaacaatagagaatcgtagttgaccatacacatattatagagtccatggaatatgtatttctgtttgtggtgcatgactgtacacagattgtattctcctggtaaccttcatggtgttttccctgttctttgacagggtgaagccttcgtgtctcctcgagggaaagtcactgacctttcttgggacgtggaccactgacggcccccgtcatcccccatgacggtgatcctagggtgaagccttcgtgtttcctcgagggaaatctaccagtgcgggattgatttagtcagcaccattggacacaggtttcactgaatctaaacaattacacctagagtgtctctacaattgtgacctttatttatctggtgtcctacaaagggcaaacgataaccattttcaatgaacatagctaggattattgccatgtgtctctccttgttatccaactctgaatcaacaatacttgaaactatctgcttgagtgtgataaatatgttgtcgctacctgcatgtctcatgtcaattcaccaatagctatgagggaccgagtattttatatttatgattgctttggtttcatgaatcagggtttagttccattgcctggacccatcaatgaatcatggtgccaaggtcttgatggttcgacttcaaggtgtgctgagtaatataagcaggggcacgcttcgcaaagtggttcgttcatnnnnnattatgcatgtgtcaactaatctaattgatgttttgtttantgatgnnnnntat

SEQ ID NO: 4508 - DNA, 879 bp, Zea mays
  misc_feature (42)..(43): n is a, c, g, or t
  misc_feature (573)..(573): n is a, c, g, or t
gaggttcggaccggttcatttcagtgtattcgttccagttgnnttttaatggatacaataacataataccacttttcctacttctatgattacacaaatatgtagtgcactttattagtgtgttggcttgtgtgttccctgatgaatgtagttttccaataattgtaagcctgaccaaacatataacactgaatattttgtttgacttgcacaaactgtcaggttaaatggagacaagtagctttgctggagcgggatatccttttgaaaaatctaaagtgtgtattagaatcactgagaggccgggtgacaggcaaaactaaggatgaaatcgaggagtctatatctatggttggtttcttcatattattttgccaatttattggattacctttccccttggcacacacatgcacgcgcgtgtgcagttccagcaacctgctgggatggtgctcccttttcatttggatatttgattggggtgtgacgttttgtaggtggagatccttgcggttcagctctccaaaagagaagccgagttgcttcaacaaaaagaagaggtcacaaaattancaaaatcattaaagcaggtgtgttttacattgctgtataacttatgtaaatgtgtgttactaatttgaggaacgagaatctatttacttgaaatattttaaagttcttactatcatgattcagtcatcttgcactgtttatagttccccaccaacttgtttagctgaaaggttgttgtctgataggtggtagctatgttttcagaggataccttgctcaacatgtgagagatctgcaacaagttgacttaacatttaaatctcaatatcttctacaaaatacttcaaccaggaatcttaatgttcc

SEQ ID NO: 4509 - DNA, 675 bp, Zea mays
ctgcgtgctcaagagccagccttaaagcaaaagcgtctgaactggaggtacgacggatccaggacaggaagctaccttttctccctaatctaatcagttcatgtccatgtccatgtccagtcatttatcccttttaatgaacaacggtgtgcaatggccgactccttggcttcttgctacaggatgtgaagaagacgatgcagcggcgcaacgcacctgtgcaaaggacgcagcatctgggtcctgacagagctgtgcagaccagggatggagatgtggtcgatgcggagcccgcttcggacgcatcgtctgcgaggagcatccagagggccgggaacgccagcaggaaacgagtgctgagatctcgatgtataataataacccccaatcctaagttagccgattatccacaagacctggtgtcgatttcatctgaatccctgaccgaatgcccaatgtttttcagctctaggacctacggcatcttcgaaaccgatgctttcgaaggataggaatgcctctcagagacggtaaacactaaaaagcttaaaaccttgctaaagttttcacggttgagttttgctaagatcattggccttcctctgcaggaagtccatgagaacacccgagttgagcagccgcacggaggacttgttcgagatagaggacgtccag

SEQ ID NO: 4510 - DNA, 568 bp, Zea mays
  misc_feature (244)..(244): n is a, c, g, or t
  misc_feature (269)..(269): n is a, c, g, or t
  misc_feature (536)..(538): n is a, c, g, or t
  misc_feature (556)..(556): n is a, c, g, or t
aggctactcctgggggccgggacaccaactctttcttaggtatgctggtatctagccttgacgcgtcgagcctacatcccaggggggccgagtaccaggagaggggttgataaaaccacacacagcaagaacaagcaccatacagataagagatgtttaattgatacttcccaaaagtatcttacaaaaacaaaagttattacatccgccttcaagcggggccctagcctcatttctacaggantgaggtactccacattaataagggngcgctggaagcgcgcggcccccgtctccacaacatcttgtatgacctcccggggggggtcttcagtattggcaaccggaccaacggtcaccattggaggggacgtcgaggccattaaagccaaagagatggaggcgcgaaagatggagccgcaactcagctcgcttcccccctcatggagttggagctaaaccagttcatggaggggtaccatgggatgctggggaagctcacacaaaagatggagccgcagctcagctcgctttcnnnccccggaaggtcgctgcncaacacccttcc

SEQ ID NO: 4511 - DNA, 775 bp, Zea mays
ctgtggccatctgtatggtaatgtttttatcttgttaggaaaaaagattgtagcctactagcctttcttgctttattacctctgaagcttcatacggtccaccagataacaggaaaggctctgcaacacggcttgagttcaaacaaaggctctcaatagctattggggcagctaaaggtacggaaactttgagattttcctctttgtgtccttgtgggtcactggctcgagcagaacttagtgtgagtgaaaatgttgttgtaggtttgaatcatctgcacagtcttgatcctcctttgatacacaaggacttcaagacaaacaatgtgctggttgatgaaaatttcattgcaaaggtggctgatgctggacttgttaggttaattagaggatctgacgatgccggcccatcgcgtgggttcagtaacagtgtttaccaagatccagagtaagtccagttataacatttatcagacaagtatgtaggtcacttcacagtaacatgtccagttgagttttcagtgaaagcgacatttttttggtattttagtgttatggatttgtaatgctattgagtcttaaatctctgcagtcatggacgattttctttgctcatcctgtgataataatttgcaacccattctgcatgcttatatgcagggtacagtcgatgactcagttctctgaaagcagtgatgtttacagctttggagtttttcttttggagctaattactggcagggaagcagcttccttgatacctacagagtccaga

SEQ ID NO: 4512 - DNA, 584 bp, Zea mays
agcaagaacatactgggaaaaggtggctttggatacgtctacagagggcagttccctgacggaactcttgtggccgtcaagcgactcaaggacggcaacgccgcgggcggcgaggcccagtttcaaaccgaggtcgagatgatcagcctggcactgcacagaaaccttctcaggctctatgggttctgcatgaccgccacagagaggttgctggtctatccatacatggctaatggaagcgtcgcgtcccgcctcagaggtaagcttttttttttcttcttcttcttctcaagattccaatgtgaacttgcagtagtgcagaacagattctctcttcttcttcggaaagtgactggaatcggattctagctagcacttccttattcttccttccagttgacaaatgttggcacagctagcagtaccacaagcatacgattcctatcctcactttattccacaatgatcactacgcctacagggaagccacctctggactgggtgacgaggaagaggatagctctcggggcagggagggggctgctgtacctgcacgagcagtgcgaccccaagatcatacacag

SEQ ID NO: 4513 - DNA, 673 bp, Zea mays
cagtccaaggaagataagcttaggagagtaacacttcagattgatagttcagatatcacatttgcttttaaggtgaggacggtagttcttgatcctttactattggagtacaggcaattgttttgtttccaggtttatttattatttcaatccatgttgcagggaaatcgcttctttcaaaaatgtctggagcagccaagatgctaactagacccatagcagagagtagatcaatacacttactgttgtaatacattacagtattagtttattgacattatcaagtaccagcaatttcaacccctggatgtgctgctcaggtgactcactaaacaacaatccatttatgttacctcggttcttatttttttaatcaaatatacaagtgagaataaagcaggctgcatcatctgtttttttggccatgtattcaacaaactgcacttttttgcttcatgctgggattccttacaaaagttttcctctttgcaggtggtttcattcaacatggtcaaacgtaccttggttacatcatgaagctctttcttgcagtgcagggataagtgtacatgggacgagttatgatagtattatgtgacacaattctcccaaagatggctgagtgttgttatgatttctcaatttttggttcttccagaactgattgatcaaa

SEQ ID NO: 4514 - DNA, 376 bp, Zea mays
ataccatcaagtatcggggagttaagttaccttatcagcttggatttgagtaggaatcgccttggtggtgtaattcctacttctgtgaagaacttgctgcatttacagcgcctctctttggatcagaaccttctgaatggcacaattccacctgatattaatcagttgcatgctctcaaggttttggacctgtcatcaaacctcctcatggggatgatccctgatgcccttgctgacttgagaaatctcactgctctcctccttgataacaataaacttactgggaagattccttcaggatttgctaactcggcatcccttaccacgtttaatgtgtcattcaacaatttgtctggtccagtgccaacgaatggta

SEQ ID NO: 4515 - DNA, 352 bp, Zea mays
gctgggtatttttatttatattatttaccagctattaaaatatacgtgacaccgtggtttcaatccgtaccgtatatacacgtgcagcgaagtaccttggccttcccctcctcaacccgtacctcgacaaggcggcggatttcacgcacggcgtcaacttcgcggtcgccggagccaccgccctcggcgcgacggcgctcgccgagagaggggtcaccatgccccacaccaacagctccctcgatcgacgttcagctccagtggttcagggacttcatggcctccgccaccacaaactctagccaaggcacgtcacgtcactgaccatcagctctttatattagcagtataa

SEQ ID NO: 4516 - DNA, 1020 bp, Zea mays
  misc_feature (756)..(758): n is a, c, g, or t
  misc_feature (762)..(762): n is a, c, g, or t
  misc_feature (764)..(855): n is a, c, g, or t
  misc_feature (857)..(864): n is a, c, g, or t
  misc_feature (867)..(867): n is a, c, g, or t
  misc_feature (869)..(875): n is a, c, g, or t
  misc_feature (877)..(885): n is a, c, g, or t
  misc_feature (887)..(894): n is a, c, g, or t
  misc_feature (898)..(900): n is a, c, g, or t
  misc_feature (902)..(906): n is a, c, g, or t
  misc_feature (909)..(1002): n is a, c, g, or t
  misc_feature (1009)..(1012): n is a, c, g, or t
agtgcttgtagcgcccaaggttgcaggaaccagcaatgttgtgtccctcaagctgatgggtggtgcccttactgggagacgctatgaatcgagtgcggcagcagttgactccacggacccgccagctgagaagcatgagtaccaggctgaggtacttgtggggtgttatcttcttctgtggtttggttataagatgtcatggtgtttccgctacgttctatgcaggtcaacaggctcatggatttgatcgtacacagcttgtatagtaacaaggaagttttccttcgagaactggtcaggtgggtcacagttacggacacaatcttttttcagttaacgtagcctctttatagagactccgggttccttgttaatgtatttggttaaaacttgtgaaaatgctatgtaatgactgtatcatgttttttatttaatccctaacttagtttgctgtttcatttcctcttgtttgtgcttacagcaatgctagtgatgctcttgataagttgcgttacctgagtgttacggatcctgagcttctgaaggatggtccccaacttgatattcgcatccaaactgacaaggataatggaataataacaattacgtaagtattagttacttgcagcaggccatttacttaccatactttttaattaaaagtgatttttattctcgtcttcatttgcttcatcttcagtgattctgggattggtatgacgaaacaagagcttattgattctcttgggactattnnnagcngnnnnnnnnnnnnnnnnnnnnnnnnnnnnnnnnnnnnnnnnnnnnnnnnnnnnnnnnnnnnnnnnnnnnnnnnnnnnnnnnnnnnnnnnnnnntnnnnnnnnttntnnnnnnntnnnnnnnnntnnnnnnnntttnnntnnnnnttnnnnnnnnnnnnnnnnnnnnnnnnnnnnnnnnnnnnnnnnnnnnnnnnnnnnnnnnnnnnnnnnnnnnnnnnnnnnnnnnnnnnnnnnnnnnnnctcctcnnnnccccccct

SEQ ID NO: 4517 - DNA, 686 bp, Zea mays
cacaattaccgcaccccggaaccattccgagatcaggtacatgtcctctgcctccttctcttgctcttgcagcttgtcatcactcctcaccagttccagactgacaaactctccttgcagagtgttgtagtcgtaggattgggagccagcggaatcgacatcgctagagaaatctcacacgtggccaaggaggtgcacatctcagctagatactcggagggcaggctcggaaagattgaactctaccataacgcctggatgcacagcgaggttcagctctgaacttccttagcttctctgcttcataatttattcttcaaggctaagatacgtctatgttaatggactaatatgatgaatgtatatatatgataagcagatagagtgcatccaagacgacggccaggtgcgctttgccgagggctcatctgtggctgcagacaccattctttactgcacagggtacgtactacgaattcgattgcagttgcacacaaaatggtgctctatcttttctcctttgtgagcacatttaccactcctgaatgaactgaacctgcaatcaccttcaggtaccgctaccattttccgttcctggacctggatgggttcaccgtcgacgacaaccgcgtcgggccactgtacaagcacgtcttcccacccaagtatgcacccaatctctcttt

SEQ ID NO: 4518 - DNA, 539 bp, Zea mays
tgcagcccaccttcgtgcaggagcgccgcgccatgaaggtactcgatcgatctagtctgtctgtgcatcgattcacagatcggtcggtgggtggtgccggctgattgatcttgcgcaactggcagagagagtatgaggagttcaaggtccggatcaacgcgctggtggccaaggccatgaaggtgccggcagaggggtggatcatgaaggacggcacgccgtggcccgggaacaacacccgcgaccaccccggcatgatccaggtgttcctgggccacagcggcggccacgacaccgagggcaacgagctgccccgcctcgtgtacgtctcccgtgagaagcgcccgggattccagcaccacaagaaggccggcgccatgaacgctctggtactgaactgaacaactgggcagtgaagacgagatcctctgaactgaactgaactgacttctcgtttgccgaattcccgacagattcgcgtctccgccgtgctgaccaacgcgccattcatgctcaacttggactgtgatcactacatc

SEQ ID NO: 4519 - DNA, 400 bp, Zea mays
gctattcccaactctttctcgacgttgtccttgtcggagatcaacctttcaaataatcagttgaatggttcaattccagagctcggttcgctgttcacattcccgaagatttcatatgagaataactctggtctttgtggcttcccactgttgccatgcgggcacaatgctggctcaagttcttccgatggccaccgatcccaccggaaccaggcttcactcgcgggtagtgttgctatgggactcttgttctcgctgttctgtatagttggaattgtcatcatagccgttgagtgcaagaagcggaagcagatcaatgaagaggcaagtacctctcgtgacatatacattgatagtcggtcacattctgggactatgaattccaattggagactctctg

SEQ ID NO: 4520 - DNA, 380 bp, Zea mays
gtcccagaatgtgaccggctatcaatgtatatgtcacgggaggtacttgcctcttcattgatctgcttccgcttcttgcactcaatggctatgatgacaataccaactatacagaacagcgagaacaagagtcccatagcaacactacctgcgagcgaagcctgggtccggtgggatcgatggtcacctgaagaacttgagccagcattgtgcccacatggcaacagtgggaagccacaaagaccagagttattctcatatgaaatcctcgggaatgtgaacagcgaacccagctctggaattgaaccattcagctgattatttgaaaggttgatctccgacaaggacaacgttgagaaggagttgggaataggcccttg

SEQ ID NO: 4521 - DNA, 661 bp, Zea mays
  misc_feature (396)..(396): n is a, c, g, or t
  misc_feature (398)..(402): n is a, c, g, or t
  misc_feature (404)..(404): n is a, c, g, or t
  misc_feature (409)..(410): n is a, c, g, or t
  misc_feature (412)..(414): n is a, c, g, or t
  misc_feature (417)..(418): n is a, c, g, or t
  misc_feature (421)..(425): n is a, c, g, or t
  misc_feature (512)..(513): n is a, c, g, or t
  misc_feature (538)..(538): n is a, c, g, or t
  misc_feature (540)..(541): n is a, c, g, or t
  misc_feature (555)..(555): n is a, c, g, or t
  misc_feature (558)..(560): n is a, c, g, or t
  misc_feature (580)..(583): n is a, c, g, or t
  misc_feature (594)..(595): n is a, c, g, or t
  misc_feature (597)..(597): n is a, c, g, or t
  misc_feature (599)..(599): n is a, c, g, or t
  misc_feature (609)..(612): n is a, c, g, or t
  misc_feature (614)..(624): n is a, c, g, or t
  misc_feature (630)..(635): n is a, c, g, or t
  misc_feature (637)..(639): n is a, c, g, or t
  misc_feature (646)..(646): n is a, c, g, or t
  misc_feature (649)..(652): n is a, c, g, or t
gaggctgatgtcttgaacaaagagctttcattagacaaagcagtagagaaaaacgaggagaaaggaaatgatgtcgccccacaggacctgaaatcatcagctgagaagtcggcaagcccaaatggctgttaaattttttttttggttagctcggccattgacagtggtatggggcgggaacctgaggctgggggttgtttgaggaaatcctgagatcccattgagcttgtttcttgcccttgttttctatagttcataggagcttgaggattagttagttgcttgtgtgtttgggtgataggtgaggtcagtgtcctggcatggcaggtatttaggaatagaaggacgattaactgggttttacaatgggggttcatgggtttgaggttgtgtttncnnnnntntgccnncnnngtnnggnnnnngacctcacctatcacccaaacacacaggcaactaattaatcctcaggctcctatgaactacagaaaacaagggcaagaaacagctcnngggatctcaggatttctcaaacaancnnacctcaggttccgnccnnnccactgtcatggccaagctnnnnaaaaaaatttnncncntttgggcttnnnncnnnnnnnnnnnaatctnnnnnntnnnggggcgnctnnnntctatctct

SEQ ID NO: 4522 - DNA, 796 bp, Zea mays
ctgtcattcccttaatttactactacgacgagaggttagatatggataatggaatgctttttttaatttgattccatacagttcactttttgtttatctaatttcaaatatgttcattttgttttaatctcacatttaacaatttatctttttgtttgtttgttttgagtcctctgcttaatggacagttactttacaatccatttgccttctttatttgattttaaaggattcacaattttgaagtttactgtttgatttggttcaggcacgcgaatttgccaatgaacttcgtgcaagtacaaaagcaccgaagaatcctgctgtttggcttgaaggttctggcggctctggtcataatggaagcagttctgatacttcacaggtctcagatgcatactcaaagatgcttacaatatttatcccgcttcttgtggacgaggttgctcctttcctttcattaaatgtagctacgtgactacctttgtttttatttgatagacaaactaatagctattacctttgcagagttccttttttgcacattttatgtgctttgaagtacctgcacttgttccagctggttctcctaatgctaataagagcaaatccggaggaaatgacccggatgatgatctgggtcttatggatccagatggcaacgatctgaaacctggtaccttttcttgtactcactaatatgtgttcgtggatgtaatgttaatgctctatttcttattttttttatgtgttgctatcctgtttacagacagtacctctgctgaactgggtacat

SEQ ID NO: 4523 - DNA, 633 bp, Zea mays
gacatgccttcacagctcaccttggagtctgtctgctgaaaaatatcaaaactataggtatctgattgatcatcataagtagccaccaaggagcgtatgttactctttgagatcttcacatgagatacaacatgtttgtggcccatcaaaccagttccaatttgtcttcctgctggattaactagatgagaggactgaacaccatttgcacaggtaatgctcggtgcaacaaaatgataagtgtcttttgtgacctttgtgcttgtgttgttactcctgccctccacttctttgaggaggaaattgatatctccaataatatgttgatggtctacaggagtatttttcttaaatacagatgtgctatttctataatttcctggcgagtttaaaatttccccttccatgccttttctcccagatggttcactatgctcacacgatgtagacctctcaatttgttcaattgttgaactacccatcattatttcctgtatctttccaaaattttcttgagtcttctcaacctgcaaacagaattatgttaaaaaaacattgccgaacagtagcagcgaaattgaggttactacagaataaaatgacacttaccctagcatcggaatcaagtggaac

SEQ ID NO: 4524 - DNA, 389 bp, Zea mays
ggttgtcgtctgcttcaactctaggccgcctcctgttctaacaactcctaggcctcgtgtacagaggagcatatctgcagaaggcctgagagagctgcagagcttccttgatagtttggccgattgacatggggttctagcagccccactataagttttgaccttttccatagcttagcttggaaaataggtttagcatgtgctgtctcataacttcgctgagatggctgctgttgagtaatctagagttgtaaaatatgctgcggctaactgtgtcagcagttgagagcgtttatcagttgagagtatttatcagcatgttgactttgtgagtcctgaatgattagtcggcatttcttaggtctccataaaaaaaattggagactctc

SEQ ID NO: 4525 - DNA, 362 bp, Zea mays
gtcggattcaaggcgctggttttcgagttcatgcccaacggcagtctggacgactggctgcatccggcatctggagcacacccgctggcgctgaacaacacgctcagcctggcccagagactggacatcgctgtggacgtctcggatgccctggaataccttcacaaccagtgtcagccaccgattatccattgcgatctcaagccgagcaacatcctgcttgcggaagacatgagcgctcgggttggagatttcggcatatcgaagatcctttccgacgacactagtaaagctctgctaaactcaatcagcttcactggactaaggggctcgattggttatgttcctccagagtatggcga

SEQ ID NO: 4526 - DNA, 507 bp, Zea mays
ggccgaggagctagaatcagaacttgatcatgaaatcccatcctttgtgaaggcaatgttgcattcacatgtggttcgaggtttctggctggtgagtactcagctctcctttgctctccctagcaacttttagcgcatggtcatggtcatggtcatggtcatggtcatgtactgtttttttttctctgtactaatcacatcctttgctctccctagcaactccccagccatttctgtgacacttacatgccaaagcaagactccattatcaccttggtggatgagaaggatgaagaattcgacaccaaatatcttgcctacaagaaggggctaagcggcggatgggctggttttgcactatgccatgggatgcaggatggagattcagctgtttttcagttgattaagcccacgaccttcaaggtactactatgctttcagcgaatactgaataacgcggagctcaaagcacgctccccccccctgtctctctctctctctctctct

SEQ ID NO: 4527 - DNA, 544 bp, Zea mays
  misc_feature (513)..(515): n is a, c, g, or t
gtatggcggctcagtaggtgccatgccataggagcgggcgacgagctgctcctgctgggcacatggtcgagcccatgggtgatccgagcgagggtggcgatggggctcaagggcctgagctacgagtacctcgaggaggacctcggcaacaagagcggcctcctgctccggtccaacccggcgcacaagaaggtgcccgtcctcatccacggcggccgcccagtgtgcgagtcgctcgtgatcctgcagtacctcgacgaggcatggccgacggccggtcctccgctcctcccggccgacccctacgaccgcgccacggcacggttctgggcggcctacatcaacgacacggtatggtaacgataccattgctggagcaggaggaggagcaggatgcaggcccggaagtcagaatcacagtttccttctttttttttcttcttcttctccctgtttgtagtttttcccggcgttcagggcgctgttcaaatcgctgacggacaagaaaaaagnnntcttctcaacctgcaaacagggttattgt

SEQ ID NO: 4528 - DNA, 407 bp, Zea mays
tatgtagctcgactgtcaaggagattccatccatgcatgtattcagcattcacatgcacatatatgtctttgtaaagaaaatgatgcgtgagagaaaacacccatgcatacactgtaattctcataatccaatctgaaccgcccatgtactgtacgctctcttatatatgttgcaaggacatatgtgtacgtacttgcttgaggtgcaatatacatatattgttcttggtagctaacttttcttctcgaaggactgtatatgaatgatggacaatatcatttgcgtgcaaaaggacccaccttgattgatcatgaactgcgtcccatctgaatatccagtagagaccggccggcagagagactgcgctacaatctaactaggtgcgggcagttttaagttggccttg

SEQ ID NO: 4529 - DNA, 432 bp, Zea mays
agctgcgttcagtgaaaacacggataaaaatcttctcgtccgtacccagccttttctcaccagctttgtacaaatcctttgcatcatgtgtcacaatggtaggatcaacctcgggaccttcgtagcgtggaatccccatatatgcaagtaaaagctgaaatatacattatatcataaattatttctggcagaaaaaagtgcaatttaaatttgaacagatattaactactaacttataaaaagtattgattggaatacatcacatgaagttcatgctacagatatctgtgtgcattaggtaaaaggcataaatgactacagaaaagcaattgaaccaacttcacatcagtaattgcaatatgttaatgaagaatgggcattcccttagtcttatacaatacagacatcagattagatgtgaggatatctcat

SEQ ID NO: 4530 - DNA, 420 bp, Zea mays
  misc_feature (7)..(14): n is a, c, g, or t
tctagcnnnnnnnntcacgcttcggcctcccctgcttctcctctagcatgctcccctccatatatacatatcccacagatgttgcttgcttccacgaaccagctaattaataaccacgtccttgtatatatagtagtacctgcagtctctggtcgacgatggcgtgtccgaggcacggaagtacacagcagaagctagcaaacagcatgagtggtgccatggacatggcgcgagccgcgtgacccagcaaactacatacatacatacacctagcactagcagagaccagagattcagagctcaggagctcaggatgtgtcgttgagtgcgaagctgccgatcgaaggagggagagaaggtcctcgaccgtcgtcttgctgcttgccggtcgcggtcgtctcagtcatcgaccatgtggag

SEQ ID NO: 4531 - DNA, 703 bp, Zea mays
  misc_feature (612)..(612): n is a, c, g, or t
  misc_feature (680)..(681): n is a, c, g, or t
catatatgttagtaagatagtcaatgtattttaccaaatacggcacaacctgcaggagtaattatatcaaatgatcataacacagaaagatcttacaagggaactaatatccagaaaaaactgtgaaagcattcaaccgtgtaaagccgatatgcatccatctcctggtgaacaaagctaactagactttcagttgcagagtttatccagtgatccaacacattggatgacttcagaagtaccacttgttccatcggagaaaatgaggcaagaccctcaacttccagtctctttgcattttggacaaaaaatctatatgcgttataccatgggaggaagacatctttcacctgataaattaaagcatgtcaaattgtgggtcagattgggggccatgccctattcctcaagatagcaaaaaatgatagctttgggtaaataatatcatgtgatctatgtataccagtagcctgaccaaaagataataaggaaacacggaactttcaataaattaacttacaacagcaaagacaccagtacgtttgaatcgtagagactctgcacgtacaactggggagtttaccaaatatagtcgcagagcatcctgaaacnagaacagatttcattctaactacaaattctaacaccgagtctgttgcatgtatctttcagaaatagcnnttggcttattcaaagcaagcag

SEQ ID NO: 4532 - DNA, 600 bp, Zea mays
  misc_feature (371)..(372): n is a, c, g, or t
  misc_feature (375)..(376): n is a, c, g, or t
  misc_feature (385)..(385): n is a, c, g, or t
  misc_feature (413)..(414): n is a, c, g, or t
  misc_feature (428)..(431): n is a, c, g, or t
  misc_feature (445)..(449): n is a, c, g, or t
  misc_feature (454)..(454): n is a, c, g, or t
  misc_feature (456)..(462): n is a, c, g, or t
  misc_feature (468)..(470): n is a, c, g, or t
  misc_feature (480)..(481): n is a, c, g, or t
  misc_feature (490)..(492): n is a, c, g, or t
  misc_feature (496)..(498): n is a, c, g, or t
  misc_feature (503)..(507): n is a, c, g, or t
ttcctcataccaaatgacacaatttattcctcagtctactagatattgtccctttattcacattcctccaattttgccacaaactaatgcaattcacatgcatctacccttgccactcccacctatcacatacatgaccaaggatcttgtgttctttggaaaacgcattagcagcaatgatgatgctatagatcttgtgactcctccacaattacttccagaagcactatccaatattccaaataagtgctacatgtgtaacattgcttctgctgatacatattgtgttggtagtgctaagacttgtaattttgttgctgaagatggagacatggcgttccatttcccatatgttccttcaaagcctaaannaanntatcccgtngtacctcgcggggtggaagacactcttnncgagtactttcccnnnngagaagtggtgagnnnnncaatntnnnnnnnccaggnnnaatcagaagnnatctccagnnngacnnnccgannnnnaccagacttccattgatcatttattacggaagattgtaggagcatccgagtgtaaaggaaggatgtgcataggatagcgaaagggacctaatt

SEQ ID NO: 4533 - DNA, 890 bp, Zea mays
gcgatgtttccttttccacgccacatattgctgcaaaaactgtttcttccatttattagtgcttctattttgttggtgaagctagtcaacttcctttttttctgaaatcagttgtggcaagctaagcaattactttcctgtgttatatcgataatggtctgtacctaagttgttgaagttcctgttacataacgctctttacattatcatagtaaccagtgcagaacattacgataccgaaaacaaacacagcgcaccacctgcttgtatgttgtatccaattgttgtttctttgtggtgatgtggtctcaaccaggatcactttgtttagctgcaaatgtgattcctgagtcagttttgagatctttactacctggcctaaaattttgttcttttggactaggtttatgcaccagcatgccaccggagaggatgctaccttttgctgcacgagtggtaaggcacctttcataaatgtactctgttgcaacttgcaaaatacttagaggaagatgccacgtgtaattgcacatcagaatgcatgggttgctcgccttgttctcttatagatggaagtgtttgtgtgcaatacgcaggctggttgtggttgcagaggtctgggggctcgaaccagccttccccatcgcgcagacccacgcctggctggctattgatccgaattcagaagggctgcatcctccatgaccacctgcctgcaccccgtccaatggttgtgaatattccagtcccgatcagatcaaataagtcatcaactattagcagcacatcaagactatcattgtgatagctattattttgcgatgattatgcaactatatggttccaacttgctagctccaggcataccaggcctgtgcaccttttacggg

SEQ ID NO: 4534 - DNA, 519 bp, Zea mays
attctgtcaagcatagcaggtagtgcagtcctatatagcatctaggatcagctactttagtatagttatcaggggctgctacctacggtattcaggatctaatagccaggatgccacaccttccctagtgttgcacccttctggctgtatattgtactcccttcttcatctaatgaagcattctattcagccccatttaacttgtctaacagccctaatatatgcataaaaatgtcttatcgtttagcacaacttaaatctataacaatttaactttataggggactgcgatgtacgctgaagttcctcaagaagctatatatacacttcaaccacaactacaggaaagcatgattttaatcatgagaaaaatttatgttgacaatgcaaagctgtcctacaaacctgtgcatggaaagtatatgatcaggctacatccaaagactttgcttgaggaagtaaatgaggatccacaagattttccaaaatatacattccatctaacaccattcccagaac

SEQ ID NO: 4535 - DNA, 434 bp, Zea mays
ccttcttccttctctatcctttccctgttcatagcgctgaagtctccccatccgagctccatccatggtgccctcctttcttccttctctgttccagaccagcatcaggcgctgggagtagtgtctctcccacgctgtcttccccttcccccttgttgtcttcaccagcgctcgtcctcacatggaaaccagctgcgcgcaggagtgcggcaaggcttggccgatgccctctgttgccgccatggcatctcccttccccaagctccagcgcgcatacggcagcagatcgtggtgcccctccctgcaagctcgagtttccccatggcgcctgtccccgggcatgggcgagctcctctctgccctatgatttttccatggctgtgagctccccctggctgccattttccccaaccgtcgtcctcttgctctaaaaa

SEQ ID NO: 4536 - DNA, 619 bp, Zea mays
  misc_feature (381)..(382): n is a, c, g, or t
  misc_feature (390)..(393): n is a, c, g, or t
  misc_feature (396)..(400): n is a, c, g, or t
  misc_feature (404)..(404): n is a, c, g, or t
  misc_feature (407)..(408): n is a, c, g, or t
  misc_feature (429)..(436): n is a, c, g, or t
  misc_feature (464)..(464): n is a, c, g, or t
  misc_feature (466)..(466): n is a, c, g, or t
  misc_feature (468)..(468): n is a, c, g, or t
  misc_feature (471)..(472): n is a, c, g, or t
  misc_feature (475)..(475): n is a, c, g, or t
  misc_feature (485)..(485): n is a, c, g, or t
  misc_feature (495)..(496): n is a, c, g, or t
  misc_feature (500)..(500): n is a, c, g, or t
  misc_feature (502)..(503): n is a, c, g, or t
  misc_feature (505)..(506): n is a, c, g, or t
  misc_feature (558)..(562): n is a, c, g, or t
gtgcgtgctgcaggaacaattcttttcccgcccttctgcgatccgaaacatgataagcctgaaaagcagccagcccatctactttgctgtttatagtagaagcacatgttagtccaagcaaataacttagttgtcacctcagaaataaaaaggaagcacgtgacaaagagatttcaaaggacaagttatctatagttctatacttgctatgcaaaaaaatatatatttttagttttttaccatcattatggggagaacaattatatgacaataagcataaaaggcaatcatgcaaaagaacatacgaaatgttagtgtttctcaaatccaaaggtattcaaaaggggaaaatatcataaagcaaggattatcccaggaacnnggtaagannnnccnnnnnatancgnncggggtgtgcaccactcaccnnnnnnnnttgcccataccggaagtgatcaaatccncnangtnnatngtccagacantcggatgtgnnacangnngnntgacctcaaacgggcaaccagacttccattgatctattattaaggaagcttnnnnnagcatccgagtgtaaaggaaggttgtgtatagtatagcgaaagggacctaattgttt

SEQ ID NO: 4537 - DNA, 423 bp, Zea mays
gaatacagatcaacttaccctgactaattcgacgcgatagtcgcaagcacgactacgggttccggttgacgtcacccaggggccttcttttcttcgataatcatttgctgaagatcttttcctcgactaaataattttgacgaatcgaacttgagtcgcgcaggatgtccgagctttttgtcgcgcacttggtgaacaccatgctgctggctccatcttcactcgactcttggaatttcttgacgacacgtggaacgacgatgacacaggagagtgacgtatatagagctacacacgcgacgcgacgacgaatgacgctaacaggtggaatcgacgacacgattgggaattaaagccgagcgagccgagagggcgcgctggcgaacaggaaacaggacgcacggtaagactgagcatctataa

SEQ ID NO: 4538 - DNA, 606 bp, Zea mays
gcagaaggttagtctatttttatcttcagccactgtaatgggcatgaggcactggttgaaatggctttacctgtgttggttttacgggtgatgaaccttattttaatttggtcatgacatgccacagatcaagtcccattttaaggacataggagtccattctgatgtcaagtatattgatccaacatacatgctccgcgctgtgcgagccaatgcatccgatgccatcctgtgcaccgtgcttggtcagaatgctgtaagacatcatttctccttgctgcatctctgcctcttgacaaaatcctttagttttcatgcctaaccgtttgttgttctgtgtaaaccctacaggttcatggtgcctttgcgggttttagcggcatcacaaccggggtgtgcaacacacacaatgtgtacttgccgataccggaagtgatcaaatccacgaggtttattgatccaaacagtcggatgtggcaccggtgcctgacctcaaccgggcaaccagacttccattgatcaattattaaggaagcttgtagtagcatccgagtgtaaaggaaggttgtgtatagtatagcgaaagggacctaattgctttgtcag

SEQ ID NO: 4539 - DNA, 498 bp, Zea mays
  misc_feature (491)..(492): n is a, c, g, or t
atgcgcaaaactcgatgaacaagttagacaactgagacgctgatacgcatcgatcttcgctgggatacagagtggggatgatacctttcgcaatgcctctgatgatggagactcttgtaggccaatcaagaacggtagcaccggaagaaccatccttgacgtccagataccgcgacaggcagccattaaccatgaagtcatacacgaggaagcattcccctctccccctggagcagcagaatcccctcaggctcacaagattgtcgtgctgtaggagggtgagcatcttcagaccacgcaggaaatccgactcctcttgcttgcagctcgtcttgctgaggcttttgacagcgactaccgatccatcccgaaggatccctttgtacgtcgcggcggcgaagccactcttcccgagcaagttcacgtcggagaagtactgcgtcgcgcactctacctcctctaggttgaatctgaagctatcaccaactacnntgaccg

SEQ ID NO: 4540 - DNA, 514 bp, Zea mays
  misc_feature (427)..(436): n is a, c, g, or t
  misc_feature (504)..(505): n is a, c, g, or t
tggctgagccgcctctccttgaagctgaggatgacgttgacgaagaggcggcggaagatgaggaagaagtcgtaggcgcgagcctccacgctcttgcgggtgtccagcaggcgcgtgttcatgtgcttctccatctcctcgtgcgccagcttggcctcgccgttggctatggtgatctcgacgctgatgccggccttcttcttggagtcgaactcggtcatgagcttggcgtagttggggccggggtccgcggggtccaggatgttgctgcggaagccgtcgacgctgccggagtagagggagtaggtgcgctcggcgtacttgatgacgccgacgacgaacatgagcacggtggcggggatcatggggttgccgcgcagggagcagaagaagatgacgcagaggcagaggagacgaggggaccccnnnnnnnnnnctacgccgagctcatgaccgagttcgactccaagaagaaggccggcatcagcgtcgagatcccatagnnaacggcgag

SEQ ID NO: 4541 - DNA, 381 bp, Zea mays
  misc_feature (372)..(372): n is a, c, g, or t
cgcatgctggggcagtggatattgggcgggagatcttccggagcatgctgtcggagcatgggactgaggcagcaattgagcactacgggtgtatggtggatttatttggaagatctggtctccttgaagaggcacacgtattgattcaggggatgccaatgaagcctaatgctgcgatatggggagcacttttaagtgcgtgtcgggctcatgctgggcttggccttgctgaggtggctctgaaagagcttatcaatcttgaaccatggaactcggggaactatgtgctgttggccaatctttatgtggaaacagagcggtgggaggaggcaggggaagtgaggagattgatgaggaggatgagtgtgaatnaggctccag

SEQ ID NO: 4542 - DNA, 411 bp, Zea mays
tcctcgctttggttcagcttgctggttcgttgttgttcatctccgtgtcgggtgtaccacaatattgtagatctatccttgatgcttgtcgtcgatccgtcgcctcgcctcgatgctggctcctacatgacgtctcgaacttgtgtttacactaaaaatccgagaagattaggcgtagaaggaaaaaaatcagtacgcagccggaaaattcttgatgtggatcgagaaggcagtgaagtccgtgtggtgctcaccacgtgctcgacgtaatggcgaaattggaaatcgtagttgtgctcgtggctgtcaagacggattaaattattagtgagctgtcgtcgctctcgctcttcgttttaatatttctcatcagtttagtatacttgcggtgttaatgtggaccgatgatgt

SEQ ID NO: 4543 - DNA, 833 bp, Zea mays
  misc_feature (774)..(807): n is a, c, g, or t
  misc_feature (812)..(827): n is a, c, g, or t
acatctatgcatatttaatgtcgtgttaagttaaatattgttatttgatgccattggccatcatattctttttcatactaattctacaatagtctgattgactgtgtctacctgtgcttttcctttagtaagtgcttgtgattgtttctttttcttcgagtcatgtctatatggaaagcactattacttatctgtcattaactaatcttataatgttcattatttgggtaggaagagcaagacgttgctttaaaacaactaaggaagtcattggtgattagagcgaaacccatgccaagcttctatcaagaagggcccccaccaaaggctgaactgaagaaggtaattccagtttcatgtttctaattctcaacaagtgtagctgtgagcctgcgacttttatcaatttttgcataagtcatggttattgttgagggtatagtaattccaagaatggaatgtacacaccattctaaaatgaaggagaaggacagattttgtgcccccctttttttgaacaacacatgatgtcactaataccaagttgattgtccaataatgacgtgggtataattagtttgagccttgagcaaacagtatttgagaacatttttgtcttgacaaaatcacaaaaaccgaaatacatgtttatttctcgcggcatgaatacattgtgcaaagtattagtatacctttcgatagctttgatggtgaatttaatttttgtcttctgttctgtcaaggtgcctcctacccgtgccaaatcgccaaagnnnnnnnnnnnnnnnnnnnnnnnnnnnnnnnnnnttttnnnnnnnnnnnnnnnnaaaaac

SEQ ID NO: 4544 - DNA, 854 bp, Zea mays
cgtcggcggccatgttcgacgagtgcgtggcgccgctggtcgacggcctcttccagggctacaacgctacggtgctggcatacggccaggttggcatcctgctgcttcctctatcctcttcgtcggccaccaccacgcatgcctgctctcctcggtcggggtcggtcctcccctccctcaatcatttggctcgcatcccatgtgccattgatgccgtgcagccaaggagctgaaaaagcttggaccaccaagttgggggcctagccacacggaaaagtccagcagcacaacatgtggtctggggctgggatggaacacaaattacctgctttttattttttttggctccagctgtttgtgacacgatgatgatggggtcgactgtgtctccgtgctcccagaaccaccaaatgctcatcggtttcagtttcagcttcatgatgcatatatagctttaatagatcttttcttcttcttttttgtccccaccagaccggatcagggaagacgtacaccatgggcactgcctgcaaggaggggtcgcatatcgggatcatcccacgagccatggctgcgctgtttgacaaaattgagaacctgaaaacccaagtggagttccagttacgagtatcgttcatcgaggtgcaagaactgttccagatacttgcgtgcgaatgaaatgccagatcagttcttctgatgagatcttacatgtggaaccaattgctgcgcatttgcttttcgcagattctgaaagaagaggtgagggatctacttgaccccactgctgctaccgtgggcaaagcagagaatggcaatggccacgcaaaactgcctgtgccagggaaaccccc

SEQ ID NO: 4545 - DNA, 447 bp, Zea mays
gcagaggtacttccagagcgtgcagaagccgacgtacctcaagggccgctacgatgtggtcacctccgtcgccgtcccgctcgccctcgcagtctccagcatgtacctcgttgtaagttcccgacctcgcctctcattattatttatctagacggaaaggaaaatccgttttgtattttaaaagtactcgtgcatggatctgtgctgattgcctgattgtttgcaggggcgcgggatctacaacatgtctcacggcatagggaagaaggagtgaactcttccttcgtacatgaacatgactcgtcgatcggtggactcttgtctcatatgtactgtatatattctgtaaatacagtgaggactcgaatgtggtggattggatatggggaaaacaaatccgtccaaggccgtgtgtattgtgtaagtccatgtttaggctgtctccag

SEQ ID NO: 4546 - DNA, 784 bp, Zea mays
  misc_feature (392)..(401): n is a, c, g, or t
  misc_feature (404)..(407): n is a, c, g, or t
  misc_feature (476)..(476): n is a, c, g, or t
  misc_feature (548)..(550): n is a, c, g, or t
  misc_feature (675)..(678): n is a, c, g, or t
  misc_feature (708)..(709): n is a, c, g, or t
  misc_feature (719)..(722): n is a, c, g, or t
  misc_feature (737)..(739): n is a, c, g, or t
  misc_feature (755)..(758): n is a, c, g, or t
  misc_feature (762)..(781): n is a, c, g, or t
tgatggacgccatcttgccccgggacaacggcaggaggctgctgttcgagcgggaggtcctcgcgcgctgcgccgtgaacgccatagcctgcgagggagccggccgtgcgcaccatactcggagctacaagcagtggcaggccaggagccggcgggcagggctgcggcagctgcctctggacggtgacgttgtccggacgctcagggacaaggtgagcagggaataccacgagggtttcgtgatcaccgaggatcagcagtggcttctccagggatggaaagggagggtgctctacgccatttccacgtggacggcagacgatggattggcagggaattgacgatctttgtttgtgcattgagcttgtcatagaccgtgaagttgaaaaccnnnnnnnnnnttnnnnatatacaatacagacatcagatgagatgtgaggatatctcaaacattactcataatggcagattatgcntacattttgcagcacatggaagttgttccaaaggaattatatccaaatattcaccttcctaatgccggacannntaatactaaaagttgaataaaaagtgattaatttaaacatctttcatgtatcacgatgcatgagatcaagtagaacaaatgtaaggcagatacaccaagtaataaggatcaggaccttctggtgnnnnccggatgtgtggtgagcaatgacatgctcnngataagtacnnnnatctagcataataannntgtttcattatttgcnnnngtgnnnnnnnnnnnnnnnnnnnnaat

SEQ ID NO: 4547 - DNA, 449 bp, Zea mays
  misc_feature (413)..(413): n is a, c, g, or t
  misc_feature (427)..(437): n is a, c, g, or t
  misc_feature (439)..(442): n is a, c, g, or t
  misc_feature (444)..(445): n is a, c, g, or t
aacacgttctcttggagttgctcttatatggtaaaatacccaaggacatgttcattcggagataatgaccaacaatcaacgaagctacacgcttgagatccacatcatacatgtgtgacgaaggagctggcaagagcgggatgggaccctcaacttgttctgcaagactaccaaggaaaaagacaacaatgtctttgatcaccttttgtagctcatatgtataggcttgagggcatgattataatttttaagaagttgtacctctcgactataaacagagagaaaatgtcatgcatgaggtacgttttttactagagataactgatttgctccgcctacgaaactgtttttctcttcttaccttcgtatcacagcttgtaaaggccgaaggtaacattgtaccaatacttccntgatacctgcgggnnnnnnnnnnntnnnnanngtag

SEQ ID NO: 4548 - DNA, 474 bp, Zea mays
gcacttccccggacaggctcacctacagggagctctggtcgatgacggaggggttccgcgacgccttcgacctctacggctggtgagcgtccttctcctcctcctccaggctgcatgcctgcctgctctggcttactttgcgatctcgccgccgtcacaggattgcggcgaagctggagtggacgatcctgtacgtgctggcgcgggacgacgaggggtacctgtcgcgggaggccatgcggcgcgtgtacgacggcagcctcttcgagtacgtggagaggcagcgcgcgcagcacgccaagatgtcctagctagagggaagaggatgcgacgtgggcacgtggcctcgatcgcgcgcgcgtgaatgaaatggaagccaagcgaacctgtctcggctggtatgtagatagtgagaagggtgtcggccggaaaacaagcagccgtgtgtactactccctcagctcccatcaataa

SEQ ID NO: 4549 - DNA, 552 bp, Zea mays
gctccggagagaggggtcctccttccaccccgcagctgctaaacctcatccgagacgagagagaatggacggtgaccagagaggtagtggaagacggaggagcggggtcggcatcagcaacagcaacggccgcaagcccagaccaccccgaggaggaggactacgactccaagcttgagctgaggctcggcctccccggagcccaagacgacgagagaacgccgccgccgccgccgccgccgccgccgggagagaaggggacctgcacggcgctctccctcggctctggttgcttcccgtcgcatccgaagctcgccgccagcgctggtgctagtgctactgctactgctgccaccggggcaaagagagggttcttggcaaccgttggtgccaaagcgcaaggtatgtaagtgcaaaggcaattggaaattggaatatacacctgcagtccattagtgagttcaccgagctgcaggaatcccgttttttagtttctgacattttgtttttgtctggttttatttgtaaggttattgtaggcaggaggaggac

SEQ ID NO: 4550 - DNA, 436 bp, Zea mays
acggtggaggaagtaccggtggtgatgggtatgagattggtggtgacagccaagaggagcatgaaattggagagagtgacgaggatgtggagagtgggtgggatgaacgtgcccgcaagaacaggaggctgatgccaatcactatggcaaacgggaacggggctgggttgggggctgtgaatgccaatagcagagggaagtttgaaactgagaagggaaaggatgcttacccctacctttgggagactgtggaggatctgtcaaaggagcacccgaacggggtagcattcaagaaggccttcgagtcgatcgaaggcgccagagcgcgtgggatggaggaaaagctacgaaaattcaggctgacagagatcagacaccagctgcgacgtatggaattgatgaaggagacagtgaaaccttcttgccaatctcatag

SEQ ID NO: 4551 - DNA, 407 bp, Zea mays
aacggggtgttaatatgctcctgtcgctatcaagtgcttgtacagactgcagagttttgaatttgtatataaaatataaagatcgattaaacttgccgaacctttttattaggaagccatcgtaggggtcaaaacaaccgataccaaatttaggtattgaaaataaatatactttttaggtactgaagaacaagtattagcatgcaaccattgaagggttgaggtgaataggagttgaataaattttcttcacaagaagctggccaaaaaaatgagaccggccgattttgtagattagccggccttctagctgattttgtagtattctttttatagcattagtgctgctatttgtaatagttaaatattattactatttttagtgataagtgatgtcggatgaatcg

SEQ ID NO: 4552 - DNA, 444 bp, Zea mays
  misc_feature (440)..(440): n is a, c, g, or t
acatgaagtacggtaactataaaatgacaccagtggaaatagcatacaacgccatttccttcgtcatcgctatcgccctcacggtcgccttcacggtgtacgcgaagagagctctgggtgacataaaaagtccggacgatggcatcggtaaagaagaagaagatcacggcccaaatggctcagggggggtgcgtatgaatcgtcgtcaggagcgtgcgcgtgccgatgcacgttacatagaactagatgatatgtgatggtgtgttgacccggatcttgcttggaaggaggcaccagtaggtcattaggtgcacggctacggtaggtagctagctatagtttacaagaggaggctacaataatccacacccagctgacgtggtttgcgtgattcgtttcgtactttcgtgtgctttgcctactgcactgccatactgtcngaat

SEQ ID NO: 4553 - DNA, 442 bp, Zea mays
acaagcgataccagaagttacagtgattataatgacaactacatgcatgtacacgaggcaatgtcgactctgatcctgctcacctaactttgcatacatgtccttaaaaaagtcacggatcatagtccagcttacgtacggcagtggaatgcccacgcaataaattctatttacccttctatgagcacataggttagctagccaaactttaaatggtgcgaggaggcagctgctaatctccgttgcacctatatatctacatctgtggggggttctcttcttccccattcattaagtgctgtatcaaatggcttctggtagtagaatgcctttggtggggtaaaaaatgagcatatgcatggccgtctactagtagtttgacagctctggaaatcatgtgcctggaagaggtccaccggagctagagaggattatgaacgca

SEQ ID NO: 4554 - DNA, 481 bp, Zea mays
cgagaacgatggcgtccatgtacgaggcatcagtcgcggggttcttcactgccgtccacctgcactcgccttcgcctccatcgccggctgccgtgaacgccagcagaccattggagaagatagcaacggcgaggtaaccagcgtgcgccggcgtccggcacagcgcgacctcgaggatcttgtgagtgttgttaaagatgtaggcactaggggtgcagacgcggagatcgccgaccaccttgactctgctgatggtggcgaatgatggcaggcgaacccacgcgccggttaggggattcaacagctcgacgtcgcaccccttattaatggtcgtcagccacccgtgattgccgccgacccaggtccggcccttcagtccctcggccttgccgagaaaggacttgcgaccgccgccgccggcagacacgtcgtgcaggccgaatgtgcccgcctcgacgtcgtactcgatctcgtagccgtc

SEQ ID NO: 4555 - DNA, 370 bp, Zea mays
gctcttttgagtcctcacttgtatgcatatacggcaaaagagaaagagaaacaccacatgagcagagtttatgcctaattgcatgatcccaaagtcctggtgcttttcaggccgcaacatgttgttttcccttttagattaggcacatagaggttgcagctgatctttgcaatatgaattcacaaggctattactccagttattctgtaagtagcaagtagtctcttctgctgagttctggaacatatatcatgagagttcgctgattaagtgttacacacttaaccactcaaattattgtctgaagtttactaatccaagatgtgaagcatgttttaacacgtcaagtgttagcaagggtgtcacaatg

SEQ ID NO: 4556 - DNA, 527 bp, Zea mays
  misc_feature (447)..(447): n is a, c, g, or t
caggaagaggaagttctgaaagaacagaagcgtcgtgaaaaggaagaagctgaaatgaagaaacaacagaaaaaacagcaagatgaagctgagaaagaacagaagcgccttgagaaggaagctgcacaactcaagaagcaactggtcattcaaaaacaagcttctatgatggaacgctttttcaaaagtaagaaagacaatggaaaacatcaaaaacctggagagaacaactcagctgaagatccatgcaatgacaacaaagagacaataccagcaaccacatcaaaaattgattcttcattgtatcaacaagagggatgggttttagatgatcttcggaggttagcaacatttcctgagctctattgtttctttcaccttcacacttactaaaaataaagtgatttaatgaacattggttacaggttgcaggtcactggttggaanaagctatacacacttactaaaaatgaagtgatttaatgaacattggttacaggttgcaggtcactggttggaagaagcta

SEQ ID NO: 4557 - DNA, 526 bp, Zea mays
  misc_feature (369)..(369): n is a, c, g, or t
  misc_feature (373)..(373): n is a, c, g, or t
tggtgctgctcaatcctttacggctgtagttctgaatctagtgatcggctatggttgaagctttagtgccttgtagatgtcaaatagagatcaagcaaacatgcttccgcggggatcagatttaccagatctggtattagtctaacttactgaggtagtcgattggagaagagggccacatcacactctagacagatccgaagcgaaagaccagtatcaatctcttcccccgagccagccctgcgggtatccttttctccgccgctcttcagataagataggctacactcgaaaagcgtaggcccggcagttggtacgaaaacagaaccattagtggagtggagtaagatcccgatcaaagcagagaanaganatggacatcagagggctgctgagcctgcacgacatgtctcacctggacatgggaggggaggagttgctctgcaaggcaagagtgttctcgcgccaccacctcgcttctgccgtcaggtacctggagccaagccttggcgagtacgtgagacag

SEQ ID NO: 4558 - DNA, 520 bp, Zea mays
gcagggacatgatggtcaccgtcgacaacctcaagcgcctctgcatcgaccactacttccaggaagagatcgagcgcgccatgggtgcctgctgcatgggtctcatccacagcgacgatctcttcgacgcgacgcttgccttcaggctcctcagagaggccggccatggcgtttcagcaggtcatcgatccaacacactaattattaaacacaaattcatccatccatgatgatgtctacggtcgatcgacgacgactgaacatgcatggctgcacggcactgcacataccagcagatgatgttttacggaggttcactgacgacgacgacagcggcggcgagttcaggctcgatctcagcaaggacatcagagggctgctgagcctgcacgacatgtctcacctggacatgggaggggaggagttgctctgcaaggcaagagtgttctcgcgccaccacctcgcttctgccgtcaggtacctggagccaagccttggcgagtacgtgagacagtcgctt

SEQ ID NO: 4559 - DNA, 762 bp, Zea mays
ctgataacccctactcttgtgaatccttgttggatgatcagtcaagtggatattgcacccagaattctgtgcatgaaccccatttgtactggactggggcagttgaagggtctgcagtatcctatactccccaaacactccctggtgctttgcaaagtcagctgatgccatgtaacaagctcagtgaaccaaaagattacgtgcctactgagcaaaatgtatgtatgctttgtgttgccattaaaagttctgtgcatattgcatattgactttagtaatgctttgtgactaagtgctaattggcctaatctaatttgaaaactatcgcaatatatctgtacatacaaactaatattagcttggatactatatgtagtagaatggattcagcaggctcatgtttattagcagttatccattcatgtgccttgtgcactgcattgctctcaattgcatagtcttgtgtccacatgttaacaagattgccatcagtattcagctctctttactttatagcatttactttcctgtaactctagttttatgtagtctgtgctaatttggctgaactaccaatgttttttttcttatgaaaagacatgttttctgctatttcaggccttgtcacagcacttacgtggcatgcgtaggcgcagccttttcaatgaaaaggctggaattagtaataaaggtgtagacaaaacttcggatcatcatcctgtaaattcaactacccccaaatgcaaaactatttctggtgac

SEQ ID NO: 4560 - DNA, 478 bp, Zea mays
gcaggacgacatgatcctagcagtgccggaaggcgcatgcgccgtgcgtctgggcaacgacgcgaccatccggcagaagctagaagtgatccggaagacgacctactccatcaccttctgcgcggcgcgcacctgcgcccaggccgagaggctcaacgtgtccgtcgccgccgagtccggcgtcctcccgatccagaccgtgtacaccagcagcgggtgggactcctacgcctacgccttcagagccaggcacagcaccgcgtggttcagcatccacaaccccggccacgaggacaacccggcgtgcggccccctcatcgacttcattgccatcaaggccctgaaccctccgcctctcgctcagggtacggtctgtaacatacgaagtattgtcttgctttgtttcacaaaggcacacggccggtttaacccagtgtagcgagcatgcaggtaacatgctgaggaacggagacttatt

SEQ ID NO: 4561 - DNA, 703 bp, Zea mays
  misc_feature (549)..(550): n is a, c, g, or t
  misc_feature (554)..(554): n is a, c, g, or t
  misc_feature (585)..(585): n is a, c, g, or t
  misc_feature (597)..(597): n is a, c, g, or t
tcgcacagtcctacgctagtagcaacaaggcagccagctgagctcccactcccagtccagtcgagcgccgcagcaggggcaggtcaggcagctcggtctcgccatgagcaaggagaagcaccaccgcgactggatcctccgccgctgctgcggctccgtcgccgcctgcatcctcacgctcgccgccgtcgtcggcttcatcgtgctggtcatctacctcgcgctgcgcccctccaagccgtccttctacctccaggacgtgcagctccgctccatcgacctcagcgacccggcgctctccctcgacctccaggtacgtacgtctcgtcagtagtacgtgcgtaagtctggcgcatttgtttatttggaccccccgctttggtgacggaggacgaactacctgtgtcgggctgccggccggccggccgggccggcacgatcgacgtaacgcgcgcaggtcacgatcgcttcgcggaacccgaacgagcgggtgggcgtgtactacaagaccctggaacgcgttacgtcgtgccggcccggccggccggnnggcngccgacacaggtagttcgtcctccgtcaccnaagcggggggtncaaataaacaaatgcgccagacttacgcacgtactactgacgagacgtacgtacctggaggtcgagggagagcgccgggtcgctgaggtcgatggagcggagctgc

SEQ ID NO: 4562 - DNA, 406 bp, Zea mays
tgagagggaaagagaaaatgtgagacaaagggaacaagaggagcagaggaggcgtgaaaaagaaagagtggccaggcaggctgtagataaggctatacgggaggcacgcgaaagagcagctgctgaagcacgcatgcaagctgagaaggaggctcgtcaaagagcagagcgagctgcagtatggaaagcagcaaaagaagctcgtgagagagctgcagtggaggcaaaggaaagagctgcgaagtctgctgcagaagctaaggaaagagaagcagcagaggctagagaaagggctgcaacagaatcaagggaaagggatgccaaagttgccgcagatgcaagggaaagagctgctagggctgctgctgaagctagggaaaaggaaacagcagaatttcaggagaaa

SEQ ID NO: 4563 - DNA, 385 bp, Zea mays
tagccgctaagggcctgaggccaaacccaaaaacccagacggccaaggacaaaaaaggacgccgcgccttccaagcacccacggccccgaggacggaacctctgggtgctcgtcgtactcacccggtgaagctgccgcacaaggaggcgctccggcctccgtacggccacgagaagcgctgcatcaccatggctcctgagaaccctagcgcgagcgagctactactagctagcagcgccggcgccctcgacgccgacgagacgaccgaccaaaccctagccccgcgagaccgagcccatccgcggggactcagctgacggggcgcgacgcaaagaggaaatttttggtgtgaagggggctctgctctagctgtctcagctgctaa

SEQ ID NO: 4564 - DNA, 373 bp, Zea mays
gtcttcgacgtcgatggcgacggcttcatctccgccgctgagctgcaggaggtgctcaagaagctcggcctccccgaggccagcagcatggccaacgtccgggagatgatctgcaacgtcgaccgcgacagcgacggccgcgtcgacttcaacgagttcaagtgcatgatgcaggggatcaccgtctggggcgcctgactgacctcatcgtcgtactcgtaccgtacgttctgagtgtgtggcaactggcatggttgtccccgcatttcgtcgagacagtcctgcgtctgcgtctgtaattgaattcatctttagtatcgtccttcacatcactggtctagtggtgatgagaatgccctgtcctgtgtgtgtg

SEQ ID NO: 4565 - DNA, 763 bp, Zea mays
  misc_feature (437)..(437): n is a, c, g, or t
  misc_feature (445)..(451): n is a, c, g, or t
  misc_feature (453)..(461): n is a, c, g, or t
  misc_feature (463)..(470): n is a, c, g, or t
  misc_feature (472)..(478): n is a, c, g, or t
  misc_feature (480)..(491): n is a, c, g, or t
  misc_feature (499)..(510): n is a, c, g, or t
  misc_feature (512)..(526): n is a, c, g, or t
  misc_feature (528)..(530): n is a, c, g, or t
  misc_feature (532)..(574): n is a, c, g, or t
  misc_feature (576)..(585): n is a, c, g, or t
  misc_feature (587)..(588): n is a, c, g, or t
  misc_feature (593)..(604): n is a, c, g, or t
  misc_feature (606)..(624): n is a, c, g, or t
  misc_feature (626)..(639): n is a, c, g, or t
  misc_feature (641)..(643): n is a, c, g, or t
  misc_feature (645)..(645): n is a, c, g, or t
  misc_feature (647)..(660): n is a, c, g, or t
  misc_feature (662)..(665): n is a, c, g, or t
  misc_feature (668)..(674): n is a, c, g, or t
  misc_feature (676)..(685): n is a, c, g, or t
  misc_feature (687)..(687): n is a, c, g, or t
  misc_feature (693)..(695): n is a, c, g, or t
  misc_feature (697)..(722): n is a, c, g, or t
  misc_feature (725)..(725): n is a, c, g, or t
  misc_feature (727)..(730): n is a, c, g, or t
  misc_feature (735)..(752): n is a, c, g, or t
  misc_feature (754)..(757): n is a, c, g, or t
ttatggatcttcttgtcccgtcatttatccgcatttgaaagtaaacaggattgcttggaattgtagattgattgatcaaggtacagggaatagatgtatatatagtccggagatcttgggtttatagaagtatattcaaacaagatctcctcgttattccctatccataaagtcctatacctatccataataaatacaggagagagctggctggctataggaaacacaacatcattgaaatcgtttgacaaaacttatctgtgttgacaaattcatgcttctattctatgtttatttaaactctggtggatagaggttgcaagttgccaacttgccactgtgttggtttatattttgcgggcgacccaaaacttgctaaaataaactagcatagtaacatggcattgccacctgttagcacctctgtgttgttactntgttgttnnnnnnngnnnnnnnnngnnnnnnnncnnnnnnngnnnnnnnnnnnnaattttcnnnnnnnnnnnnannnnnnnnnnnnnnntnnnannnnnnnnnnnnnnnnnnnnnnnnnnnnnnnnnnnnnnnnnnncnnnnnnnnnngnnatttnnnnnnnnnnnncnnnnnnnnnnnnnnnnnnnannnnnnnnnnnnnntnnntnannnnnnnnnnnnnntnnnncannnnnnnannnnnnnnnnanacttgnnnannnnnnnnnnnnnnnnnnnnnnnnnnacncnnnnaaatnnnnnnnnnnnnnnnnnncnnnngtctgt

SEQ ID NO: 4566 - DNA, 742 bp, Zea mays
ctctatctatcatgctcggcgttctggtcctctgcctgcgcaactacatcagctacttgttcacggagggcgaggtggtgtccaacgcggtggccgatctctgcccgctgcttgccgtcacgctcgttctcaacggcatccagcctgtgctgtcaggttagagttcggagactttctcctaataaagataattaggacgtttctgatcacgatgtgtgggagtagttcgcggtgtgatttgggcagtttttttttttaacaagcaaatacttcacacaggtgtcgccgttgggtgcgggtggcagcagttcgtggcctacgtgaacattggctgctactacatagtcggcgtccccctcggcgccgtgctcgggttcgtcttcaagctcggtgtgaaggtactgagctcgaatagatgcatgcatgcatatggttgttggagagatgttttagattttctctgcattccgaatgaatgaatgatcagcagtaacgttaacgacgtatgtaattgtacgcgcatatgtctcgtggcatgcatgcagggcatttgggctgggatgatcggagggacctgcatgcagacggctattctagtgtgggtcaccttgagaactgactggaacaaggaggtagagattgctaaaacttgcagagtaaaaattaatgataacagactggcacgcagctaataaaagaggttgcttccgtcgtctgtctgtttttggttcaggtagaggaa

SEQ ID NO: 4567 - DNA, 698 bp, Zea mays
tatgtagaataacggttaaagttatagttggtttaaaggtcacagtggggcccattagatctacccccatttggggaaataaaatatttctcaaatttgtgcttggcatatagttcttatctttattttttgtcacactgtgaaaagtcttggatatcaacaattatatctgacactgttttctagccatgtaaatataaagtacttttatatgcagaagaatctttatcttccattttcagtgattcattgcagttgctagtcagcatgaataatttgttatgtgacaattcataatgcatatcaatcaggtcctgttgaggtatggcactaaggagcaacagaagcaatggttagttcctttattggaagggacaattcgttctggatttgcaatgacagaaccacaagttgcatcttcagacgcgacaaatatagaatgctcaatatccaggtaatgaaagggggagaaaatgtttactggcctgtcaatggtactccgtttggatgttaatatttcattgcccgtagttgcttctctgttcccttctctcttgcttgcctcattctgaccctactgtagctaacattttattttcccacttttatccaggaaaaagctaaatgaaagctctaaataatatatatttgcatgatatgctgttctcttgtaatttaaatagatgcgctgtcttttt

SEQ ID NO: 4568 - DNA, 373 bp, Zea mays
ctttccatgggagggcttgtgacgcttagagaaaggggagagcatgttattagcttctgatgggcctctgctgccagtctgggaagcgggcaattgctgctgacgagtccattgttaactgaaaacatcatcaactttggtgatcctatctcacagcaaaacaaaattagctactgtgccttgctgcttctggggtttgttgtagattccccgaagacgccagtgccgtatccatttttttttggggttgtacagagaaatattagcggctgactgacggggcggtgtgattggacagaagattgtgtagttggaataaccagtaactaagcagcacaacatggtgcggttgtagtaaaggcagcctctgaaa

SEQ ID NO: 4569 - DNA, 911 bp, Zea mays
  misc_feature (61)..(62): n is a, c, g, or t
cgaagctcacggcgtacaacgacacaagctacctgactccaacccatgtgtacaccaaatnntacagggctgacgacggcaagtacaacgtcactcttgctgcaacaaaagcctccgtgctgcctccgatgatcaatgcgctggagatctacattcgtgtcccttatgagagtccgacgacactccctcaagactgtaagctagcccagctctcttttccctttccctcgatcggaattggatgttcagttagctgttagccttcttcgtacgcacacggcacactacaagtacagcatttctattacgactgcgagtgcagtccaactgtccaacacacagctgtgcttgtgcgcgcctataaacaatgcagcccctgtgcggtgtgccccaggtgctcgattgaatgtcgcttgacgctatggcactgaactgcgtctgaactctgaacccaggatattaaaatggtttgtcaaagactctactttgaattgaccctactttttccgtcttcctcacttgttcttgtacacgcaatggtttttctaagtcagtatgtatctgggtgattacacccagttgtcaaacatagtcatgactactattcttctttgcatgctagttgacgccatcgtggctatcaaaactgagtatggactcagcagaaactggatgggtgatccatgttttccaatcaaatatgcttgggacggtgtgaaatgcagcaacgcaagtggtaacacatcgaggataacatcactgtgagcatctgatacatcattgaggagatcctacatcatgatctcgtatgtgctgctttattattggtagattaaataactgatttatgttcaattacaaactctcatgcagagacctctccaacagctctttgcatggcacaatttcta

SEQ ID NO: 4570 - DNA, 882 bp, Zea mays
gctcttgctaatgtctggttcattttggtgtatatgcaacaataacttgtggataagttcataaacatcataatttatttcagcatcagcagaagcatccggaccagagcaatattttgatgaaagcaattgggaatttatcttgagaatatcagcaatctgaaaaatattattgcgatatgtaatgattaaccatgatggagaaagcttgaggagatgaatatatagcacagtttaaaatcacaaacagggagatagaacagaaaccaatgtcccgtgccaacattaatgaagttgtcaaagtaataaaactgacattaatgatataaacatgaaataaaaacatgtttaatatgtgggtcaatataatttgtggaaaacggttactttgacattggatcagcaatatgattaattgtaaatacacaaacaaacaacatcatgtggtgcaaccagacataaaagatatgaagacacatcatgcaaatcggttcattgtaataagttcaataatatatgatggacaaatatagtaagcagttacaaaatattcacctgctctaggtataggactttgcgctgaaaaatgcttgtatgtggactgcagggaatggcaatcacttcaaccctttcgcctctccctaggtctctaaaatattctttatatctagtaatgtcagcagtggcagacatcaaaactaacctgccaagggtaacacggtgacataccaacagcagatagtagacaactatttatttatacacaaagggaacaattactgctaaaagacaaacacggtgtaccatccactagtggaaattactctattgcttaccttaagtcactctttttcatcaaaaactgcttgatactagcaagga

SEQ ID NO: 4571 - DNA, 856 bp, Zea mays
  misc_feature (411)..(414): n is a, c, g, or t
  misc_feature (801)..(803): n is a, c, g, or t
  misc_feature (810)..(810): n is a, c, g, or t
  misc_feature (818)..(818): n is a, c, g, or t
  misc_feature (842)..(845): n is a, c, g, or t
cccgacgggccgtttcttccgtccttccttggcggctgcgagtccctgcgcagtttgcttccgagcctttcgagattccgcggagatctgctcagttcgtgccgctcttgtctggttctgatgcgcggacggctgctgcctgtgaggcgttgcgaggagctgaggcccgtctgaggtgactaggtgggagaggagaggagctcgtggctcgacggcagaacagtcctttcgttcgttgcccacgcctgcgggccgcggcctgtttctctccattccaggcttcttccagttccagccatggaggaggtggaggtggccaaccgggccgcggtggagagctgccacagggtgctggccctgctctcgcagcagctggacccggccctgctcaagagtgtagcgtcagagagnnnnaattgtaaatacacaaacaaacaacatcatgtggtgcaaccagacataaaagatatgaagacacatcatgcaaatcggttcattgtaataagttcaataatatatgatggacaaatatagtaagcagttacaaaatattcacctgctctaggtataggactttgcgctgaaaaatgcttgtatgtggactgcaaggaatggcaatcacttcaaccctttcgcctctccctaggtctctaaaatattctttatatctagtaatgtcagcagtggcagacatcaaaactaacctgccaagggtaacacggtgacataccaacagcagatagtagacaactatttatttatacacaaagggaacaattactgctaaaagacaaaacactnnntaccatncactagtngaaattactctattgcttaccttnnnncactctttttt

SEQ ID NO: 4572 - DNA, 405 bp, Zea mays
ttgttaaagaggcaccaaatgatccccgataaactaatataatgctgaattctgtttttctcgccctttgtttcatattgttagcctctgtccatctaatctaattacacaggctcgtcgttaaatttaagtctatgatggtaatcatggaagttaatttggcaatggaatatacaagccaatggagtgacggatagcatactctggagacagtggtgggtctagaaattatttagagcctgggtgatcgtcactgctctaggtaattatctagaaaaatactatgcttacccttttcgacaaataaaagtcctctacgctttgccggtggacaaataattcccattttattttgaactgtaaatgtgggattatgagcattgtgatgttatccaatgatgcctg

SEQ ID NO: 4573 - DNA, 1427 bp, Zea mays
  misc_feature (1081)..(1083): n is a, c, g, or t
  misc_feature (1109)..(1111): n is a, c, g, or t
  misc_feature (1187)..(1187): n is a, c, g, or t
  misc_feature (1189)..(1189): n is a, c, g, or t
  misc_feature (1191)..(1194): n is a, c, g, or t
  misc_feature (1386)..(1392): n is a, c, g, or t
ggtgtcaggtaaagacgcttcctcttatcatattctgctatatgctttggtttggctgataatatgctggtcaatgcagcagcagtaatggcaggcacttctaaaactccatcttgtcaatacctgtttgtagactagtttttatactattgaaatacttaacttaaagctaaagtgaatactacagttatatctgatatgttgtctggactaaataggaatcttttaatatgcctcagatctcaattgacctttgcattgcatatttgtaccttatgactttctagttaataattttgataatattaaaattgcacttttctctttttaaggcaaacagccaaacaccatatttcaagtagtaaatgactgtcacaccattgacataaaccaagcttatttgaggtgttactagctagttcattgataagctgaagttgaacctttgtcagcttgtctctgctattcataatggttcttggttcactactattgtcgtgactattatagctcccgaatcaggaagctatccagttcttcttgataatcattattttctcttacaaatgcagtttatagtcaagcatgattatatatggctttatgttgatatcttgtttaacttataaaacttgtcttaatggaaaaatataaagggatgcatttgttgatgtatgctgtgctttcaactttgtttgtcttgtacctcatgttccatatttggtagtatttcctatcagcacattcattcagatctgtgagaccagaccacttgtgttacctctatgctattttcctgtatagcatgtttgcccccaagagaagactggtactttgtaccttgttgctttaaatgcttatagttgatgacataactaacttaattgatgtagtggtgtctgaaaggagtttggaactaagtttagacctgcatgcagtagattgttcccaaggattgtattggaataggctgtttgtgtgatcgaatgctggtaatgttactaaaggtcagaatatatatcgagcacgtcaacagagtactgtttttttttcttttgtggctacaaatgtggaagttgtnnnagtgtcgcacataagccacttaaagnnnttgtccttcttgggaaaatcggatcgtcaaccgggctggctgcatagacggcgacatctcctcatcgagacacttntncnnnngcgcagggcgaacgctcagcagccaaagctgtttgtgggcatgatcctcatcctcatcttcgcggaagcgctcgccctatacggtctcatcgtcggcatcatcctctcatcccgcgccggccagtctcgtgcggactaggcacgttccacatgtctccgccacctggtcgtaaccgggtcgtgttttgtatnnnnnnngagccgacaagctggagcacttaattttttttatg

SEQ ID NO: 4574 - DNA, 388 bp, Zea mays
ttgagcggtataaggcacgttgggtccttcgcgggttcactcaacgccctggcatcgatttctctgagacttttagtcctgtggtcaaacctgctacagtttggacagtcctctcattggctctctcacgtggttggcctattcatcagttggatgtcaataatgcctttcttcacggcacactgtctgaaactgtcatttgtgctcagcccactgatttcaaagactccactcattccagattatgtatgctgtctcaaccgctctctttatggactcaagcaagcccctcgtgcatggtacaacagatttgcttctcacctcctacagctcagtttcattgaggccaaaacagacacgtcattgtttgtctatcacaagggtgcaa

SEQ ID NO: 4575 - DNA, 710 bp, Zea mays
  misc_feature (466)..(471): n is a, c, g, or t
  misc_feature (479)..(483): n is a, c, g, or t
  misc_feature (487)..(496): n is a, c, g, or t
  misc_feature (500)..(501): n is a, c, g, or t
  misc_feature (504)..(505): n is a, c, g, or t
  misc_feature (507)..(515): n is a, c, g, or t
  misc_feature (523)..(529): n is a, c, g, or t
  misc_feature (532)..(538): n is a, c, g, or t
  misc_feature (545)..(550): n is a, c, g, or t
  misc_feature (559)..(568): n is a, c, g, or t
  misc_feature (574)..(574): n is a, c, g, or t
  misc_feature (578)..(586): n is a, c, g, or t
  misc_feature (588)..(589): n is a, c, g, or t
  misc_feature (591)..(593): n is a, c, g, or t
  misc_feature (596)..(597): n is a, c, g, or t
  misc_feature (604)..(606): n is a, c, g, or t
  misc_feature (609)..(613): n is a, c, g, or t
  misc_feature (616)..(620): n is a, c, g, or t
  misc_feature (622)..(622): n is a, c, g, or t
  misc_feature (624)..(631): n is a, c, g, or t
  misc_feature (633)..(637): n is a, c, g, or t
  misc_feature (639)..(642): n is a, c, g, or t
  misc_feature (645)..(650): n is a, c, g, or t
  misc_feature (655)..(662): n is a, c, g, or t
  misc_feature (667)..(675): n is a, c, g, or t
  misc_feature (677)..(693): n is a, c, g, or t
  misc_feature (698)..(708): n is a, c, g, or t
cggtcaccgtgcgccagcagctcttcttcgactacacggaggcgcagcccagcgccgcggtgctcctcggtggagcgcgaggcgccgtgctgccggcgggtcactccgtcagcgtgtccatggcgttgctccttcctgattcctaccacaaccgtgaggttggcatgttccaggtaacacatgcttgttacttgttagcaaaccgatgtgtgcatgtgcatgtgcatctcacggatcacggcggtggagttgaactggtcgtcttccgcgcagataaaagcagaggcggtctcggcaagtggagtcaccatggcatcagcgacacagccgcacatgcttcggtacaagagcggcccagtccggctggcgcagaccgcgctgctgtgcgtgccgctcactctgggcatgcgcagcgaggcccaggccgccagccttagggtgctgcagtacagggaagaaaattttnnnnnnttaatctnnnnntaannnnnnnnnnaaanntanntnnnnnnnnntaataatnnnnnnngtnnnnnnntgattgnnnnnntaatattannnnnnnnnnaaaatntgtnnnnnnnnntnnannntgnntatgttnnnagnnnnnttnnnnnanannnnnnnncnnnnnannnnagnnnnnnggacnnnnnnnnactcnnnnnnnnnannnnnnnnnnnnnnnnntcttnnnnnnnnnnnaa

SEQ ID NO: 4576 - DNA, 1109 bp, Zea mays
  misc_feature (1061)..(1066): n is a, c, g, or t
gtcagcagttcatcaagaccttttagtctctgcttcccttcactaatcaaaaacctaatcttttgtttgtcatcacaatggcgatatttctcaaactcggcccttgcggtctgcctcaactcatctggacaaaccatgttaatgaataattagttgcaccttgtcgctttgaaatatagcagcacacagcagaggtaagagagagcaaggagcctaacctcgagcatgtaccggggctcggtgagtgatacgcaatgcctgtctataaagcttcaagacatgtgtacgcaggatgaaagcccgtaaatccatgaaatacgccattgaagaacaacttaatgccaagtaatggtcaatccatgtgaaacctcccagcaagctggaaattgtacaatcatataatggtcatgaagtaagagcatctttgatatctttatagcacacaagtatactatgcatacataactgctctagccaaaattcaacaaaccacagagagtgcattggtactgcaataacttatgcatatccatgcattactcactggatatatactaaaaaatctattgcatagactcaataaaagtatctcattagtttaatatatactaaaaaaatctattgcgttggtacttcctctcttgcacctgcccaagctctaataccaagtatgccagatgtgtgttcgtatgatctgagctatttttaaaatgaaaaatagctgtctttataaatccatgtgcacatagagaggattttgccaagttcattcaacttcggaacaatcagtgtaagttgctatctactaatacactgaaagtaatgcaagattcatatgtatatacggtatatgaatgtgtcatctcatctgatgcattccaacaaacacctaatgctcacaccgtcacacgtatagatccggccgtttcctttaccatcaaaatgggcatggaaaactgatctcatggcgcccaaattaccatttcaaaattcccgcattcagctactgaagctagctccaaatcaataggaattcgaaaaactggagggagccgcagtcnnnnnncaacttactaccgcaccaccgctgggatgtgcgtctgctccgc

SEQ ID NO: 4577 - DNA, 861 bp, Zea mays
  misc_feature (385)..(388): n is a, c, g, or t
  misc_feature (390)..(391): n is a, c, g, or t
  misc_feature (399)..(399): n is a, c, g, or t
  misc_feature (404)..(405): n is a, c, g, or t
  misc_feature (803)..(803): n is a, c, g, or t
  misc_feature (858)..(858): n is a, c, g, or t
cttcgctggcgcgcggacgtccgacaggatcgggcgccgcttgaccgtcgtgttcgccgctgtcatcttcttcgtgggctcgttgctcatgggtttcgccgtcaactacggcatgctcatggcgggccgcttcgtggccggagtcggtgtgggctacgggggcatgatcgcgcccgtgtacacggccgagatctcgccggcggcgtcccgtggcttcctgaccaccttcccggaggtgttcatcaacatcggcatcctgcttggctacctgtccaacttcgcgttcgcgcgcctcccgctccacctcggctggcgcgtcatgctcgccattggcgcagttccgtccggcctgctcgcgctcctggtgttctgcatgccccgagtnnnnannagtccttngaatnnggatcaacaatatgattaattgtaaatacacaaacaaacaacatcatgtggtgcaaccagacataaaagatatgaagacacatcatgcaaatcggttcattgtaataagttcaataatatatgatggacaaatatagtaagcagttacaaaatattcacctgctctaggtataggactttgcgctgaaaaatgcttgtatgtggactgcagggaatggcaatcacttcaaccctttcgcctctccctaggtctctaaaatattctttatatctagtaatgtcagcagtggcagacatcaaaactaacctgccaagggtaacacggtgacataccaacagcagatagtagacaactatttatttatacacaaagggaacaattactgctaaaagacaancactgtgtaccatccactagtggaaattacttctattgcttaccttaagtcactnttt

SEQ ID NO: 4578 - DNA, 399 bp, Zea mays
gcgctgcccagggagatggaggccgcccgcgtggccttcgagaccggcgccgcgccgatcgccaacaggatcaaggagagccggtcgtacccgctgtaccgcttcatccgccaggacctcggcgccgtgtacctgaccggcgagaagctcaagtcccccggcgaggagtgcaacaaggtgttcctggccctcagcgagggcaagctcatcgaccccatgctcgactgcctcaaggagtgggacggcaagcccctgcccatctgctgaggagtgaggaggaggacgccaccggtgccaagaggcaagacccgcaagaggaggagttgacatgacaccgtacgcgcgcgaggaagaaataaagaagggagtatttcggtattctcaagcaggcttcatata

SEQ ID NO: 4579 - DNA, 374 bp, Zea mays
gtcctatcgcagccttgtataagagaacagataatggatgcagctgttacagcctcggctgggagtgcctcccttcgctacacaaaatcaaggcgcgtgtcgactatgacggcacctacactgctgatttcgagaagccagtggctgagatgatgcaggcagcaaaactccatcccaaccaacccataattgagatggttactcaattctaagaagcctggaaaactgccatttaatactggttttagcaaccggatgaaaaggccgctaatttcccactagatatattccatttccttgcttttcgacagcttggtgttgtatgtcaaattattaagcagctttgtaataagactgtgtggtgccactttagg

SEQ ID NO: 4580 - DNA, 393 bp, Zea mays
ctgcatctctgatgcaaagaaggtgtttgacttctccactgaaaagaacattgtgatgtggaatgctatcctttatgggtttgttcaaaatgagctccaagaagagaccattcagatgtttcagtatatgaggagagctgatcttgaggctgatgattttacatttgtgagtgtccttggcgcgtgcattaacttgtattcacttgatttaggtaggcaggtacactgtataacaatcaagaacggcatggatgcagacttgtttgttgctaatgcaatgctagatatgtactcaaaacttggagcaattgacgttgcaaaagcactattcagtctcattccagttaaggatagcgtatcctggaatgctcttatagttggacttgcacatat

SEQ ID NO: 4581 - DNA, 419 bp, Zea mays
  misc_feature (329)..(329): n is a, c, g, or t
  misc_feature (335)..(335): n is a, c, g, or t
gctgttgttgtatcgacagtgatggagaaggatcgtcaagatgtggcacggaagcgccgggcggtcactagggtcggggaccctttccgcgaggcgaagaaggcgtggggaggcgcgaagtctgccgcccctagcagtagcaaaccaccattggctgtgaagtcagccgcccccaggcctagcaagtcttcgacgggtgcaaaggctgctgcttctggtgcgggcaagcttccctcagccgagcccgcgaaggagcgaaggctaccgttgccggcgcgcactgacgtggcggcggcgcgtgttgctgactttgacacggacttctgcgngggggnttatctcgttggtaagtttttttttcttttctccctgttttttttaagggggaggagatcttaaacaagatcatggtgcagggt

SEQ ID NO: 4582 - DNA, 562 bp, Zea mays
  misc_feature (533)..(536): n is a, c, g, or t
  misc_feature (543)..(545): n is a, c, g, or t
attttccggaaatcaagttttgagaagctacatgttatccaacattttaagcattgcaaccttcaagcatttgagatgccagtgtaattgttccacaattgtcatcggggctgctaggagctgtgatgtagcacttcgtttttattctgctgttgtgtgactgtgtctttacatttctgttgttggacaagactccaaaacgcttgtaattgttctggctaagggcccgttcggttattcaggaatctactccagaaaggatttcagctggaataattgtataatttgtataacaattagtaacctggaatagttcctagtcttgttccagcctaaccgaacggggcttaaatcagaatctgtttcacacgatcatttctcgagtgagggaaacagattctgatttaagccccgttcggttaggctggaacaagactaggaactattccaggttactaattgttatacaaattatacaattattccgctgaaatctttctggagtagattcctgaataacgaacggccttagnnnnacattannncgttttggagtcttgtc

SEQ ID NO: 4583 - DNA, 666 bp, Zea mays
tattgaatggttggctggctagccgatcttccttaccggcgaacgaatctgaatgggatctccatggcaatacgtttgctgaatggggtctctgctgtcgaacgaatctgctatggtcttggtgccaaccaaccacacatgttcatggataatcgtgatgtgtggtggtggtaactaatagcagaagtagtagtggttaagttagcatttttttgctctttttgttcgtacttaaatggtagtaatcaaaagaaagtatagtgttacctaaacaaacccatcaacgttatctatagtgcttactaactcaagtagatactacaaacaagaaccatatttttaaatagcattagacacgaaacattacaaccattttgaagtatataatcttctgagaacaagaggagcaaaagttatggtactttatttcactgacgcaagaatactgagctattactttttagaagaaaaatatatgcaagtgatcaaagattctaagctattcctcctctcttgctttctatactttatatatttgacatatgcttattttgctcgctagaaaatcaggaagaccccaatggttgtgtcaaatccgaaagaagttttagactctagagtatgaactgaacccacttgaactggagtttccaagaggagaggagg

SEQ ID NO: 4584 - DNA, 959 bp, Zea mays
atagtacttgaacctggtgccttggctcagattcgttatagtaggagtacgagcagggacatcgggaagaaaagaattctgttgaatgcgaaagatgagctggagttgcctccacaacctgaggttctcttagaaagcagtacaacaattttgtcccctgcaagactcaattttaagccatttggtagcaataaggggcagatattgccaaagactccaaagactcctgatgcatctgcgtttgatggtgattcaaatcttgaatcacttccacttgatttgctggtatgaaactgaaacaactacctttttcttaacttcaatatgcattatatctgtggtaaacctgattgcatttgttttgttggaaaaggtaaagatcatgtgttgcttacaccacgacgaacttaaggtggtttttcatgtttcaaaaaggattcgaaaagcagtaagtatcatcttaactgttgcattctttatttgtaaagtagataaaagtctcttttttccccatttctttgttctcatacaatttcagtcatttaaagaatgacattttgaagtaccctgtcttatgtcagctaggtgtggaaacaaatagtgttgtcttactttttgcacatagctgatgtatgctcatctcatcctcataaaaactgatttatctgacattccaaaatgcaaaaaatgttgttttctcttctgttaagaaatgacatagtgttacatggcctacttcttccattagtggtttctcattttgagattatgcactatcaattcattacattcttgtcaattctatctctgtttttgcatgctcaactatctatttattcagttaatttacatccttaacattaatgacgtttatttttcattcctatcagtcagcatgtgctttaatctcttatttatttccaaactcacttttaacggtaatataaactaggtgaact

SEQ ID NO: 4585 - DNA, 380 bp, Zea mays
ccctatctgctgagtgtccacaagcttaaaccgtcgccatgatgtgcatgtccctggcactcactgtcgtgctgtacgtgcagccgtgcaggcggctcgccaaacatgaggggggagggcaaatgccgcggcattccgaagaagagcggcagcgaggaggaggctcaagaaaggctcggtaccatattgggaaaagaatattccatatcatcaaacagttaagagatacaacaatatatgcacagaacctaaagggcgtagtgggctggagctctctgatgcacccttctccatagtccagacgtatatagtaagaagagaggctcctcattgttggagctgaatcgccgaagtgtctttggtattacttgccctttgga

SEQ ID NO: 4586 - DNA, 713 bp, Zea mays
  misc_feature (683)..(685): n is a, c, g, or t
  misc_feature (697)..(697): n is a, c, g, or t
gcatcaattgacgcacctgcatagggccaaactattctaaatcacttgcagattcagtgtcataccttttctagctgctaggaacttgtagtgttagtgcaacagtgtgctctgatatttgtgtatgtctgtttctggcctccataaggagtgctttgtacctgggtttttactgccctttttccccctctactttaatatatgggtgcgcagttctcctgcgctcttttcgggaaaaaatgcacccgtttgccattggtcatagtttgtgtagcatgttgcagagatctgcttgcacctgttttgcatttcaacttcagcttattggacatgatagttattgaagatgccaaattttgtttttttttaaaaaaaaaaatctcatgttctgtggatgatctgcagattctgcctaatcctacatggctgagcaagtttccttagcttactaaactggcgtgctaacaagtgacacgtgtcaattgatgggactgactgaatcacgggatgacccaaagaagtaactctccatctgtatacccctcaccccaatatgtacagaaggaatctcaactaggaacctagaatttgcacaggaaaaaaaaacaggtgtgctagccatttggcaatcagtgccagtttatctgttcctccacagttacatatcccacccatggttgagnnngagctgcaaagnccgttggaattatctt

SEQ ID NO: 4587 - DNA, 848 bp, Zea mays
  misc_feature (841)..(844): n is a, c, g, or t
gagccgaggccggagcggtctactggtgcagcaccggccatctggtgcacgaagcagtgcagcacgtaaagcgccgttccattcgctttgcttctttttttcttcttcttcttcttcttcttcttcttcttcttcttcttcttcttcttcttcttcttcttcttcttcttcttcttcttcttcttcttcttcttcccccactaccactaccacgatattgattgcggtgtggctgacactgtagatggcggcacacaacgttggagctctcgtggttctcaagtcgggggacatgaaccagctcgcaggaattgtgaccgagagaggtaggctagctagctaaggccagcagccgttacaaagacagttcgttcctctaccaaataaaatgctcagactggatatactctgctgcagattttgccagaaagatcctcttgccagggcgaccttcacagcaaacaagggtagaggatatcatgacagaagaggtgaatagacgtagacggtagaccctatgcaagaaatcaggctaactgaacaacccatctcatagtcctcaccgttttccttatcgttgcaggacaaggtgatcacggtgtccagtcgtaccaatattctgcgtgcaatggaggtaatgacaggtaatggaccgtttctgcagcttgtggatttaaataaatgtgtcgtttctgaaggctacatgaaacctcacagcttcgtatgttgctctctttttttcttcttcttttcttctattaacagacaagcgtatcaggcatgttcctgttttcgacgacaaggtagttggaatgatatccatcggtgatgttgttaaaannnnatcg

SEQ ID NO: 4588 - DNA, 356 bp, Zea mays
gatgagactaccaattgtgaattcaagaacatggcgaggaagctcttactttcagacatcactgggactccaacggcatactcctacaaacgcaaattgttggtgcagatgctccgtaaggatcaggagagttgattctgcttcttttatggaatgtgaaaaggctgcagcctgcagcggcgcttttatggagtgaagctgttctagcttcccgggagagcagcaatacatcacatcagttataaaccgactgcatacacaatgaatacatggtaatggactggagtcagggaatattcttatcagttgcagtctagtaggctgtgatttgtacctcttgatctggtttgttcttg

SEQ ID NO: 4589 - DNA, 591 bp, Zea mays
  misc_feature (411)..(415): n is a, c, g, or t
  misc_feature (453)..(454): n is a, c, g, or t
  misc_feature (457)..(458): n is a, c, g, or t
  misc_feature (463)..(466): n is a, c, g, or t
  misc_feature (482)..(493): n is a, c, g, or t
  misc_feature (500)..(503): n is a, c, g, or t
  misc_feature (505)..(505): n is a, c, g, or t
  misc_feature (508)..(509): n is a, c, g, or t
  misc_feature (512)..(513): n is a, c, g, or t
  misc_feature (536)..(538): n is a, c, g, or t
  misc_feature (540)..(542): n is a, c, g, or t
  misc_feature (552)..(552): n is a, c, g, or t
  misc_feature (556)..(557): n is a, c, g, or t
  misc_feature (559)..(560): n is a, c, g, or t
  misc_feature (582)..(586): n is a, c, g, or t
gacggtgctaagcacggcgagcagccagaagaagaggtcgaggtggttgcggttgatgttctctccggcgagccatccgccgctcgccgttttcttcttggtggccttgttgacggccttcacgatgacggtgctcatgaagtagcccagcgacagggagcaccagaggaacgaggacgacatggacttgagcgcctgcggcgcctgcgagtagaagaactccatgaggccgacgtaggtgaacatgtcggcgatgccgaacacggcgaactgcggcgccagccagaagcaggacatgggcaggtgctggaacccggggatcatgtccagcatgccgtgcctctcggccaccttcttgcgctgcacctccacgacggcggccatgaccatggagacgatggagagcaaaannnnntgaccgagaggcacgggatgctggacatgatccccggnntcnnctgcnnnncctgcttctggctggnnnnnnnnnnnngtgttcnnnntncannctnntcacctacgtcggctcatgggannncnnntactcgcagncgcnnanncgctcaagtccatgtcatcctnnnnnctctg

SEQ ID NO: 4590 - DNA, 829 bp, Zea mays
  misc_feature (396)..(400): n is a, c, g, or t
  misc_feature (417)..(417): n is a, c, g, or t
  misc_feature (693)..(693): n is a, c, g, or t
  misc_feature (713)..(716): n is a, c, g, or t
  misc_feature (746)..(748): n is a, c, g, or t
  misc_feature (750)..(750): n is a, c, g, or t
  misc_feature (771)..(772): n is a, c, g, or t
  misc_feature (782)..(783): n is a, c, g, or t
  misc_feature (792)..(798): n is a, c, g, or t
  misc_feature (812)..(814): n is a, c, g, or t
gaactacagtgcacgcaaaaaatacatatcagaaaatgcctcagatctcatttgattgtaggactccaagtaggttctccctggagagcagcgacttggagtttgtctgcacctcacaattaagcaacacatcatcaaaagcaagaaaattttaagcacattttttccatctacgatctgccagatatataaatattgaaaattgaagtcaagaacaataaatcacaatctagttcaaaatgttgtaaaatcactcatgtggaaccccaagtaggtcatctatgatctacatctaagatcgtgtttgggcaggctccgtgcaggcaatcctaccaagccagaagggcggcggagcaccaagagtggctccgcttacataaacctaaggctaataannnnnaatatgattaattagtnaatacacaaacagacaacatcatgtggtgcaaccagacataaaagatatgaagacacatcatgcaaatcggttcattgtaataagttcaataatatatgatggacaaatatagtaagcagttacaaaatattcacctgctctaggtataggactttgcgctgaaaaatgcttgtatgtggactgcagggaatggcaatcacttcaaccctttcgcctctccctaggtctctaaaatattctttatatctaggaatgtcagcagtggcagacatcanaactaacctgccaagggtannnnggtgacataccaacagcagatagtagacannnanttatttatacacaaagggaannattactgctnnaagaccaannnnnnntaccatccactatnnnaaattactctattgc

SEQ ID NO: 4591 - DNA, 677 bp, Zea mays
ttggtactgactatagcggtgaagggaactgcggagggataattcctcaagttatggatacaatatttagaaaagttgacacctcaaaggatggctcagagtttttaattagagtatcttttattgaggtgagatacctagtggcacttgtctctttcttatttgtaccagcatctcttagcttgttatcattgcgtgctgtgctgctatggatttcagatattcaaggaagatgtttttgatttgctcgatgcaaatcaagctgctgtaagacttgatgcaggttctatggcaaaagcatcagcacctggcagagtgccgattcaaatccgagagactgcaactggaggcataacccttgctggtgtcacagaggctgaggtgaagtcaaaagaagaaatggcatcatatttgacacgtgggtcgtcgtcgcgtgcaacagcaagcacaaacatgaataggcagtcgaggtacactgtacatacatcatacatgtgttttctttcttcaagaaccattagtgcatattacaaatgccgttctgttatttcactatctttgatgtgcattctaataatgttcttatttggatggtgttgcttatctgtagtcgctctcatgccatctttacaatatgcgttgaacaaaagagaacatctggtacatccgacaagtca

SEQ ID NO: 4592 - DNA, 467 bp, Zea mays
cggcgtagtcgtgcccgctgccggctacgatctccggcgccacgtagtcctccgtgcccacgaacgagttcgacttggctggcgtccgaacgcccggcggcgagcagcatgacgacgaagacgcggacggggcagtcatggaagtgaacaacggggactggggcgaagctacgtggcggcgggagaagcacgcgaaaaccgtagatgccttcgtgttcttgttcctgcgcctgtggcgatgtgaggaaggtaaaagcgagctggcgcgtgctggggccgcgtccggcggcggcgggggcagaggcggcggcaacgtggtagagaggtcgaagtcgacgagcatgacgtggcctgattcctggatgaggacgttctccggcttgaggtcgcggtacacgacgccgaggccgtgaaggtgctcgagcgcgagcaccagctccgccgcgtagaaccggatgacggattcc

SEQ ID NO: 4593 - DNA, 593 bp, Zea mays
gcctagcagaagcattctcacgttacggacaagtaatagaaggtctatcctcgtcgcttgccagaacacacccttactgatacctaatagttattctgcctgctgctgttagctgttaccaaagccgggcttctttcttgagtgcagctaccgtcgtcagggataaggtgaccgacgtaccgaaaggattcggcttcgtgaagtttgcttccccggaggaagccaataacgcgagggaagagatgaacggcaaggcaagatttgctccttggaaattactcgttgttatttttttttctctcccttcttctttgtgccatgtggagaggagcgctgagcaatgcggctcactggcaggcattgaacggtcgggtcatatacgtggacattgcaaaggccagacaggaccgtgctgcagatgccctcccaatagcgagaggccctcctaagcctatcagcaacgactgatagaggaaggccttggtgtgcgctcccaatagcgagaggtcctcctaaaccaattagcaacggctgttcaaggaatgcctggtgtgtagttccctcccgtcctcagctggcatactagttcgatt

SEQ ID NO: 4594 - DNA, 1006 bp, Zea mays
  misc_feature (987)..(987): n is a, c, g, or t
gtggagtagttagaatattcacagtggctgtaggtattctgttctctgtttatgcatactgctttagtgcttacagtttttggctcaccatcttgaggtgtaaataggtcactattgtggtcgtggctgttccagaaggactaccattagctgtcacactgacgtaagcatggtttgtgtgttattttctgccagccctttcgtcccttgccactcaacatactttatttttgtcaggcttgctttctcaatgcgcaaaatgatgaaggacaaggctctggtatgttcccaactttctataccttggttttgtcatactacttgatccgacattgaatgctttgcacgctcacttcctatggaatgtaggtcaggaggctttctgcatgtgaaacgatgggttctgccacaacaatctgcagtgacaagactggcaccttaactttaaatcaggtgcaatggtgtttattcactttatacatactgacatacatgtttcagataattctgtttgttgaatctgattggccctgatttttaaattctcttcttcctggttgattttaagatgactgttgttgaggcatattttggtggaaagaagatggactcaccagataatgcacaaatgttatctgctgatgtcacatcactgattgttgaaggaattgcacagaacacttctggaagcatatttgagcccgaggttagtcatctccattcgtggagaaagaaaaagcatatgtggttgcatatgcatttgagatttcaggttttagtaaagatatagcttcgtagtgatccctatgcgccatcactcagtggttagataaaatgtgcacccttacaatttttttattggaatttattgcacatgcatgcctgtgtagtgatcttcagaggaaattttatgtttggttctcaagttcaattgattttttctggcttgacaattatcaggagagcatgaacagacatgtactttcnggggccatgaattctgact

SEQ ID NO: 4595 - DNA, 409 bp, Zea mays
  misc_feature (401)..(401): n is a, c, g, or t
ctacatccattgtttcatctgcaccagatagtgggcagcctagaaacaatacacctgatctgccaaggcgctcttcaagcccatttccctcagaagggatggatttattgcgacagattgcctttgctggtcttgaagactcagagaggtttgcgactgctgtcagtgaacttaggcgaatcgctaggccaagccactacggggcatcaacttcatcaaacccaccaacaaatcctgagcctattgatggaactcatattgccatggcactggctgcagatcaagcttctaattcgagcaccatggctgtcattcaggaagatgcagcttttgctgaaagtgctggagaacctagtaatgccgggtcttcaagatccctgagaagaagaagaggaagtggngccttaag

SEQ ID NO: 4596 - DNA, 550 bp, Zea mays
  misc_feature (381)..(381): n is a, c, g, or t
  misc_feature (383)..(385): n is a, c, g, or t
  misc_feature (390)..(390): n is a, c, g, or t
ccggtgccacaacgccgtgctgctcgacttcagcgagggcgaccagcgccgcccgcgtcagcgccggtgaaatggaaccaccacgagcgatcgagcacaagcacatctgagttcgtcgttgccttcaagaagtcgtcgtcgtagcttcattttcccattcgcggccggagtttgtttcgattacccaaggaattattgcatagacctgtttcttccgagcggcacggtgccaaagggatcggtctaggtaataatttcatgctttgttagacaataataataagaataataatttcgtcttcttactagtactacgcgatgtgctagtgtacaagcattgttctatttttgctaataactgaagttgcgctcttgttccancnnnggtanaattttctcgaactgtcgcaatggagatttcctcgaacagtcgcaattgctggatcatatattttaattgtcatatatcatatataaaaccacagttctcttctctttattatcacaatgcaattaacaccactcccttacttacctgtaatgcgaggga

SEQ ID NO: 4597 - DNA, 854 bp, Zea mays
  misc_feature (475)..(475): n is a, c, g, or t
  misc_feature (676)..(677): n is a, c, g, or t
  misc_feature (736)..(736): n is a, c, g, or t
  misc_feature (746)..(748): n is a, c, g, or t
  misc_feature (771)..(773): n is a, c, g, or t
  misc_feature (781)..(786): n is a, c, g, or t
  misc_feature (794)..(805): n is a, c, g, or t
  misc_feature (809)..(820): n is a, c, g, or t
  misc_feature (823)..(826): n is a, c, g, or t
  misc_feature (828)..(828): n is a, c, g, or t
  misc_feature (830)..(831): n is a, c, g, or t
  misc_feature (833)..(842): n is a, c, g, or t
  misc_feature (845)..(850): n is a, c, g, or t
agagctcgcccggccttcattttctcctgcagtatattgactaggttagggctgccctcaggctggttgttctccaggttcttcctcccgctcacgatctccagcacgaccacgccgaagctgtaaatatcggccttctcggtgatcgtcgacgacagccactccggtgcgaggtaccccctcgtccctctgatcttggtcatcacgtggctctgatccctgtcgatgagcttcgccaagccgaagtccgagatcttcgcgtcgaacctgtcgtcgaggaggatgttccccggcttgatgtcgagatgggcaatcttctgccggcattcctcgtggaggtaggccagacccttggcgatgtctaggatgatcttgtaatagcttggttttctcaacagatataactatgcatatgaacttcattctcaaatctcttgcagaagctcgtagagctcttcctaaagggaattcaaantggtatgaagagggaagtttactattggcatgcctactatgtgagcttgtctctctcacaccatccagttcaacatgcacttccctggtgagctattttaatataagagaataatgaatttcaggacaagaggttgcctgttggtgcaagcgctttgcttaaattggaaggtaatttatttcccctgcattccaataactnntgcttgtggtactagaaagttttcttttgtattttgggcacggggttcatttgaattgntatcggacannncatattgtcagtgcatttacgtnnngtcttccnnnnnntctgtcannnnnnnnnnnncccnnnnnnnnnnnnttnnnntngnncnnnnnnnnnngcnnnnnncatg

SEQ ID NO: 4598 - DNA, 1259 bp, Zea mays
  misc_feature (899)..(902): n is a, c, g, or t
  misc_feature (906)..(1036): n is a, c, g, or t
  misc_feature (1038)..(1039): n is a, c, g, or t
  misc_feature (1041)..(1055): n is a, c, g, or t
  misc_feature (1058)..(1061): n is a, c, g, or t
  misc_feature (1072)..(1074): n is a, c, g, or t
  misc_feature (1085)..(1086): n is a, c, g, or t
  misc_feature (1089)..(1092): n is a, c, g, or t
  misc_feature (1095)..(1097): n is a, c, g, or t
  misc_feature (1102)..(1108): n is a, c, g, or t
  misc_feature (1111)..(1126): n is a, c, g, or t
  misc_feature (1128)..(1134): n is a, c, g, or t
  misc_feature (1136)..(1139): n is a, c, g, or t
  misc_feature (1141)..(1141): n is a, c, g, or t
  misc_feature (1143)..(1150): n is a, c, g, or t
  misc_feature (1152)..(1163): n is a, c, g, or t
  misc_feature (1168)..(1169): n is a, c, g, or t
  misc_feature (1171)..(1175): n is a, c, g, or t
  misc_feature (1178)..(1197): n is a, c, g, or t
  misc_feature (1204)..(1204): n is a, c, g, or t
  misc_feature (1207)..(1209): n is a, c, g, or t
  misc_feature (1213)..(1230): n is a, c, g, or t
  misc_feature (1232)..(1233): n is a, c, g, or t
  misc_feature (1235)..(1237): n is a, c, g, or t
  misc_feature (1240)..(1240): n is a, c, g, or t
  misc_feature (1242)..(1242): n is a, c, g, or t
  misc_feature (1245)..(1247): n is a, c, g, or t
  misc_feature (1249)..(1252): n is a, c, g, or t
aggagacacagcacgcagcaggggtatggggaggccaccgtgctgcgacaacggcgtcggcgtcaagaaagggccgtggacgcccgaggaggacatcgtcctcgtctcctacatccagcagcacggccccgggaactggcggtccgtgccagagaacacaggttcggcgcccaactctcgccatgttgcatcttgctcagctgatcgatcgatcagatattgtcactgaagggatgtactacatacatgctgagagttgttgttgtgcctgtgctcttggttttgttttttctttgagacaactagtagtgtgtgtgcttgatttgcttcgatgttacttacatgatgtgtatttttttgtctagggttgatgaggtgcagcaagagctgcaggctgcggtggaccaactacctgaggcctgggatcaagcgtggaaacttcactcctcatgaggaagggatcatcatccacctccaggcgttgcttggcaacaagtaatcaccattactcctaaaatagtttttttagaacctcttaaaatcattgatgtaccactctgctagcatagatttatttataacttcatcaacctcatatccatcgcattgacaaacaaacaaacttgaaataggtcaaacaaacaaaccagcttgaaaatggattcagtttcatttcgcattgacaaacaaacaagcttgaaataggtcaagcaaatccatgcgtgactaatggaacaacagcataatctatggcttcaaaaaaacatttttttccctatctgactaagataagtatgtcacatacatatatctcgtgtgctttcatgcaggtgggcagccatagcctcctacctccctcaaaggactgacaacgacatcaagaactactggaacacacnnnncaannnnnnnnnnnnnnnnnnnnnnnnnnnnnnnnnnnnnnnnnnnnnnnnnnnnnnnnnnnnnnnnnnnnnnnnnnnnnnnnnnnnnnnnnnnnnnnnnnnnnnnnnnnnnnnnnnnnnnnnnnnnnnnnnnncnncnnnnnnnnnnnnnnnccnnnnctcctccctcnnntttccaccttnnctnnnnacnnntcccnnnnnnntcnnnnnnnnnnnnnnnncnnnnnnncnnnntnannnnnnnncnnnnnnnnnnnntcacnntnnnnnctnnnnnnnnnnnnnnnnnnnnccctttnacnnntatnnnnnnnnnnnnnnnnnncnntnnncantnccnnncnnnnacacttc

SEQ ID NO: 4599 - DNA, 832 bp, Zea mays
  misc_feature (792)..(795): n is a, c, g, or t
  misc_feature (798)..(798): n is a, c, g, or t
gctgcatgtagctgggcatatcctttcccagaactgtacaggtgtttcctgccaatacaagagtatgcagctgtcagaaaattgagcataaatactgcaactactaattaaatacatgaaactgtgcagttgagaacaccacaccaacattgcaaaaactttgaaaaatgacctaaaaaccactagccacgttcccatgcgattttccatcgtaccctgttaatgcagcagaatgatatcccactatgtacttatgtagatgttattctttttgagatacaaaggacagctgtgcattaagaagaaacataataatgaattttagtatattacaacacaaggcctcgaaagcagtccccaactcgtacacgtgaaacttgtaccttcactgcaagacagtgaacaatatgcacatgacatggctaatgatacttacttttatatcttctgactgtcttcgggaaatcagttatgatgcctgataaattaaatgattgaatatagtaattgatttccacagtttcatctccgaagaaatccaatggttgtgctacaaactcattctggaacacctctgcatacaaagctagccccgctgactgcagatcttgcacaagactgttctgtcttatgatgaagtcagagcttagagtaaaaacagatttgctgtccacagctacatattcagcaaacttcttaatgtctttcaacgaggaattagaagcatccccgatgccagagggtagagtgtaaacaagcttgcattttgttgtctgctgcttcattttgacnnnnaanaaaaaaaatgcaagcttgtttacactctaccctc

SEQ ID NO: 4600 - DNA, 392 bp, Zea mays
tctactggtacacattttatttttttcatggtgataattaattcgtagcttgcgcaaaaccaaaggttgtgtgatttttcaaggcagaaatcagtatcatgataggtgtgcttgagcttttgatagctagtttatttgaacttttatctttttatgatcatggtatattgagacagaaatattttacatgtacctttgcagtttttcagttggagaaaatatttaagacaacattttcatcgtttgttctccatatggggcttgtttcacgccacttgaaggaaggagggaatgatggtgttaagttcggacaatacatctacacatctatgaaatgtacaaccacgatgtagagcatatagtttctaaagttgggtaagctgtttggcagg

SEQ ID NO: 4601 - DNA, 408 bp, Zea mays
tctcttgatttcagaagatatgtgcaatttgcctcagcgccatgaggtccggccgcggccaagcactgttcactgctgaatgctcccacaagttccacttcaactgcatctcctcaaacgtgcagcacggcaacaaaatctgcccaatctgccgtgcagtatggaagcagctgccttttcaggggcctctggctgcatctgctgcccatgggtcagcgagagtaaacccagcgatttggccccagatgagcatgctgtcggtgaatccgctggacgagctcccagtctttggcaatccggagccagttgttttcaatgacgatgagcagatacttcttcagcctgaaacagcagttggcggcgaggagggtgacgaggttccccctttgcttgagatcacgacataca

SEQ ID NO: 4602 - DNA, 548 bp, Zea mays
  misc_feature (387)..(387): n is a, c, g, or t
  misc_feature (397)..(400): n is a, c, g, or t
  misc_feature (406)..(407): n is a, c, g, or t
  misc_feature (409)..(409): n is a, c, g, or t
  misc_feature (413)..(413): n is a, c, g, or t
  misc_feature (417)..(417): n is a, c, g, or t
  misc_feature (483)..(483): n is a, c, g, or t
  misc_feature (510)..(510): n is a, c, g, or t
  misc_feature (517)..(517): n is a, c, g, or t
  misc_feature (538)..(538): n is a, c, g, or t
  misc_feature (540)..(540): n is a, c, g, or t
tgtcgtccttatcccggaacttggcgacgttcagggttggcagcttgtcgccgccgccgatgagcgagctgtagttgacgtcgaagcccgccatcacggggttttcgtcgacgagcttgtccttggtgcccgtcttgctgagctggtaccacgtcctcttgctgttggtgaagccgacgatgtaggcattgtcgctgtggatggccaccgtgggcgcagcgccgcccttgctgttgagaacgacgtggatccacttcggcggcggcaggccagacgacgtctctttggccagcaccggccgacttaccttggatttgggccctagcaccgtgtcaggcttcgggccggccacagctgcacgtacattctggatgaatgtgatgtatngagtccgaannnntttttnntntgtnggantggagatttcctcgaacagtcgcaattgctgtatcatatattttaattgtcatatcatatataaantcacagttctctttattatcacaatgnaattaanaccattcccttacttacctgnantgcgaggg

SEQ ID NO: 4603 - DNA, 555 bp, Zea mays
atagttatctctggttcctgcgcgtgccataccctgcggacaagaggtgtgcgtagaggatctgattccaaacgtccggcacgccggggaggcaccagtggctgcagtcctccggcgcgtccggcggcgttccgggctccctgtgccctgccgggtggccatcaggcctgagctccgtcatgtgagtgatgttcagaaacctcgccttcctcccgtggctcttgatatcctccgtcatcttcgcaatcatcgcgttcatccatgagtactcttcctcggagcggccattgtttgtggtcggtggctctcgctggccggcgcacgaaccgccagtgttccaggtgccgttgctgccattttcaggtgcagaaaaatcatggttaaattttctcgaactgtcgcaatggagatttcctcgaacagtcgcaattgctggatcatatattttaattgtcatatatcatatataaaccacagttctcttctctttattatcacaatgtaattaacaccactcccttactcacctgtaatgcgagggagaataactcctga

SEQ ID NO: 4604 - DNA, 377 bp, Zea mays
tcatgcataagaatcatcagtgtgttgattaggatgcgcgtgaggcaccatctgagagagcagttgctgctgcaacaatagcttttgttgctgctccagttgctgttgcagttgttgttgctgctgctgcagttgctgctgctgctgctgctgcttgagcaataacatcttgtccaacatagagagtggaggctgaggtgtaaaaggtgtctgagactgcaactgtagttgtgacaaaagatattgctgctgaagcatatttaacatttgcggatcttgagatatctcggcaagcttctcaggtggcaactgagccaaagctggtcggttttgtggcattaagttgtgttgttgaaatccaataccaatgttctggg

SEQ ID NO: 4605 - DNA, 601 bp, Zea mays
  misc_feature (558)..(559): n is a, c, g, or t
  misc_feature (563)..(563): n is a, c, g, or t
agtgctcacagacaggacgggcctgtttggcaaggacttcatgatccccgttttcaaagtcctgttgggcaacgggctcatcttagcaaacggcgacgactggaaacggcacaggaaagttgtccttccagccttcaaccacgagaggatcaaggtcgtcgtcctcgtcatcaatcatcatcatcacaagttttgcacatatatatatataggcagattttagcaactgatgatgacattgttcctgctgtcggtctcgagttcagagcatgtcggcagtgacggcggaagctacggaacagatggcacagcgatggtgcgagcagctaatactgcacagtggtgcccgtcaagcagcggaaatacaagtggaccgcgccatctgcgacctgactgccgaaatcatcggccgcgccgctttcggcaccagcctccaggaagccggtgaggtcctcgtcctgatgcacgagatgcagaagatgggcgccgcggccatggtggatgctcccatactctggtatcagtgctgtgatacaacaagctaggaacgcagaaganngcgncagccaagtatgatgtacctttcttttagtaactctcg

SEQ ID NO: 4606 - DNA, 406 bp, Zea mays
tccatctccacctgcagctagcctcctcaagatattagcctctgatttaaggagctgacagaagattcttcgtctaccagtgtatgaaccgcacttgactcattgtcattggcttctccaccgaggtggtcatccgatgccatcagaaggtcctttcgagcacgctccctgtctcgggggtacgtgtagtacaggaaggtgtaggtcaggcaacagatggccatgggcacggcgatctccgtgtagacagcctttgccaatgcggcagcattctccctgtccgtgtccacgctcgtgtcggacgagaccggcttatagccgaacacgcgctctgcaagaacaccgacgatgggagacgcaaacgacgcgaacactgcttcgaaacacttgtccagtgcgtagacca

SEQ ID NO: 4607 - DNA, 1396 bp, Zea mays
  misc_feature (59)..(59): n is a, c, g, or t
  misc_feature (893)..(893): n is a, c, g, or t
  misc_feature (895)..(899): n is a, c, g, or t
  misc_feature (901)..(901): n is a, c, g, or t
  misc_feature (903)..(905): n is a, c, g, or t
  misc_feature (910)..(954): n is a, c, g, or t
  misc_feature (956)..(983): n is a, c, g, or t
  misc_feature (988)..(993): n is a, c, g, or t
  misc_feature (996)..(998): n is a, c, g, or t
  misc_feature (1004)..(1010): n is a, c, g, or t
  misc_feature (1013)..(1014): n is a, c, g, or t
  misc_feature (1016)..(1016): n is a, c, g, or t
  misc_feature (1019)..(1021): n is a, c, g, or t
  misc_feature (1028)..(1030): n is a, c, g, or t
  misc_feature (1033)..(1034): n is a, c, g, or t
  misc_feature (1037)..(1041): n is a, c, g, or t
  misc_feature (1044)..(1050): n is a, c, g, or t
  misc_feature (1053)..(1059): n is a, c, g, or t
  misc_feature (1067)..(1069): n is a, c, g, or t
  misc_feature (1071)..(1071): n is a, c, g, or t
  misc_feature (1074)..(1077): n is a, c, g, or t
  misc_feature (1081)..(1082): n is a, c, g, or t
  misc_feature (1087)..(1088): n is a, c, g, or t
  misc_feature (1090)..(1095): n is a, c, g, or t
  misc_feature (1103)..(1108): n is a, c, g, or t
  misc_feature (1110)..(1115): n is a, c, g, or t
  misc_feature (1124)..(1128): n is a, c, g, or t
  misc_feature (1133)..(1136): n is a, c, g, or t
  misc_feature (1144)..(1148): n is a, c, g, or t
  misc_feature (1151)..(1155): n is a, c, g, or t
  misc_feature (1158)..(1158): n is a, c, g, or t
  misc_feature (1164)..(1167): n is a, c, g, or t
  misc_feature (1172)..(1182): n is a, c, g, or t
  misc_feature (1189)..(1191): n is a, c, g, or t
  misc_feature (1194)..(1199): n is a, c, g, or t
  misc_feature (1202)..(1204): n is a, c, g, or t
  misc_feature (1210)..(1215): n is a, c, g, or t
  misc_feature (1218)..(1220): n is a, c, g, or t
  misc_feature (1229)..(1233): n is a, c, g, or t
  misc_feature (1235)..(1242): n is a, c, g, or t
  misc_feature (1244)..(1249): n is a, c, g, or t
  misc_feature (1252)..(1253): n is a, c, g, or t
  misc_feature (1255)..(1257): n is a, c, g, or t
  misc_feature (1260)..(1266): n is a, c, g, or t
  misc_feature (1268)..(1269): n is a, c, g, or t
  misc_feature (1277)..(1281): n is a, c, g, or t
  misc_feature (1283)..(1291): n is a, c, g, or t
  misc_feature (1294)..(1313): n is a, c, g, or t
  misc_feature (1317)..(1329): n is a, c, g, or t
  misc_feature (1334)..(1346): n is a, c, g, or t
  misc_feature (1348)..(1348): n is a, c, g, or t
  misc_feature (1350)..(1354): n is a, c, g, or t
  misc_feature (1358)..(1378): n is a, c, g, or t
  misc_feature (1382)..(1384): n is a, c, g, or t
catagatggactcttcgcaaggatgtcccccatggacagcagcttactgggaatatgcngttactggcttgatgatcatagttgccattcttttgctttggacgacctgacaattctgtcacccaattagtgtccttaaccatacatagaaaacagtgttacaatggtgaacctgagtaaattctaattatccacaatcaatctaaataacacaatagttactgcaaagtagttatgctttatcagacatctcgtatcagttgcaaattggcagtatgcagttgacaaatatgtattgctagaagatatctgttcaatagcaacttacggacaataagctgatgtttcccctgttaaaccatgtgcacgcatttgataaaacaggacaagcactacagcaagatgccatggattctggaggatgagacgggggaacatcagtatcagggccaaactgaggatccacctgccacatactattcgcttacgcaaaaaggcaatgacatgattgctgttcaagttggttcctggtactatactctctgcttccctctgttgttattagtcttcaaatgaatatatccatcatctgaacatacatgcttgcaagattcaagtacgttaaattgtatatatttcatcaagtcttggcattactaattgtgtgtcagtaagctcctagtataatttcttttgagatgagtgctctcttaattttgttatagcgttcttacagtctctcatgccctatcaggtacaacttcagtaaaattgcacagtacaaacagctgaccttggaagaagctgaagagaaaatgaatagaaggagaagcagtgcatctgggtatgaacgatggatgatgaaggcagctacaaatggacctgatgccttnannnnnantnnngaagnnnnnnnnnnnnnnnnnnnnnnnnnnnnnnnnnnnnnnnnnnnnncnnnnnnnnnnnnnnnnnnnnnnnnnnnntcctnnnnnntcnnncttctnnnnnnnccnntntcnnntcccctnnnttnnctnnnnnctnnnnnnntcnnnnnnntctctccnnncnttnnnncccnnccctnncnnnnnntcttcccnnnnnncnnnnnncccttcctnnnnnccctnnnntccctttnnnnnttnnnnnctntttttnnnntcttnnnnnnnnnnntttttcnnntcnnnnnnttnnnttcttnnnnnntcnnntttttctcnnnnncnnnnnnnncnnnnnntcnntnnnctnnnnnnntnnctcccccnnnnncnnnnnnnnnccnnnnnnnnnnnnnnnnnnnncctnnnnnnnnnnnnnccctnnnnnnnnnnnnncncnnnnntccnnnnnnnnnnnnnnnnnnnnnttcnnncccccctccctc

SEQ ID NO: 4608 - DNA, 378 bp, Zea mays
agatcgatccgtgaactcgattgaggttctaggatagcctgtgtttcgttttctttttcttttctctgtttgcgacacagagtacaaatcattgtatgggtgttgcctgatatcattaacccttattcatcacatcacatacatgtacaacctttaaattagacgtctacctcccttccatcttggcataggtaaaccactacttgaggagaatgatattagatgcaaatttgtgctgtgtgtgttcctgcggttttagcaccgtttctgcagagaaatttatggaaacctgaggacagatcgggtaggtggggtcaattcacgagatcagtatactgtggaacgagttgcacgaagcagatgcacatggaacttgat

SEQ ID NO: 4609 - DNA, 626 bp, Zea mays
cgctggccgtgacgcacctgctccagcacacgctgcgcagcctctgcggccacgacgacgcgcagtgggtgtacgccgtcttctggcggatcctccccagaaactacccgcccccaaagtgagtcgcccgttcgttcgacatgcatgcgcgcgaccttcgttcggtgtccttgtcgtcgtcgcccatcgatccttgacgcgctccggcgctgcgtctagtagtctggtctggttcggcggccacggccttctgggtcgttgcttgtgctgattaaattgtttatccggccgctgttcagatgggatctccagggcggcatatacgaccggacaagagggaacaggaggaactggtaccacctgctagctcatgcttattcctctcttcaatttcttatggatttgtgtttgtctgtacgtgattcctcgggttgcaaaaccaaatcaaattatctctgcccaggatcctggcatgggaggatggattctgcaacttcgcagcctctgcctgtgaccacgagggcgcagctgctcctgccgccgccgccgcctcctcctcctcctacacggcggagtgtgctgctgccgggcaggaggccgccaagggcctgcagcctgagctcttc

SEQ ID NO: 4610 - DNA, 493 bp, Zea mays
ggcgttctcactagcgcaaacatcaagtacatgtctaacggcagtcgaggcaccgatcggatcgacctgaccaaggacgcgatctggagcaccggccgggtggcgtacgggcagcctttgcagctctgggacgataccgccaaggtcgccagcttcacctccaacttcaccttcgctatcaagccacacaacagcaccaatcaggcaacttacccaaaaaaacttctctttaagctttctccgtgttcccagcttggtaagctccgagcactcgttggaatgaaggtgacacttgctgcgcactgcaggccgacggtatggcgttctacgtcgggccgtggcccccaaaactgccggaggactccaacggcggcttcctcggtctcttcaacaaccccatcggcatgaacattgacttcccgccgaccatcgcagtggagttcgacgcgttcaggaacgactgggaccccaacaacaccatgaaccatattgg

SEQ ID NO: 4611 - DNA, 612 bp, Zea mays
agggaaaaaaaagaaactaaacttgtcgagccgctagcaatatgctttccatattactacccaagctacctcaggctgcgccagtcctgggtatctcatctcttattagaagcgcccagattggtaccgtcgcttgtcaagggtttctcctctatgaaagcatacactcgcgacctgaatttctgggccagctccgcgagatcatttgccatcctcgtatggggcagccggttcgcaacatcgatcgtccaggtcgcgcataacttgcttctcgtcagcacttccaaggttggtttcgaatagtttgcgtgtgacgccagccggtttagcaggataagagcttctctcatcaccaaacatctgcagaaacagtttttgcgttaataccacaacaaattgcacacgagttgttcataggcagctaagagcaacttggagtccagcttaagatagttgcccgcaaaaaggggaagaataggcacgtctagaatttactcagtgatgtctccacactcatgctgtgatacaacaagctaggaacgcacaagactgtggtagccaagtatgatgtacctttcttttagtaactctcgtgtttcatattgcatctgc

SEQ ID NO: 4612 - DNA, 711 bp, Zea mays
  misc_feature (376)..(376): n is a, c, g, or t
  misc_feature (378)..(379): n is a, c, g, or t
  misc_feature (393)..(397): n is a, c, g, or t
  misc_feature (430)..(430): n is a, c, g, or t
  misc_feature (486)..(489): n is a, c, g, or t
  misc_feature (505)..(505): n is a, c, g, or t
  misc_feature (510)..(510): n is a, c, g, or t
  misc_feature (512)..(512): n is a, c, g, or t
  misc_feature (523)..(527): n is a, c, g, or t
  misc_feature (565)..(568): n is a, c, g, or t
  misc_feature (605)..(605): n is a, c, g, or t
  misc_feature (607)..(611): n is a, c, g, or t
  misc_feature (648)..(652): n is a, c, g, or t
  misc_feature (662)..(663): n is a, c, g, or t
  misc_feature (679)..(681): n is a, c, g, or t
ctcagcttcgttgggatttctaagaccgttgagcattctgccgagcctatggtcccaatccataaccgaaatcgcttcatggatcctaatgggcgcgtcgaacatctcggggtttctattttcactggcacaattttattgcacgttgaaacatatagttagggttttatgacaaatgtatttaatggccatggtatccgtacgaaaatggcactacattttgtacagttttgcatgcttaccatatgctgtgccctcttgaaattttggtgtagctagaccaggagagagagtcgcactgtgatttcatgcatgtaattaaaatggactttaattgcatggtacaagccaactagatacatacttgcatatcgcntnncccacacttaattnnnnncctagctacttgcttatgcaaagatctcccaanagaaaactttcccattggtatcgaacctccaacaaccaacatcctagacatgaatnnnnataatccagatgcctngctcncntcttgtatacnnnnnatatgctgctgctgtaatgtgtatctctggcatctctnnnntatcttcaagtatatcatatactctttcacactaagncnnnnncaaataccagggatctacttgcgaaggttgcatcagnnnnnaatggtggtnncatccgttctctcttnnnagcaccaaaatacagatggactcactgcct

SEQ ID NO: 4613 - DNA, 830 bp, Zea mays
tctggtcgccgtaccagagacgcttacgctcgatggttggcgcttgatgactacggaggacggtgggctgggatttgcagagttgaacttgcattcgactctcacgctctggtccatggtggacgaagggagatgggccgtaagcagggccatcgacctgaccgaccggctcccagttattgccctcgcggtatccacttgtatggttgcctttgcggacattgccggtgtcatcttccttaggacgacagatgggctctacacttatgatctcaagactgagcagagcattcttgttatggataatgacttctatggcatcataccctacgcgagcttctacactccaggtatatatatgccatgctgctgctttttctacgagaagtggatttactagcatgtgcaatcctatcagtattcggtctgggtaatattttggtttgaaaatggtatatgagcgatgatttttatgaatttgtactctcccacattacatgtaaaattgcgacaagtcatttccttgttctttggaattggaattggatagatatgtagtcctatcagtttactctgtatgatgaagcctaccatatcccagttaatcctttgcattccttagacatgttgtgtcacttatcagcgtaagtgtggatgatgatttacctcaagaggctgaatctgtgtttttctgtatttatgagccaatgaggggaggttaatttgtcatcatgctgatatttggtttgaaatctatgtatttctacagtgttacgggtggccaccacaggcgaggggtctgcttcaacttcttgacagagacctatggt

SEQ ID NO: 4614 - DNA, 502 bp, Zea mays
  misc_feature (412)..(415): n is a, c, g, or t
  misc_feature (422)..(422): n is a, c, g, or t
  misc_feature (424)..(425): n is a, c, g, or t
  misc_feature (452)..(457): n is a, c, g, or t
  misc_feature (463)..(473): n is a, c, g, or t
  misc_feature (477)..(478): n is a, c, g, or t
  misc_feature (482)..(486): n is a, c, g, or t
  misc_feature (489)..(491): n is a, c, g, or t
  misc_feature (493)..(499): n is a, c, g, or t
catcgacagctctcctccgcccgcgatggtgatgcatctgtattctcgctcctcttccgccggcatgcgaagcatccgccgggagctccagcgcaggaggtccaagcccttggcgccgacagggtccgtcgctaagatgccgtccgcgtcgcgtcacgcttcgagcgacggcggcgtcccggatatatgtcctcgtccaccgcatcgagcggccccgtcttctacaatccgccatttccgaggcaccaccgtcaccgacgcgtcacaacaccgccggcctcgcgcttcgtcgcgctgcacccccgcctctcctccgccacctcggtctgccccatctcctggcgtccccgcgcatctgaagcctgggacggtggttggtgtccgcacaaggactacaacgctgaagacgaannnnttgactngnnggataaggacgtggatcccggacgccnnnnnnccgctnnnnnnnnnnncaannccannnnngcnnntnnnnnnnacc

SEQ ID NO: 4615 - DNA, 437 bp, Zea mays
  misc_feature (322)..(322): n is a, c, g, or t
  misc_feature (325)..(325): n is a, c, g, or t
  misc_feature (399)..(399): n is a, c, g, or t
  misc_feature (411)..(414): n is a, c, g, or t
  misc_feature (416)..(416): n is a, c, g, or t
  misc_feature (425)..(425): n is a, c, g, or t
tctgcgcgttgtaaccgtaaaactagtttcaatcacgacgaacagaatgaaacagattcctctgcactgcagcgagctgctgagaagcacagaccggagttaaaaaaaaaactgcaaagcttgtttacatgcctcaactcgcgagacacagatacaaaagagataacaacacagacacggcaaaccgcgttcattattcagtgaagagcgacagtgacggcgggtagtagtaatcctcgaagctccacagcccggctggcgctggcgccggcacctgcgcttcttcggggacggcggcagcggcagcggcagcggcagcggnggnggcacttacagctgcattcccgccctccatgtacgggacgccgagaaagctcatgtagttctcgtaggccattncctcctcaaaannnngnagggggttngcggtgcctgtg

SEQ ID NO: 4616 - DNA, 1203 bp, Zea mays
  misc_feature (1121)..(1124): n is a, c, g, or t
  misc_feature (1159)..(1166): n is a, c, g, or t
  misc_feature (1192)..(1195): n is a, c, g, or t
ctagcaatacattgctccaatgcagatcgaagtacagaagacctttacactcttcacagacaatggcgtttaccacttactgtaatctttctattgatttaaaacgaaccagtttatttaccattcgtgacatgtcccttttttcgttaacaccatggcattttcttttgttacggctttttagaattctgaggcacaatgtgcaaaattagaaataacttctccatggcatataaacacacctatagatccaatttatttaatttattcactgcatgtaatttgccgatacgagaaagaacaattggatctagaatttgatgagtagccactccattatcacatatccatggatgctttgagcatttagaacaaaaagatcattgtattgtcgactactcgactccttgatgtccatgtcatctcttactgccctataactgatttaaatagttcattttggcaggaaactgagataactgtttgtttctagaatgaagtaatcacttaaagaactacatgttaaacttgcagctgccgcatgaactagagactgcacggattaatgagtttcttaggaatattgatgcagacattggtgatcctcaagttggtaactgtcactattgtacataattcctttagtgtcactgttgtacataacacatagtaacttaccttcccatatgagcaggttgggacacagatcagttcatgacagacattgcagaggctactttggttatgtctagtgtgttaagaatgtgagaggcatgaataaactctctccctttttacccaaatcagcaaatgccttgtctactacctggtttggtctttctgcatttgaggaaaatgtagtaatattaatacgacacatgaaacgagtttgatatttatgtacgacatcagatataactttgcctccgagtgcgctggcttccgaagatataacttttggatctgattgggattatgagaatccagtcttaatatttttaaaatatgtgtcttgatatttttaaaatctgttccgcaatctggtccatttgtatggctatagatagattttttttatcagattcttataatatccttggatccagattacctttatttannnngatttgcagacttgtcaatttataatagatatttnnnnnnnntatgtgtagttgtctcttatatttcnnnnttggtgtt

SEQ ID NO: 4617 - DNA, 973 bp, Zea mays
aattttggatgatcctgcccctaaaaggtctgactgtagaattagaagaattttaactgttgaatgttcatattattctttgttcattgggaggttaagctattacaatgaatatactgtttggtgacttaaatacttaatatttgtcattatgtgcaacagtttgtgtgtgattgcatcctactagtccatttgcataacagatgggaaaaaaatttctgtaggttatttctggcacgaggcaagctccaaaagctcctggtggaatttgtacctcctaaactaatactccaggtaaattatgcaaactagaaattatattgttacaggtaaattattgttattatttatttatttatttatttattttgtgcttcaggaatactattttctcaacagagataactatgcatatgaacttcattctcaaatctcttgcagaagctcgtagaactcttcttgaagggaattcagactggcgtgaagagggaagtctactattggcatgcctactatgtgagcttgtctctctcacaccatccagttcagcatgcacttccctggtgagcaattttaatatatgagaataatgaatttcaggacaagaggttgcctgttggtgcaagtgctctgcttaaattggaaggtaatttatttcccctgcattccaataactagtgcttgtggtactagaaagttttcttttgtattttgggcacctgtcacggggttcatttgagttgctatcggacaaggcatattgtcagtgcatttacgtgtcgtcttccattggctctgtcaaccaccggaattccctgaagtatcgttttctctttgttcagaattcgttgccaagttcatgagcatccaccggaagagcatgtcgcatgagcccaagattcctgaggtgccgcagtgaaacctggcagagcatgtcctcgtgcggttcggccgtgtcgaaatcccgtttgtg

SEQ ID NO: 4618 - DNA, 586 bp, Zea mays
  misc_feature (512)..(512): n is a, c, g, or t
  misc_feature (514)..(514): n is a, c, g, or t
  misc_feature (529)..(531): n is a, c, g, or t
  misc_feature (533)..(534): n is a, c, g, or t
  misc_feature (558)..(558): n is a, c, g, or t
  misc_feature (574)..(574): n is a, c, g, or t
  misc_feature (576)..(576): n is a, c, g, or t
  misc_feature (578)..(583): n is a, c, g, or t
gtcgaccttggaggttctttgcagggacgttcccaagatcctccaggtaatgattttaggcatacctttcacgtgattaaggcgttctttgtgacgccccgcttccttccctcaggatctgacggatctgagcgccgccaagttgtcgttcatctgtcgcgaggtcgatgtctggggttcgctgtggtccctgaggaccacgcttgccagggctaccgcgcgcctctcccaacagagcgccgaggtggcggaccttcggttgctctgtgtcgatctgggagcagaggcagcagcggcacgcgcagaggcgcagcggcagcagttggagcttggccaggtcatcggcgagcgggaccaatctcggggccgggccgccgaggctgaaagccgggctgaggctcttggagtccagttagccgaggcgtctgctcgggccggagcccttgcagcagacctagccgtggcccaagccgcatcctcggagcagcgtgcccgagccgaaggtatgtctngnctgttttaagatttnnntnngcttcgtcctcaactcgtgttgangtctccgctttggctntncnnnnnncgc

SEQ ID NO: 4619 - DNA, 514 bp, Zea mays
  misc_feature (416)..(416): n is a, c, g, or t
  misc_feature (444)..(444): n is a, c, g, or t
  misc_feature (451)..(451): n is a, c, g, or t
  misc_feature (470)..(474): n is a, c, g, or t
  misc_feature (481)..(481): n is a, c, g, or t
  misc_feature (484)..(485): n is a, c, g, or t
  misc_feature (498)..(498): n is a, c, g, or t
  misc_feature (500)..(504): n is a, c, g, or t
aaccccacctcatctcagggcgtcaagcagagacgcgcacgttttcccacacgcgatatcccagtggcaggcgctgccccgctcgtggcactgttccaacaagaggaacagcagcgaccgagccatggacgactctgcgaactacaagaactcgaaccatgactactggcaggtacccaagcacgaggacagctacagcatatcgaaatgcgtccagatcctgaacggcatggcggagctgtcgcaggtggagaaatcggttgcccccgacgtcttcctgcagccgggcaaccgggaaattttcgtctccctcagcggcgacgtgcgcgccatgtggctgaagcgcaagattcagcacctggcttaaattttccttgtgctgtgccgttcttccgagtggagtacaatctaaaaantaagattcaccttccctgtacgaacacncacctanagctcttcattttattggnnnnnactcaancanntgtgtaacacttntnnnnnaacatgaaag

SEQ ID NO: 4620 - DNA, 402 bp, Zea mays
tgtacatttatttcctgctggaagactgcttctctttccctcctgtagaaaccaacaacaatggcagatgccatcatctccgccatcatcggtgatgtggtcagtagagcggtttctcttctcattgggcgtttcatcagtaacaaccaggagagcgctgaggacaagctgcaaaggatgaggcgtctggtcatcagaatccacagcgtggtagaggaagcaaaagggcggcagatctcaaaccacggcaccctccagtggctctccgatctcatcgacggcgactaccagggctgctatttgctcgactccgtcgggtgcggaggtgaagctgacagagatgacgatggtaaggcaatcccccaagtttctaccttgtccttgtttaatccagcaaaaaaa

SEQ ID NO: 4621 - DNA, 415 bp, Zea mays
  misc_feature (407)..(409): n is a, c, g, or t
tcaatccagtttctttcggaggagctggagagcatccatggcgccctccgcaaggtggctgccgtgccaccggaccagctggatgagcaggtcaagatctgggctcgccaagtcagagaggcatcgtacgacatggaggacatcctagacaccttcctcgttcgcgtagaggggcgccctgagcccagtggtgaccaaggaaggctcaaaggcgctgtgaagaggatgggcaagctgttcgtagatgccaaggctcgccgcgacatcgcaagcgccattgaggccatcaaggggcagctacagcaggtgtccgagcggcgtgataggtgcaaagtcgatgatattgtggccaagcttgccgcaagctcaacaattgatcctcgtctcgaggccatgtacagagaggnnnacacaa

SEQ ID NO: 4622 - DNA, 737 bp, Zea mays
ttgacagagaagaagccaccacctcaatattcaagagtagtaggtgtaggacttcctggggagctgtggaagatgattggtgaatgtttgcagttccgagcttcaagaagaccatccttccaggacatgctgaaaattttccttcgacaccttctggacataccacggagcccacctgctagtcctgagaagtaattccatctgattttgtattacttttacgctaaaacatgatacatggaagcttaaagctttggagaacctttacctgaaaatgtagaagtattatcgatcaaattatcttcgagctaaccattcctgaagattcctttacttggtggtgtaccagcaaatgttgaaatgtcttcgagctaaccgttcttgaaacatacttgcatattgttttccccgacttaatttttgacctagctacttgcttatgcagtgatttcgcaaatgaaaacttgcccaatggcatggaacctccaacaacctccatcctagagatggttcgttataatccaaatgccttgcatcatcttgtatgcgaaggagatgctgctggtgttaggtttatctctggcaactcttgtatagttgcatgtatatcatatactttttcacactaagccttttgcaaataccagggatctacttgcgaaggttgcatcagagagaaatggtagtttcatccgttctctcttagaagcacaaaatacagatggactcactgccct

SEQ ID NO: 4623 - DNA, 684 bp, Zea mays
  misc_feature (416)..(416): n is a, c, g, or t
  misc_feature (445)..(453): n is a, c, g, or t
  misc_feature (456)..(461): n is a, c, g, or t
  misc_feature (475)..(475): n is a, c, g, or t
  misc_feature (486)..(488): n is a, c, g, or t
  misc_feature (490)..(495): n is a, c, g, or t
  misc_feature (499)..(509): n is a, c, g, or t
  misc_feature (512)..(512): n is a, c, g, or t
  misc_feature (517)..(523): n is a, c, g, or t
  misc_feature (532)..(540): n is a, c, g, or t
  misc_feature (542)..(542): n is a, c, g, or t
  misc_feature (546)..(557): n is a, c, g, or t
  misc_feature (577)..(588): n is a, c, g, or t
  misc_feature (593)..(604): n is a, c, g, or t
  misc_feature (610)..(610): n is a, c, g, or t
  misc_feature (613)..(616): n is a, c, g, or t
  misc_feature (625)..(626): n is a, c, g, or t
  misc_feature (629)..(637): n is a, c, g, or t
  misc_feature (639)..(641): n is a, c, g, or t
  misc_feature (645)..(645): n is a, c, g, or t
  misc_feature (647)..(664): n is a, c, g, or t
  misc_feature (670)..(675): n is a, c, g, or t
  misc_feature (677)..(678): n is a, c, g, or t
cttctctcccaattctcagcgggcgatgcaggcgaagaagctgaccctgctgcagacggtggcagctgcgggagtcttctctgccgtctccttttggtaccccctcaatctcccgcccccctgaggattctcgctggttctgagcatcctagatctcccgtgccatgcctcttgtgctgcaggtatggcttcatgtttggaagggagtccgcgcggcgcgagcttggtggcatcatagacgacctccgcagcaacaagcccaccaatacccctgccggtcccgatgctcattcgaagccatagtggggtatggtattctgttgttcctcctttgccgtactaaatctaaatggtggtcaagcttgtcttgtggatcctgctaggctataaaaaaaagaaggccaagcccaacctgnccctgcgagggttcgacgtcatcgagagnnnnnnnnnaannnnnntgaccaaatgaaancccagagaccnnncnnnnnncctnnnnnnnnnnnccntggannnnnnnttctgattnnnnnnnnncnaccnnnnnnnnnnnnttgcaatagacatctcccannnnnnnnnnnnagcannnnnnnnnnnnctctgnatnnnnacctgtacnnatnnnnnnnnngnnntgantnnnnnnnnnnnnnnnnnncccacnnnnnnanngaaaaa

SEQ ID NO: 4624 - DNA, 612 bp, Zea mays
tggctgtagtacccaacccggagagactgcgcgtcggcgacacgggtgccgtgcaggagcagacctacaacgacgaggaccagcagccctcctcccttccccaccgccatatcgtgaaacttcatctccatctctcatagcctcacagtcacaagggtgaggagtggagagacgtcggtgagtttcaccatatggcggtggggaagggaggagggctgctggtcctcgtcgttgtaggtctgctcctgcacggcacccgtgtcgccgacgcgcagtctctccgggttgggtactacagccagacgtgcggcagcgccgagtccatcgtcgccgacgaggtccagaaggcgtcgtacagggataggggcgtcctggccagcctcatccggctgcacttccacgactgcttcgtcaatgtacgtaagagaccgagcaaataaattcccacgcccgccgatcgatttgctcatcaccggaacggcggcatgcacttcatttcagggctgcgacgggtcggtgctgttggaggccagtgaccggcaggcggagaagaacgccaagcccaacctgagcctgcgagggttcgacgtcatcgagaggatcaagcagagg

SEQ ID NO: 4625 - DNA, 775 bp, Zea mays
  misc_feature (771)..(771): n is a, c, g, or t
tgcaccttcatgcactgacaaattatgttcttgaaaaataagattaatggagtagaagttatatttagaagttagaaccattggttggttcgctttgggcttgtgtgttttacattctatctttgaaatcttgtagaagaggaaaaaattgtgagtgagcacccatatctactatattaaaatatgacacagccattaccattccactatattcaaatttctaagcttctatttgatcagtgagcacccatatcttctatgtcgccatgattcttcgatttaagcacatttttttaccgaaacctgacctgctcccgtttgtttcatgtagtgctctgcatacctggtgagtgtttaatcaatctcggtgctgatttgttagttttctttaagaggtatatatggttggatctatttctctgtttagttgtttgtgttttttgtgttagaatagataaaagtgctggtatatcatggccataagaacgattgttttatttagtggaattagaacaaattggttggatcttttactgcttgatcagatgcagatgaatatgtggggtttttaattaatagcaaaaactttcttactgtttgatcagatgaatatgtgggtattaccactaaaaggagaaaaagctcactcgagttgttacttggctgcctttttaaattaatgtggagaactaaacaatgatattgatgacatgttggcactgaaatcttacctatgtttatctcttctagggagttgccgagctttctcancaat

SEQ ID NO: 4626 - DNA, 601 bp, Zea mays
tcaatgcttcatgcagcttctatttgcaccaacttggtattgcaaaaccatgcaacttattagcattctcgtttatgttgctgacactagatggacttgaactaattgacattttcttctggtatcaaagaatgcattacttgatggagctgctgatccagctccagaaatatgggggaaaactacggaggaggaacaaatacatagtggtattggcagctggcctggcattaatatgcctgtaaaacctgccaactccagccttaagctgtatggtggtgcagcttttgagagagtaatgcatgaatttcgctgtgcaacgtattcattggaatgcccacaagtgtcaagggagaaggtactctttagcctgcaacgatgtacacacacaatttattgggagaattgcttatatacttatgtcgctaggttgcgaacatactacttgctcatgctggaagacgcggaagcagtaggttgactgaggcagcagttgcgatagctcgtgcagccgcacgatcatggcttgctcctcttattgataccgcatgtgaccggcttgcatttgtcctacaaaatctggtttgatcttgctatggag

SEQ ID NO: 4627 - DNA, 383 bp, Zea mays
acgttctgcaacggcgcggtgtgaacgtgccgacaatcctcatcgcgagttgaggtggagcagggcgaggtcagcgaggaggtcgagcctagggcaaggagaccgcatcgtcgtcgtggttgaggtcgaccccggctacaacgagcacacggcggtcggggccggaggggagcggtgcggagtacacgcccgtgtagatgcagacccccgatgtggattcatggggttattgctctagaacctgcttgcatatgttccacctggtcttctcgtgcgcgttcgggagagaggtcgtggctgcagcggaactctgatcgagcgcatggccggctccagctccaaaacggtgaataattttcgtaaatgggagaacgaagtgcgta

SEQ ID NO: 4628 - DNA, 537 bp, Zea mays
  misc_feature (184)..(184): n is a, c, g, or t
gtcgtgatgtggaaggaaatgagttgcctcgcctcgtttatgtctcgagagaaaagaggccaggttataaccatcacaagaaggctggtgccatgaatgcactggtaaaatctgtgcactttatgtctttaacaattcttcttgtaacctaatagcagtgcatgattgatgctttgttgttttntgttcataattgataggtccgtgtctctgctgtcttatcaaatgctgcatacctattgaacttggactgtgatcactacatcaacaatagcaaggccataaaagaggctatgtgtttcatgatggatcctttggtggggaagaaagtgtgctatgtacagttccctcagaggtttgatggtattgacaaaaatgatcgatacgctaacaggaacgttgtcttttttgatgtaagattcaacttccctgttcgaacacacaccttaagctcttcattttattgtcgttgtctcatagtttttgtaacacttgcagatcaacatgaaaggtttggacggtattcaaggacccatt

SEQ ID NO: 4629 - DNA, 452 bp, Zea mays
gagctgttgctgagcaacaaaggatgtttgctgaggctcgagcaaggatgaataacggagcccccaagccaaaggagccagaacaagaaccgccacagctaccacaagcacaaccccaacttcagctgcatactgaaccacagcaacccatgcaatctcaagttcagttgcattcgcaaacacaacactacctccaacctcaactgcagctccaccatcagccacaacagctcccacaagtgcagctgcactctcagccgcagctgcaaccccaagtgcatctgcaccctcagccgcagttgcccccacaattgcaggtccatcagcagctgcagcaacccccacaagtgcaggtccaccagcagcccgaagtgcagccccaagaagcgcagttgcaatcatcagcccagcaaacctcccaaccgcaacctcaggcacaactacaatcacaa

SEQ ID NO: 4630 - DNA, 386 bp, Zea mays
atctcccttgactacgccctggggactccaaccctggcgtctccgacgacaaagccaacctcaggtacgacaacctcctggacgcccaggtcgacgccacgcactacgcgatggaggctctgggggttagcactgtggacgcgtatgttggggagagcgggtggccgaccaaaggagttgttgcagggaagataccgccggccgcaaggcgtttgttgggcgccgccgaaggctcggcgaggcggcttctggacacgggtgacgccggctcctcgccggcctccattcccaacgcccgagcttacaacaacaacctcatcaaccgcatgctgtccggccggacgggcaccccgcaccgccctaatgccaacatggacgtgtacata

SEQ ID NO: 4631 - DNA, 621 bp, Zea mays
  misc_feature (615)..(616): n is a, c, g, or t
gggggaacgcttttcaggtccgcattctgatcatatgcctgttctgttgcaactggttctccccatagcatgcatttcaggattagccatagtcgctaacaaaatgaaattttgattgttgtggcattcacaacttgtgagggcctcacaattatgttgctagctgtagtagttcagactgaaacagaatctgacaggtgtaataggattctttgtgccaaaccactgttatgtggcaggtgttaccctgagccttggaaggtcctgaggaaggcgtcgtctgggaactacgtctgcctgcatcaacaagaggagatgccttcgttgaaggaagtggccctcgacatccttccttctgtatagctaggatcttcacttctttggttcatagctgtgctgactggtgctaagttccattacaaggcaatctatcatttcgttgcaatttctcgccctgaaatattcttttgggtagactagaccgtctgagtctcagaagtcagaccaccccgtggggaaagcctcggcaaagtctgacacgtgctcatgctccggctgtccctgccacaaaggcgttcttgtaccagtggaagaccttgtctgaatgtgcaaggnnataaa

SEQ ID NO: 4632 - DNA, 682 bp, Zea mays
ctatggaagctcccagtacggtccaccactctgtcaggtgagaagaagcttaattatattgattaaatataacaactaactggagcaagactaaaggaaataaaacatgttttttttgtgggaaatcccctacattttctaatttctactcatgtaaaactagctactgcaggttgttgtcaatgccatcacttgaatttagctagagagatttatttatttatttatttcttaccagcactgtcgaacctctggctgccagggcgacagtgtcagcacaggacaccgtctgcggacatgcttcctcgagtgcagctttgatctcgtctatgacctcaaaccccctaatggaatccttgttggggatagcgtttttctcgctcacgacttcctcagcgtcatccaaaagaaccgacgcatcgcagccctgcgatagtgcgattagtttcatcgcatgaaccacggccgggacaaaagagacgattgaccaaatagagaacatgagaccgtagtgctgctaacctggacaaagcagtcatggaacaggagcctgagaagggaggcagctacccgtggttccttcgcgatagccttcttcagtatgggcgccaccgtctcgtcagcttgcgggcatgtcaacctgtagtagtctgtagaaagacctgggattggagtacttcca

SEQ ID NO: 4633 - DNA, 477 bp, Zea mays
aagaagcagtacgtgcagtgggcaagaacccaggggcacagcctgaattctgatgacgacttcttcaccgacagcgtgaccaaagggttctacaagaaccatgtcaaggcccgtcgaccacgcactccatagacgcttgatataataaccatctcaagacgcttgatatgatgcaccattctcacaggcagtcctcacgagagtgaacaagatgacgggagtggcgtacaaggacgagcctgccatcttcgcgtgggagctcatgaacgagcctcgctgccagagcgacctctccgggaagacgctgcaggcctggatcacggagatggccagctacgtcaagtccgtggatcccaaccacatggtagagatcgggctcgagggcttctacggcgatcgagtccacgcccgaccgcaagcgccagttcaacccgggagggtacaccgtcggcaccgacttcatctccaacaacctga

SEQ ID NO: 4634 - DNA, 373 bp, Zea mays
atcgccgacgccgtgaaggcggcgcccgagtgcagcgagcaccggacggtgatacacgtcaaggagggacggtatgacgagaacgtcaaggtggggatgaagaagaccaacctgctgttcgtcggggacggcaagggcgtcacagtggtcgccggcaaccgcagcgttgctgacaactataccaccttccggaccgccacctttggtacgtgacgcacgcaaccattcttctccacggagcactagtgattccaagatcgagcttttacaatcatttgcactgatttttttccccaacggaatcgaaaagcttagagcatccttcaaaccagaataatttgtagccaagtaggtttcgtgaagttcgtaaccg

SEQ ID NO: 4635 - DNA, 879 bp, Zea mays
tcctcagctcttcgactaagagcacacatcagtaggcggtgaataatatacctgcaaaacaaatgaacctcactactttcaacagaaacttaatatttgaagatgccagccacaagtccacgaggcttgacaaggagcacatacccaaaatagtatgccttcttagtttcacataattccccaacacgtaacatttccttttgaagtatttcttttgcatatctgaaatagaaaaaatgtaagcatgagtgaaacaacacaaacatagtgatgttatgtcaactctttgcttgacatacttaattctcttttctcgagtgacaccaactgttgcgccatgttttccaatgtagtctagagcaacctatgagcattcaaactaaagcttttaaaagaagaaacataagcctgagctcagctcaaaatgtgccacaacaactgaataaaacagcatgctcaaagcaaacattggttgaagtaaaaaaatgtgttcctccagtcgagcagctgaataagtacctgttgattttgaatgacaaaagcttcctccagggatgggcgtagcaattccatcatttgtgtatcagaaaagtcataacatatatgctccagtatatccttgtcagcaacaaatcctaatgctcgaaatacaatgataatgggaatgtccgcacgaatataaggtagagtagcacagacatattgaccagatgatccctgcagtataaggaacatatcacagatttaacattttataaagtcagtttgcctcactgtggtactacaccccctgacttgtacaagtaagaagcacgcatatgcattgaaaactatttttgaaaacttataagtcactaaccccagagccgcagagccgca

SEQ ID NO: 4636 - DNA, 491 bp, Zea mays
  misc_feature (479)..(481): n is a, c, g, or t
cagcgggagacctgcgaattatcaaccctgattccatggagagatttaattgcatcaagctgcaccagcatcctaacacaaaggtcagttagttattctgccgccatgaagctttactttgttttttttttctgcacatgttgcctttagtcagtactcagtactgatcgatgggtttggtacctgcaggagggcttactctgtggccgcggccatggcgaaggaagccgcacggagggccgacgggaacaaggctgcggctgcggtgaccatgaccaagcgcgtgatgggcaacaaggaagtcaacaccgctgccgctgcggcagagcagaagaaggcatggctgccggaccctgtgaccggctactatcgcccagcgggtagccccagggaggtggacgcggcggagctgcgcgccaagctgctgactgattaatcaaacagttgttttgtcaagctcgagcatgggtcgttgtctnnnctaactaaaa

SEQ ID NO: 4637 - DNA, 361 bp, Zea mays
gcgcagacaccgcggatggcgaggtgccggaggaggcgtcaaggagagatgtattgtccgccgctggtgagcgtggggttagttactacgaccccaagcccggggacttcgtcgccggcgtcgtggtccggagtgacgggaggacgctcgacgtcgacatcggttccagcggcgaaccagcgctgatgctggccaaggagtcggcgccggtgcccgcggaggagttcgggtacctagcgtgcgacgtcgcgtccaagtgtgcggcggagtttgcagcggaagggcgggtcggcgtcgtggtcaggcaattcaggggaggaggagagggggacggggaggcgatcatcgggaggaatgggaa

SEQ ID NO: 4638 - DNA, 1083 bp, Zea mays
  misc_feature (1019)..(1025): n is a, c, g, or t
  misc_feature (1070)..(1071): n is a, c, g, or t
  misc_feature (1073)..(1073): n is a, c, g, or t
  misc_feature (1076)..(1077): n is a, c, g, or t
  misc_feature (1079)..(1079): n is a, c, g, or t
cagtgattcaatgatagacatgatgattgggctttcgaggaggtacttgtggaactggcatggttccataattctatactcatcttcctatgtctaggagagcatgccatctgccttttatttattaatttggcacagtcattggatttcattctgaaagtgtcacaggattatcattaataaggtttctttcttctcatttattttttcgctaaaatcattcaatgcagaaacttgtaacagtagacttatggttcttgagtacacgtgcaagtgcaactctgatgttttaaaacctaaaagggtatgcctacaaaggaaatttgttcttttaacatttaaaattgatacctatgttgcctagggatgctacctcttgaaaaggatatctatgcataagaaggaagtttattcttgtaacacctaaaattgatggatgtgttgcctaacaatgctaactcttgaagaatgacctccaatttcctgaactggagcctcttcttgttatgctggaaggcaaatcttggcatttctctttgttgccagttcttttgttggaaatgaacattccatccacctaggtagtcttatagaaatttcttttatcagggaccacactctgactttactgggccaaattgtgggagtacagcatgtgtagcattagtgagaaataggcaactcgttgtggcaaatgctggtgactcccgctgcgtcatctcaaggaatggccaggtcagttgttactcctaaaagaaaacaggagggattaccctctagtggcatataaagtttgtgggattgtctcattttgtacttcttccacataaaacaggcatacaatttgtcaagagaccataaaccagagcttgaggcagagagagaaaggatacaaagtgctgggggttacattaaaatggggcatgtaaatggaagtttaaacttgtcaagagctattggtatcatttttttacttgcttctttttgttcatacctctcaccttaactgatgtcttgcnnnnnnnaaatacctttctaggagacatggagcttaaacaaaacaagttctnncnccnntnagca

SEQ ID NO: 4639 - DNA, 393 bp, Zea mays
cagcaagtgtctggtggtgcgcgggtgggcgccccaggtggccatcctggcccatccggccattggcggcttcgtgacgcactgtggatggggctccatcatggaggctgttgcagccggtgtgcccatggcaacctggccctttttcgcagagcaatttatcaacgagcagctcatcgtgcacgtgcttggcgttggggtgtccgtcggtgtgacgaagccaacagaaaatgttttgaatgctactactgacgccgccggtggcagccaaggggaggctgatgccgaggtggggatggaacaggtgaaaaaagccatggatacgctgatggatcaagggcctaaaggggaggagaggaggaggaaggcccatgagctgaaactgaaggcgag

SEQ ID NO: 4640 - DNA, 687 bp, Zea mays
  misc_feature (440)..(445): n is a, c, g, or t
  misc_feature (447)..(447): n is a, c, g, or t
  misc_feature (469)..(472): n is a, c, g, or t
  misc_feature (476)..(478): n is a, c, g, or t
  misc_feature (481)..(487): n is a, c, g, or t
  misc_feature (490)..(494): n is a, c, g, or t
  misc_feature (496)..(496): n is a, c, g, or t
  misc_feature (498)..(498): n is a, c, g, or t
  misc_feature (502)..(504): n is a, c, g, or t
aagtaccaccaccagctttccgtagctcaaacgacgcaggccagccggccgctgccgagcaggctccatgctctggggtctgggaagcacgcacctcggcgtgcatccgaggatggatgtggataggaggagggtctgcactcactgccctcccaccgcccggtggcaactgtcagctgaccaactgtcgtgcttacgtgcgtgatttccgtgggggccttttcgcgaggcccgggcgctcggtgcatgagcatcggcacatgccggcagtaatgcgcatatggtccggagcagcagggacgacagcgaggcggctttcagtggcctgcgtctgcgtgtgcgtgtgcccccacgcctctgcactgctgcttctcatagcagtgtcgggagactacagtgaccttgctgccgtttcttaggtcgtgtactctcccatccannnnnnanagacttcgatcatccattgacnnnntaannnggnnnnnnnctnnnnnanangaannnaacacattttctactgaaagcctgaatgtgcaagttcaaatcttcatagttccaagatagacatacgacaaaaaataataaaatatctccaaaaaaacataacaggacttagtaagactgtacttcctctcgaacggggccaaactaggatattccaacatcttcaggagccacaggggatcc

SEQ ID NO: 4641 - DNA, 425 bp, Zea mays
  misc_feature (418)..(418): n is a, c, g, or t
tgatcgaagtgctctgatttcacaaaacaatcgacttcacatgttagattatttgatctgtgctttgccgatactagcgaaccaggtctgagcaacaagcagatcggagcactcagatttgagattaccactcagccctaaccaataaatcatcactaacaaacttgaacattttccagggcagcggacaccagtttcacctagcggtggtggctggaggggagtggtggagaagaccagatctaggacgcggtggcggacgcttgccttatcctaactccgatgacgctgatgctccggctgaggttcctcgacggcgacgatggtgcttgaggtggcggtggtccagacatcgtcgatgacggcagtagatctaggacgacgcccgtcaacgaggaccatgactcggctgtccaangagagta

SEQ ID NO: 4642 - DNA, 542 bp, Zea mays
  misc_feature (409)..(410): n is a, c, g, or t
  misc_feature (414)..(415): n is a, c, g, or t
  misc_feature (419)..(419): n is a, c, g, or t
  misc_feature (421)..(421): n is a, c, g, or t
  misc_feature (430)..(430): n is a, c, g, or t
  misc_feature (432)..(433): n is a, c, g, or t
  misc_feature (437)..(438): n is a, c, g, or t
  misc_feature (455)..(455): n is a, c, g, or t
  misc_feature (469)..(469): n is a, c, g, or t
  misc_feature (497)..(497): n is a, c, g, or t
  misc_feature (515)..(515): n is a, c, g, or t
  misc_feature (517)..(517): n is a, c, g, or t
gctatattttctgctggcagcgccttacgtagacgccccgacacgatcgtttctttgcttttgagacgattcgtttggctggaactggaagggcctcaaggttctacgtacttccatcccaatcctactgctgatacatatggccaatctcttggttttttttcttcttctcaacagcagctacggcagctccagccatggcgccgcataaatccgagggttcgatgagctcagggtcagggccctccagcagcagcacgtccgctggctcgtccatgagcagcatcgccacgacgaccggtcgaagcggcggcagcagcagcaccagcaccagcagcggatcgaggcccctccgcgccgccgcagcctcgtaccgggaggaagaagaagaggaggaggaggagaaacnnttgnnactncnaactctacntnntgtnngaactactgacttatanacacatgaattccnatcaacattttctggctgacatgacaanagcattcatcatcctcgntntgtaaagctgaatctatggatctga

SEQ ID NO: 4643 - DNA, 526 bp, Zea mays
tcgccgctgcgtggccggcttgtcggtcatcgagcgcgtcatccactcccaggccttcaagaacttcacgtaccccgacttctccatggagacgctgctcaacatgtcgacggggttccccgtcaacctgctgccccggcacgacaacgactccacgtcgcttgagatgttctgcaaggacaccgtcatgaccatctggcactaccacggtggctgccaggtcggcagggtcgtcgacgctgaataccgagtgctcggcatcgacgcgctgcgcgtcattgacggctccactttcaacgcctcgccaggaaccaacccgcaggcaaccgtcatgatgctcggcaggtaatccctccctgcttacacctgtgatgttttatcagcgcactttgagcacttctccaggacaggccctagtggtactgattcctgtctccaaagttgcccttttaggtcgaatcctaccaatcttccaatggatgattgtgtctctaacttggcaggtatatgggagtcagaatcacaa

SEQ ID NO: 4644 - DNA, 459 bp, Zea mays
tcaccgccgccattgcaggagaggacaatccacaggacgacgccgccgccgaggagcaggaggagagcgacgaggaggtggaggaggaagcgaaggtcggagcgcagccagcggcggaagagctcctgcccaacatcgacgagcaaggagaagacgaggagccggcggcatccctcgacgacgtcttgccgtatcttctgtaccactacttcggctaccgcggcgcgtacggccccgctacacgatctgggtacggctactgctactacgagtacggccccgctacacgatctgggtacggctactgctactacgaattcatcgcattttgagcatttctcctggtcatgtcctagtggtactgattcctgtctccaaagttgcccttttaggtcgaatcctaccaatcttccaatggatgattgtgtctctaacttggcaggtatatgggagtcagaa

SEQ ID NO: 4645 - DNA, 995 bp, Zea mays
  misc_feature (393)..(399): n is a, c, g, or t
  misc_feature (407)..(407): n is a, c, g, or t
  misc_feature (410)..(410): n is a, c, g, or t
  misc_feature (430)..(437): n is a, c, g, or t
  misc_feature (440)..(442): n is a, c, g, or t
  misc_feature (448)..(451): n is a, c, g, or t
  misc_feature (476)..(478): n is a, c, g, or t
  misc_feature (490)..(494): n is a, c, g, or t
  misc_feature (518)..(532): n is a, c, g, or t
  misc_feature (536)..(536): n is a, c, g, or t
  misc_feature (549)..(554): n is a, c, g, or t
  misc_feature (589)..(594): n is a, c, g, or t
  misc_feature (642)..(647): n is a, c, g, or t
  misc_feature (649)..(651): n is a, c, g, or t
  misc_feature (658)..(666): n is a, c, g, or t
  misc_feature (671)..(672): n is a, c, g, or t
  misc_feature (676)..(677): n is a, c, g, or t
  misc_feature (680)..(690): n is a, c, g, or t
  misc_feature (697)..(709): n is a, c, g, or t
  misc_feature (712)..(720): n is a, c, g, or t
  misc_feature (734)..(734): n is a, c, g, or t
  misc_feature (751)..(755): n is a, c, g, or t
  misc_feature (758)..(770): n is a, c, g, or t
  misc_feature (778)..(784): n is a, c, g, or t
  misc_feature (786)..(786): n is a, c, g, or t
  misc_feature (790)..(803): n is a, c, g, or t
  misc_feature (808)..(810): n is a, c, g, or t
  misc_feature (812)..(814): n is a, c, g, or t
  misc_feature (816)..(819): n is a, c, g, or t
  misc_feature (821)..(823): n is a, c, g, or t
  misc_feature (826)..(828): n is a, c, g, or t
  misc_feature (838)..(842): n is a, c, g, or t
  misc_feature (844)..(850): n is a, c, g, or t
  misc_feature (853)..(856): n is a, c, g, or t
  misc_feature (860)..(905): n is a, c, g, or t
  misc_feature (907)..(907): n is a, c, g, or t
  misc_feature (910)..(912): n is a, c, g, or t
  misc_feature (920)..(922): n is a, c, g, or t
  misc_feature (924)..(947): n is a, c, g, or t
  misc_feature (949)..(949): n is a, c, g, or t
  misc_feature (951)..(956): n is a, c, g, or t
  misc_feature (965)..(986): n is a, c, g, or t
  misc_feature (988)..(990): n is a, c, g, or t
tctgctttggcagaaggctgcggctcagggtgccgccgccaaccacgccgggtccgatgctctgacggcaaccctgagccccggcaggaagggcagcggtggattcaaggctactgatccgagccatggcaggaaaggcggcggcggctggaaggctggactgaacaagttcctcctcagcttcagcatcaaggtgtgatctatgcgtggacgagagaaggggggcgtttcttggtgtcgaggcaccgcacaacaataaaaatgcattgcattggtttgtctgttttttcaattaattggtattgtttgttgccgccagtgagatggcgaagtgtaattcgtcatgcgaatccgagtcgagtcgaggcaatgtgtgattcatcgtatgtttgnnnnnnngtcgtatncanctgattaattgaaaaaaccnnnnnnnncannncagtgnnnntttattgttgtgcggtgtctcgacnnnaaaaaaaccccnnnnncggcacgcatagatcaaagccttnnnnnnnnnnnnnnngaangaacttgttcagnnnnnntcggcgcgccgcctttcctgccatggctcggatcnnnnnnctttgaatccccgctgcccttcctgcccggggctcagggttgccgtcnnnnnnannnaaccccnnnnnnnnnggcgnncgcnnccnnnnnnnnnnncctttcnnnnnnnnnnnnnaannnnnnnnncccctttgaaactngatcctctccctcttcnnnnnaannnnnnnnnnnnncgctgccnnnnnnncnccannnnnnnnnnnnnnctacnnncnnncnnnncnnnccnnnaaaactcctnnnnnannnnnnntcnnnncaannnnnnnnnnnnnnnnnnnnnnnnnnnnnnnnnnnnnnnnnnnnnnanacnnncttccggnnnannnnnnnnnnnnnnnnnnnnnnnncncnnnnnncttctacgnnnnnnnnnnnnnnnnnnnnnncnnncttct

SEQ ID NO: 4646 - DNA, 416 bp, Zea mays
  misc_feature (406)..(408): n is a, c, g, or t
acttcccgcatggtgcagcaccccttcggcgacatcccaagccagactcccaagcaattcctatactctggtagcccacagcgcctctgccatccataccagtcagcttcggacgcccacgtcgcgccgcagcgtcactacaccgtgaggtctcagtttcagtctcactcaccggatgctgggtctgaagaccgtgagacgcacagcaggcagtacacgctggactcctcttcggcttccggttgctcagggcacggttctccctcctgtcagagtgtccatgccgggagtggcagccctgtgtctcactctcatgacgacagccactccggctccaccaatggcaacggatcgcctgcgagcgcgtcgtgtgtcaccgaggatcctactgacctcaagcagaaannnaaggatca

SEQ ID NO: 4647 - DNA, 513 bp, Zea mays
ggtttctgctggagtgcttgcgttccttttgcttcaacaaataataatggggtgggccagtgcaggaaatggggagagtgttgtttaaatttaatcaaggtgtaacatggggcccgcctattgttattccaggaaattttggaggtggagatcgaggacgagaaacaattggatgatagtcccgctgctttctgacttctgaggtaccgcacgatcaccaatttagttcaatgctgtgtgtgattcatcagtatgtgccaattgtgaggttcaggagaagggacacgttttcagttttcagaattattagtactggttcagggagaattcttatcggaggctacctttcgtacacagttaagtatggtactccttaccctgctaatgtcaaaactacagacttatgaacacatgaattctgctttagttcaattaacattttctggctgacatgacaagagcattcatcatcctcgatgtgtaaagctgaatctatggatctgagtctgaagg

SEQ ID NO: 4648 - DNA, 917 bp, Zea mays
gtcctcatcatgacatgggtctatggttcacagctcccacttggtttccagtgctatttgatcaaaggtccttggtgaggtcctcgatctcaactaaggcccagttaaattcattgaactctggtgagttaaatggttggaaggcatcgtgcatgacatctacaatgtcggcacaacgctacagctctcaccaaattagccagggcttttcgaagcatttcgttctccgaatccatggtctacatgaaacagattttgaagtaagtgatcaagtcctaataagttcaatcatcaacatcgcacagggtttgaactagctacaaaattgttgtcaactaaatttaagtcagccattaaacacatccagtacgtcaacaacaaagtgaactttgtaaaatgttagaggtgaacatttaaataactcaaagtatatgaagtgtatgaggacagcagccacaaaacaaattcaagaactccaattaccaggtctgaatttctgcttgcatcctcggtaaactgaattttgtggactgtttacactaatgtgagattgaacacactaatttcatctcatcattgcaagagatcatagaaacacacactaatttcatctcaccactgcaacacatgaagcatgacaaatgattttcataggctaaataacataacagttcgttcttgtctgctttccaatctttgtattcatttcaaaggttagaactaaagtaatcagtagatccaaaaaatgaatcaacaaacaaagagtcgatctggggcaagcgcaaaatattgtgtgcagatcaaccctaaactttggatccacatacaaatacgaagtattttaccttgctcgggtcggatctagagcggacgaccgaatcaacgacgatgaagatacgtgcgacggttgcgcttcc

SEQ ID NO: 4649 - DNA, 385 bp, Zea mays
tagtagtagtcgaccatgagatgccgaaccagggatcccagcaaaggaggatagtcagcttcattggtggcattgacctttgtgatggaagatatgatacccagtaccactccttgttcaggacgcttgacactgtccatcacgatgacttccaccagccgaactttgagggtggatcaatcaagaaaggtggcccaagggagccatggcatgatatccactcacggttggaagggccaatcgcttgggatgttctttacaactttgagcagagatggagaaagcagggtggtaaggacctccttgtgcgtctcagggatcttcctgacattatcatccccccttctcctgtgatgttcccggaggacagagagacatggaatgt

SEQ ID NO: 4650 - DNA, 386 bp, Zea mays
  misc_feature (377)..(377): n is a, c, g, or t
ggtctacccttaccatagttgtccataacctgaaatcacatgaaaataataaaacacccggtgatggaattctcacaattaccatgcatgataatagttccttctatggccgtagttagctacttagttctactaactttaagttcgagtacatagcctatgtaacaaaggtgatatgataaacaaccaacttctgcaaagatcaagaaagcatagatgtaatgctccaagatggatcaccttttttcaaagaccgaaaaaggaaaaaaaacaaagtatattggtgcaaagaacataataaaggtgcgctaagatacgcataatcgcacagtatgttctaggatcaatgcacttcaatagtcatgttaacgcatcanatgcactaa

SEQ ID NO: 4651 - DNA, 476 bp, Zea mays
  misc_feature (466)..(469): n is a, c, g, or t
caggagatgactcccaagatttcagactttggcatggcaagaatatttggcaacgaagagacggaaattaacaccttaaaagtggttggcacatagtaagttgtgatagattaagggatgcagcgctcatcgtacacatacattttgcggtactaatcaaatccatgtgcctcttttacatacgacagtggttacatgtctccggagtacgcaatggatgggatcttctctgtcaagtcggacgtgttcagctatggagtactattgctggagatcgttagtggcaggaggaacaggggagtgtattccagttcaaacaaccaaagccttctaggccatgtaagcgaaatcttgcatcatgtagtgaatagaataccagctgtatctctcattaaaaacttctgaaacctggcaaccatttttttccccctgcactgcaggcatggagcttgtggaacgaggagannnncatagag

SEQ ID NO: 4652 - DNA, 387 bp, Zea mays
ggccctatgctccaagaaatgcaaccgcgttgatctcctccgcagaacgtttctgtagccaagggtagctctgcaaacgcgtccgcttgggttttctgcgtcgtaggctcgtagccctaatcatgctgtccgctgtgcaagtgtacatgtatgttcgcagctgggtcttctcggctgcggacaggcggtgcgtagtagattggctttgttgtaggcttaacgccatttttgtgtgtgtggctgtgtgcacatggcaaaaacaaacaaacaaaaatgtttatgcaccggagcagattctatttctactccactctcgtaaaatagttgactttataggattcaaattttgttctaaattaatggttattctcacctctcaatgcaaaa

SEQ ID NO: 4653 - DNA, 805 bp, Zea mays
  misc_feature (14)..(15): n is a, c, g, or t
  misc_feature (497)..(572): n is a, c, g, or t
  misc_feature (575)..(595): n is a, c, g, or t
  misc_feature (597)..(600): n is a, c, g, or t
  misc_feature (603)..(617): n is a, c, g, or t
  misc_feature (619)..(636): n is a, c, g, or t
  misc_feature (638)..(638): n is a, c, g, or t
  misc_feature (642)..(689): n is a, c, g, or t
  misc_feature (691)..(697): n is a, c, g, or t
  misc_feature (699)..(725): n is a, c, g, or t
  misc_feature (727)..(728): n is a, c, g, or t
  misc_feature (730)..(743): n is a, c, g, or t
  misc_feature (746)..(757): n is a, c, g, or t
  misc_feature (759)..(768): n is a, c, g, or t
  misc_feature (771)..(775): n is a, c, g, or t
  misc_feature (782)..(792): n is a, c, g, or t
  misc_feature (798)..(802): n is a, c, g, or t
cgcgattgctccannggctcggcggcaatggaggcaccacctgacccggtcgtcccatcctgctcgacgagatcgtcggcgacatccacggtgtggttccagattttcctttgctggctgccagggctatcaatgcagctcagcgagctagccccactgccagcttagttgtcgtgacagccattggggctgcacgccgtcagtggggtgaaggcgacagctgacgagatgttggccgaagcggagaaggcaaatgtcctagctgcaaaaaaaattgatcgcctgcttcgtcgttgacctcccatgatgtaaggttgaatcagttagtgttcatgtctaaaatttgatttttgtttccaattgttttgctgtgatgaattaaattgtacttgtttcatgtataagtataactaattgtagaaacctgcaacatatgttaacaggttggtttatgctatgactttctgaaggagaagatgaagaacatgtcgacgaannnnnnnnnnnnnnnnnnnnnnnnnnnnnnnnnnnnnnnnnnnnnnnnnnnnnnnnnnnnnnnnnnnnnnnnnnnnggnnnnnnnnnnnnnnnnnnnnngnnnnggnnnnnnnnnnnnnnngnnnnnnnnnnnnnnnnnngngggnnnnnnnnnnnnnnnnnnnnnnnnnnnnnnnnnnnnnnnnnnnnnnnngnnnnnnngnnnnnnnnnnnnnnnnnnnnnnnnnnngnngnnnnnnnnnnnnnnggnnnnnnnnnnnncnnnnnnnnnncgnnnnncccccgnnnnnnnnnnncgggcnnnnncgg

SEQ ID NO: 4654 - DNA, 520 bp, Zea mays
atggtcgaagcccctgccgccgcgctgccacgacatcgcacaccgggtgacgccgttcctgcaccggcttgtcctggagcacgggaagacgagcatgtcctggttcggctccacccccagggtgaccatcgtcgaccctgcgctgggcgctggccaaggacgtgctgtccagcaagttcgggcacttggagaagctcaacttcccggcgctggccaaggtgatgggcgacggcctggcgagccacgagggtgcgagatgggccaagcacaggaggatcctcggccctgcgttccagcttgagaagctcaaggtacacacagaatataatgattgttgtacttatacattattgcgtagagttgatcgtttggatggacctaattggcgcgagatgtgcagcgcatgctgccagcgttctctgcgtgctgccaagagctggtgagtaggtgggcggagtgcctcggcccggacggttcctgcgagctggatgtctggcccgagctgcagaacctcactgga

SEQ ID NO: 4655 - DNA, 404 bp, Zea mays
  misc_feature (396)..(397): n is a, c, g, or t
aaagattaggcagtatttttcagaaccaatcaatttcagatgggcagacactagtgtccatgagtagaattttcgtgctcggtttctttagccctggagcttcgagcaagcgatatgttggtatatggcacaacgatgtttcagaaagaagagctgttgtatgggttgccaacaggaacgatccattacaagatacttctggcatacttaagtttgataacagtagcaatctgatcattttagatgggaggggcaactcattcacagtggcttatggacggggagtgcaagatgtggaggctgcgatgctggagaacggcaattttgtcttaaggagcatcacgaaccaagctaagatcatatggcagagctttgactctcctactgatacatggnnccctgga

SEQ ID NO: 4656 - DNA, 375 bp, Zea mays
ctcccacgacgcgagggcggtccgggtggatcccggctgacctcaacgaggggcacctcgacaagttctacttcctgctcgccgtgctggccgtcgcggacttcgcggtgtacctcgtatgcgcgagccgctacgggagcggcaaagtggacgggaggagcagcgacgacgaggaggagggagcggccggtcaggtgacatccccggcttacgcatgaccatcaccggccgcccggccggcgggcatcgtacgtatgttgttcttgtcttcttgaggtggaggctggcaggctgcaaatctcgagggccattggttatttggttgacggagttcttccattgacgacgatagcacaagcatggggcgagcatgga

SEQ ID NO: 4657 - DNA, 494 bp, Zea mays
gcctaaattacacatgtgggaaacaggaataatgcgtattaccagacatccacaggtgattagtctataaaatatgtagaatgtgttctctatgattgcattgcagtttcatatgaccacttacacacttctgatccacaattatcatgtagatggttggtcaggtaatttggtgccttgctcatacactatggattggcaactcagttgccgtagcggcctctgtcggacttatcagccaccatctctttggtgcttggaatggtgacaggaggctgttgtcacgctatggtgaagccttcgaagtactgaagaagagaacaagtgttatgcccttcgctgcgatcatcgatggacggcagaaactgcccaaagattatcacaaggagttctttcggttaccatatgtagcaatcacaatgttaaccttgggtgcatactttgctcatccattgatgcaagcatccagctaccaacttccctgggtagtgcta

SEQ ID NO: 4658 - DNA, 471 bp, Zea mays
  misc_feature (388)..(389): n is a, c, g, or t
  misc_feature (393)..(398): n is a, c, g, or t
gagtgcagttggtggcgagttgagtgatgaggaggaggttgaggtctctccctctcctctgggcgaggaggtggcagaggtggcagaaccacaggataaggtagcccacgtttctgaagctaatggtgaattgggtgatgggaaagaagcgagtgatgatgtggttgctctgggaggtggagaagccactaacaaggatgctgttggtgatgatgtggtggctctgggaggtgaagaaaccttagaagaatcgacaaacaaggatgctgatggtgatgattctctgggaggtggagaagcttcagaagaatcggctaacaaggatgctgatggtgatgatgtggtggctcagggaggtgaagaagccctagaagaatcgaccagaaanngatnnnnnnggtgatgattctctgggaggtggataagcttcagaagaatcggctaacaaggatgctgatggtgatgatgtgg

SEQ ID NO: 4659 - DNA, 1504 bp, Zea mays
  misc_feature (394)..(394): n is a, c, g, or t
  misc_feature (401)..(401): n is a, c, g, or t
  misc_feature (413)..(413): n is a, c, g, or t
  misc_feature (415)..(420): n is a, c, g, or t
  misc_feature (441)..(444): n is a, c, g, or t
  misc_feature (467)..(473): n is a, c, g, or t
  misc_feature (477)..(480): n is a, c, g, or t
  misc_feature (484)..(484): n is a, c, g, or t
  misc_feature (488)..(489): n is a, c, g, or t
  misc_feature (493)..(527): n is a, c, g, or t
  misc_feature (533)..(535): n is a, c, g, or t
  misc_feature (538)..(541): n is a, c, g, or t
  misc_feature (551)..(555): n is a, c, g, or t
  misc_feature (562)..(573): n is a, c, g, or t
  misc_feature (576)..(583): n is a, c, g, or t
  misc_feature (586)..(589): n is a, c, g, or t
  misc_feature (591)..(621): n is a, c, g, or t
  misc_feature (623)..(630): n is a, c, g, or t
  misc_feature (633)..(634): n is a, c, g, or t
  misc_feature (645)..(646): n is a, c, g, or t
  misc_feature (650)..(660): n is a, c, g, or t
  misc_feature (662)..(673): n is a, c, g, or t
  misc_feature (681)..(687): n is a, c, g, or t
  misc_feature (694)..(698): n is a, c, g, or t
  misc_feature (702)..(723): n is a, c, g, or t
  misc_feature (727)..(733): n is a, c, g, or t
  misc_feature (735)..(741): n is a, c, g, or t
  misc_feature (745)..(747): n is a, c, g, or t
  misc_feature (750)..(755): n is a, c, g, or t
  misc_feature (760)..(765): n is a, c, g, or t
  misc_feature (767)..(773): n is a, c, g, or t
  misc_feature (775)..(779): n is a, c, g, or t
  misc_feature (785)..(787): n is a, c, g, or t
  misc_feature (789)..(789): n is a, c, g, or t
  misc_feature (797)..(800): n is a, c, g, or t
  misc_feature (802)..(815): n is a, c, g, or t
  misc_feature (818)..(820): n is a, c, g, or t
  misc_feature (822)..(828): n is a, c, g, or t
  misc_feature (832)..(833): n is a, c, g, or t
  misc_feature (835)..(836): n is a, c, g, or t
  misc_feature (838)..(847): n is a, c, g, or t
  misc_feature (849)..(849): n is a, c, g, or t
  misc_feature (854)..(871): n is a, c, g, or t
  misc_feature (874)..(878): n is a, c, g, or t
  misc_feature (882)..(886): n is a, c, g, or t
  misc_feature (888)..(900): n is a, c, g, or t
  misc_feature (904)..(904): n is a, c, g, or t
  misc_feature (906)..(908): n is a, c, g, or t
  misc_feature (910)..(910): n is a, c, g, or t
  misc_feature (912)..(918): n is a, c, g, or t
  misc_feature (920)..(920): n is a, c, g, or t
  misc_feature (922)..(924): n is a, c, g, or t
  misc_feature (928)..(929): n is a, c, g, or t
  misc_feature (931)..(935): n is a, c, g, or t
  misc_feature (940)..(944): n is a, c, g, or t
  misc_feature (946)..(950): n is a, c, g, or t
  misc_feature (952)..(976): n is a, c, g, or t
  misc_feature (979)..(992): n is a, c, g, or t
  misc_feature (994)..(1004): n is a, c, g, or t
  misc_feature (1007)..(1009): n is a, c, g, or t
  misc_feature (1011)..(1012): n is a, c, g, or t
  misc_feature (1014)..(1014): n is a, c, g, or t
  misc_feature (1016)..(1017): n is a, c, g, or t
  misc_feature (1024)..(1025): n is a, c, g, or t
  misc_feature (1028)..(1048): n is a, c, g, or t
  misc_feature (1050)..(1059): n is a, c, g, or t
  misc_feature (1064)..(1072): n is a, c, g, or t
  misc_feature (1074)..(1074): n is a, c, g, or t
  misc_feature (1078)..(1078): n is a, c, g, or t
  misc_feature (1083)..(1092): n is a, c, g, or t
  misc_feature (1095)..(1120): n is a, c, g, or t
  misc_feature (1122)..(1123): n is a, c, g, or t
  misc_feature (1126)..(1132): n is a, c, g, or t
  misc_feature (1135)..(1136): n is a, c, g, or t
  misc_feature (1140)..(1146): n is a, c, g, or t
  misc_feature (1148)..(1150): n is a, c, g, or t
  misc_feature (1153)..(1162): n is a, c, g, or t
  misc_feature (1165)..(1175): n is a, c, g, or t
  misc_feature (1177)..(1181): n is a, c, g, or t
  misc_feature (1184)..(1185): n is a, c, g, or t
  misc_feature (1190)..(1194): n is a, c, g, or t
  misc_feature (1196)..(1203): n is a, c, g, or t
  misc_feature (1211)..(1211): n is a, c, g, or t
  misc_feature (1214)..(1221): n is a, c, g, or t
  misc_feature (1223)..(1226): n is a, c, g, or t
  misc_feature (1228)..(1235): n is a, c, g, or t
  misc_feature (1237)..(1257): n is a, c, g, or t
  misc_feature (1264)..(1276): n is a, c, g, or t
  misc_feature (1281)..(1281): n is a, c, g, or t
  misc_feature (1288)..(1288): n is a, c, g, or t
  misc_feature (1290)..(1292): n is a, c, g, or t
  misc_feature (1294)..(1300): n is a, c, g, or t
  misc_feature (1302)..(1303): n is a, c, g, or t
  misc_feature (1305)..(1312): n is a, c, g, or t
  misc_feature (1314)..(1320): n is a, c, g, or t
  misc_feature (1323)..(1331): n is a, c, g, or t
  misc_feature (1333)..(1337): n is a, c, g, or t
  misc_feature (1341)..(1341): n is a, c, g, or t
  misc_feature (1345)..(1346): n is a, c, g, or t
  misc_feature (1350)..(1358): n is a, c, g, or t
  misc_feature (1361)..(1366): n is a, c, g, or t
  misc_feature (1371)..(1376): n is a, c, g, or t
  misc_feature (1380)..(1396): n is a, c, g, or t
  misc_feature (1399)..(1402): n is a, c, g, or t
  misc_feature (1406)..(1413): n is a, c, g, or t
  misc_feature (1417)..(1419): n is a, c, g, or t
  misc_feature (1422)..(1426): n is a, c, g, or t
  misc_feature (1429)..(1437): n is a, c, g, or t
  misc_feature (1439)..(1440): n is a, c, g, or t
  misc_feature (1442)..(1442): n is a, c, g, or t
  misc_feature (1444)..(1455): n is a, c, g, or t
  misc_feature (1461)..(1462): n is a, c, g, or t
  misc_feature (1465)..(1471): n is a, c, g, or t
  misc_feature (1473)..(1477): n is a, c, g, or t
  misc_feature (1480)..(1491): n is a, c, g, or t
  misc_feature (1493)..(1495): n is a, c, g, or t
  misc_feature (1497)..(1501): n is a, c, g, or t
atattcagtaagcgctgcaattggaggactagtacgccagctgtgatcagctctccgaatgagtcaggtagatctagaccactgaactcaaggcctgctggtcctgacagaaagatgtgcacaagaacatacagtgcaaacagcaccgtcgaaacggcagtgaaattgcaaaagtacttgcaagcgagcctgatatctgaccggcggtgttctacctgcaatggcgccagcaactgctctttgctcatcccgacagaaccggccacttcaacaacatgcctagacaatacttgggcgaaaccctggaaattttctctcagcccgtctcgaacactcccctcgatcacgcttctcatcatggtgctctgaaggaagtccacgttgtataggcccnccatccngcgggcgcattncnnnnnnccggacggtgcctgttaggtnnnngtctggccctatgtgcagaaccnnnnnnnagannnnattntcannggtnnnnnnnnnnnnnnnnnnnnnnnnnnnnnnnnnnntaactnnnaannnntcctaccccnnnnnactctcnnnnnnnnnnnncannnnnnnnctnnnncnnnnnnnnnnnnnnnnnnnnnnnnnnnnnnngnnnnnnnntanngaaaaaataanngatnnnnnnnnnnntnnnnnnnnnnnngttatccnnnnnnnccattcnnnnncccnnnnnnnnnnnnnnnnnnnnnncacnnnnnnncnnnnnnnttannngcnnnnnnccccnnnnnncnnnnnnncnnnnncacatnnngnctatcccnnnngnnnnnnnnnnnnnnatnnnannnnnnntttnnanntnnnnnnnnnntnataannnnnnnnnnnnnnnnnnagnnnnnaaannnnntnnnnnnnnnnnnnatanannntnannnnnnnanannntatnnannnnncctcnnnnncnnnnntnnnnnnnnnnnnnnnnnnnnnnnnngcnnnnnnnnnnnnnnannnnnnnnnnnctnnncnntncnntcctctnnctnnnnnnnnnnnnnnnnnnnnnannnnnnnnnncgttnnnnnnnnncncctncacannnnnnnnnnatnnnnnnnnnnnnnnnnnnnnnnnnnntnnctnnnnnnncanncttnnnnnnntnnnctnnnnnnnnnnccnnnnnnnnnnntnnnnntcnnctcannnnncnnnnnnnntcataaanacnnnnnnnncnnnnannnnnnnntnnnnnnnnnnnnnnnnnnnnncctcatnnnnnnnnnnnnncactntcttccnannnannnnnnntnnannnnnnnncnnnnnnntcnnnnnnnnnannnnnccanaacnnatcnnnnnnnnnccnnnnnnttcannnnnncctnnnnnnnnnnnnnnnnnctnnnncctnnnnnnnngcannnccnnnnntcnnnnnnnnncnncncnnnnnnnnnnnntctatnnacnnnnnnncnnnnnctnnnnnnnnnnnncnnncnnnnnatc

SEQ ID NO: 4660 - DNA, 689 bp, Zea mays
tgaatgaacattttccgagtgttgtcgtcgacgaatgaagaaccgcaaaaaagagagtacttcaagaaatatagcaacgactcttcttgatatatatttcaagaacccatcatcattgcctacaacatcatttggggcacgctgacctgctggtttgaacccataattaagcatgagacaagctggacatgaaggtgcgagaataaaaattctttatatagcttaatcaaataatgtaaaattttaaatggatacctggcgaaagtaaacccccatttatcagggaaccttgttctgtattgacctgcctagtttcatttccagtagagttgtatctcccgttggatcctacaactttatctgccatatgagacatgccaattgaaccactatatgttgtagatcctgattccctcgcctacagggtaaagaatcagaacgaattaactacaaattataaaacatgctaacatggtgtcatgcagctaaaaggaacagaacacattttctaatgaaagcctgaatgtgcaagttcaaatcttcacagttccaagatagacatacgacaaaaataataaaatatctccaaaaaaacataacagaacttagtaagactgtacttcctctcgaactggggccaaactaggatattcaacatcttcaggagccacaggggatccaagatcatc

SEQ ID NO: 4661 - DNA, 452 bp, Zea mays
tcagcgacgatgctgcggtgcagattgtcttcaagaatccgagaactgtaagtgatcctcattattataaggtatttatctctacgctcacgttgtttgcagtctagctaatcaggtgtcttgacaaactttgttcaggggatagccagcagactggtgaaggctgccttgaaggaagcgaccaggaagagggaggtcaggtaccgtgatctgaggacgatcgagagaggggtgaggcggcatttccacgacgacatcagcgtcgtcgtggtctacctcgatggccaccgcgagcgccgccacaccagggtcgttgactcgagcagcaactgcaccagtgcgcccgtcgacatccactcctccaactcccgctagtttccggagccccttgcaacgcgagctgaactctgggtgggaggtgaggtgggtgcagccgtagccatcggaatcgg

SEQ ID NO: 4662 - DNA, 551 bp, Zea mays
gctgctcggcttcaacgaggtgctgcacctcgccgcggcgcgcggcgttgcgctcccgggcgacatgctggaggcggccaaggacgccggcatccgggaagtcctcttgctccgctacttcgatctgcaggtcctcgaatttcagggaatttgtatggaagattcaaacgtggccgttttttctcattcctttgatattgatctgcaggccgcgccgtggccactaggcgtgttgatccgcgccttctcgatgctccgcaaccggatgctcgccgacccgtcgttcctcttcaaagttagcaccgaggtggatgcgattggtcagttattattttcaagtggtcagaaggtagcagttcggctgttgctaacaattgcgttctgggctcaatgcagattgtgatcgactcttgctgcgcgacatttgcagaggtgcagaagaggggaaaggatttttgggcagagtttgaactgtacgctgctgatcttcttgtcggtgtagcagttgatattgcacttgtggggctgctggctccatatgtgagaattat

SEQ ID NO: 4663 - DNA, 755 bp, Zea mays
  misc_feature (410)..(412): n is a, c, g, or t
  misc_feature (422)..(424): n is a, c, g, or t
  misc_feature (426)..(426): n is a, c, g, or t
  misc_feature (458)..(458): n is a, c, g, or t
  misc_feature (489)..(491): n is a, c, g, or t
  misc_feature (496)..(501): n is a, c, g, or t
  misc_feature (513)..(518): n is a, c, g, or t
  misc_feature (521)..(521): n is a, c, g, or t
  misc_feature (541)..(546): n is a, c, g, or t
  misc_feature (561)..(566): n is a, c, g, or t
  misc_feature (590)..(590): n is a, c, g, or t
  misc_feature (595)..(597): n is a, c, g, or t
  misc_feature (602)..(604): n is a, c, g, or t
  misc_feature (606)..(609): n is a, c, g, or t
  misc_feature (611)..(611): n is a, c, g, or t
  misc_feature (615)..(619): n is a, c, g, or t
  misc_feature (625)..(632): n is a, c, g, or t
  misc_feature (634)..(647): n is a, c, g, or t
  misc_feature (654)..(658): n is a, c, g, or t
  misc_feature (668)..(671): n is a, c, g, or t
  misc_feature (673)..(690): n is a, c, g, or t
  misc_feature (693)..(693): n is a, c, g, or t
  misc_feature (695)..(697): n is a, c, g, or t
  misc_feature (699)..(703): n is a, c, g, or t
  misc_feature (706)..(706): n is a, c, g, or t
  misc_feature (716)..(719): n is a, c, g, or t
  misc_feature (721)..(723): n is a, c, g, or t
  misc_feature (726)..(728): n is a, c, g, or t
  misc_feature (730)..(732): n is a, c, g, or t
  misc_feature (734)..(736): n is a, c, g, or t
  misc_feature (740)..(748): n is a, c, g, or t
gcaggtggccgcgttcgccaagcgcacagcgcaggcgcggaagcacgtcgcggtggcggcccgcactattccaccgccgcaggcacaggccctcagaacctgcgacacgatgtacatgaacacgcaggacgccatcggcgcggcgcagcgagccatcgcgttcaaggacacgggcaccgcgaagatcatgctgcagctcgccgtccaggacttcgactcgtgtgaccgtccgttcacccatgccggtgtccccaaccccatgggtaagttcgataaggagctcagccagatggccaacaactgcatgacgcttgcaaacatgatatgaatcatatatatgcggccggggacgactgtttggcatgttcttacactccagcatgagagaggacgccatcggggcggcgcannnagccatcgcnnncncggacacgggctccgcgaagatcatgctgcanctcgccgtccttgacttcaacttgtgtgacnnnacgtnnnnnnatgccggtgttnnnnnnccngtgggtaaaatcaatatggnnnnnngccttatggccaacnnnnnnatggggcttgccaacctgatatanatcgnnnatttnnngnnnnangacnnnnnggcatnnnnnnnncnnnnnnnnnnnnnnagacccnnnnnccccccccannnnannnnnnnnnnnnnnnnnnggncnnntnnnnnctnaccccccccnnnntnnnccnnncnnntnnnacannnnnnnnntcaatcc

SEQ ID NO: 4664 - DNA, 364 bp, Zea mays
tcgacggccgtgtccgtgatgcgcttcatctcggcgtcgccgaggacattcacgaggtcctccagtgtgctctccagcctttccatctccccgggcacgccgaggagcgtgtcgagcctctccttcacggcaccagcgaccattcgccccagcatgggcacgaaggcgtctaggatcatagccatgagttaatcacttgatcaagagagctcagcagggccaacaagattgaaattatgtgtgttttgagaggtcaacggcggcactggcacaagatgggtcacacttgctctattctggttgctcttgctcctgcaattataattgggaagggagttgataaacaggagattcgaccgaacag

SEQ ID NO: 4665 - DNA, 1168 bp, Zea mays
gctactccatggacgacaacgagctactgctcgtgtacgagttcatggcgaaggggagcttggagaaccacctgttccgaagtgagtgtatatatatttaatccagaagcaagatatttttttccctaacgacgacagtattcgatccagaaacgtttctctctttatgtcagcacagcactctttacgccaacttcacctgcagcagcgcactctgcaaacgctggtgcttcacctgcgtctacagatcgttttcataaaatattgtatgtggagcaccatagcgcgcgttcgtagtgccatacaactaacgagcatttcttggaggatgtcagcatcagccaaattgcatgccggacctgtacgatagatatatcttgttgctccagccttcaattattcattctcgccgagtcaaaatgggaatttcaagatgactaaaagtacttgttttccgcctgtttgtttttatcccaatctatgtagattgaaaacgattgtatgagtttaaatccattgtaaaccaaaatctctactatttttttggtgttgtgctcacagctcacctatacctttagtcgtgttttctgctcagctatgtccttctgttctatagcactggaagggcacagctgaggaaaaaacacgattaagggtatagatgaacacaacatcaaaactaaggacaccaatttaaaaaactctttttttaatcccatctcatctaatccaatccatgatggctggcgatgaataaccgaacaaggctttactgtgggccatatagctagggtgttgtgttctgtggttgtatgtatgtaatactgactagtcttaattgttcaccatttgacaggaggggcggtctacgagccgctgccctggagcctgaggctgaagatcctcatcggtgcagctcgtggcctcgcgttccttcattcgtcagagaggcagatcatctacagggacttcaaggcttccaacatcttactggattcggtaattactcttttccagagctacttaatgatgtataatactactataatgaccgcacactcaccaatgccatgttcagcacttcaacgcgaagctctcggatttcggattggccaagcatggtccagacggcggggagtctcatggacaacaagagtcatgggaccta

SEQ ID NO: 4666 - DNA, 1280 bp, Zea mays
  misc_feature (1216)..(1216): n is a, c, g, or t
  misc_feature (1218)..(1223): n is a, c, g, or t
aaggctgttgcggtatgctttgaattttaactcatttcatttaagcttaagttaaacttgttttgtgggcactatctacctggatggcttatttcaatgcattatatatgggtcacaaagtgcatgtggtgattcagcatcttgaaattgctagtaatgtatccatgccttgcattgtttttgtagcatcagtgaagcactctagctcgaaacatttgttcttaaatggttaaatctcacatggtgcaggaaaagcaaccgtttgaacgcattgaggtcagcagggcagaagctcttgaaatgtttgctgagaatgaattcaaggcaaccttccttgctactgtcttgtttgtttcattcctctatcattttgctgcttatgttaaatatatatacgacttccatccattcttacaaaaaagtgaattatatgttcaggttgaaatcattaatgagttgcctgaggacaagaccattactgtatacaggtgtggtcctttagttgacctatgccgtgggccacacatcccaaatacttcctttgtcaaagctttcgcttgtctgaaggtaatgattctttgattgtccactattcttctggttctctttttagtggaactggctatttcatatgtatacatacatgtaaatattcaggcttcatcatcatattggagaggaaaagttgaccgcgaaagcctgcagagagtatatggaatttctttccctgattctcgacgtctcacggtatagaatgtaatttctgcttatgatgctatcactgatgacacggacaattgtaaaactgtttactaatatataaccctgctgaacatgtctgttatatttgcacttcagatactagcataattatgtgttcatgattatgtgctgcacctgagttggcataaaatttcatacatgatatgacatacacttctatctgaatcaatactttgaaatcttgtctgagatcttgtgttttccggaacctgttggttaacatgggttatggggttagggatagttttgcacaacacgctgcatggtatatgtgtgaaactttaattgagcgtgtctctgaggcattgataagttcaggtaactgtaggggtcaggccatacctttcgctttcggatctgtgttatcgtattccgtctgactgtccctgaatgatacacttgcattttcttttgttattattctcatcttctntnnnnnntttattacatgtcactttgcaggaatataaacattttctagaggaagctaagaaacg

SEQ ID NO: 4667 - DNA, 1263 bp, Zea mays
  misc_feature (602)..(605): n is a, c, g, or t
  misc_feature (782)..(783): n is a, c, g, or t
  misc_feature (808)..(809): n is a, c, g, or t
  misc_feature (814)..(817): n is a, c, g, or t
  misc_feature (842)..(847): n is a, c, g, or t
  misc_feature (850)..(853): n is a, c, g, or t
  misc_feature (870)..(870): n is a, c, g, or t
  misc_feature (873)..(875): n is a, c, g, or t
  misc_feature (901)..(903): n is a, c, g, or t
  misc_feature (911)..(913): n is a, c, g, or t
  misc_feature (919)..(920): n is a, c, g, or t
  misc_feature (922)..(927): n is a, c, g, or t
  misc_feature (929)..(932): n is a, c, g, or t
  misc_feature (934)..(935): n is a, c, g, or t
  misc_feature (941)..(941): n is a, c, g, or t
  misc_feature (948)..(951): n is a, c, g, or t
  misc_feature (955)..(956): n is a, c, g, or t
  misc_feature (959)..(961): n is a, c, g, or t
  misc_feature (963)..(963): n is a, c, g, or t
  misc_feature (971)..(973): n is a, c, g, or t
  misc_feature (975)..(979): n is a, c, g, or t
  misc_feature (981)..(981): n is a, c, g, or t
  misc_feature (983)..(988): n is a, c, g, or t
  misc_feature (993)..(994): n is a, c, g, or t
  misc_feature (998)..(1007): n is a, c, g, or t
  misc_feature (1009)..(1009): n is a, c, g, or t
  misc_feature (1011)..(1037): n is a, c, g, or t
  misc_feature (1039)..(1051): n is a, c, g, or t
  misc_feature (1053)..(1057): n is a, c, g, or t
  misc_feature (1062)..(1065): n is a, c, g, or t
  misc_feature (1067)..(1076): n is a, c, g, or t
  misc_feature (1078)..(1081): n is a, c, g, or t
  misc_feature (1083)..(1118): n is a, c, g, or t
  misc_feature (1121)..(1125): n is a, c, g, or t
  misc_feature (1127)..(1127): n is a, c, g, or t
  misc_feature (1129)..(1131): n is a, c, g, or t
  misc_feature (1133)..(1146): n is a, c, g, or t
  misc_feature (1151)..(1170): n is a, c, g, or t
  misc_feature (1172)..(1174): n is a, c, g, or t
  misc_feature (1178)..(1186): n is a, c, g, or t
  misc_feature (1188)..(1202): n is a, c, g, or t
  misc_feature (1204)..(1217): n is a, c, g, or t
  misc_feature (1223)..(1230): n is a, c, g, or t
  misc_feature (1235)..(1240): n is a, c, g, or t
  misc_feature (1247)..(1255): n is a, c, g, or t
  misc_feature (1259)..(1259): n is a, c, g, or t
catatctcttatagtagtggcctactacaaaataggggtccgtgatgtacatgccgaagtgaataagtactgctcattcattgttggcatgggtataattactgtactagccaacttcttgcagcacttctactttggtataatgggagagaaaatgaccgagcgtgtcagaaggatgatgttttctggtatgaccgtcttttcctttatgttacttttgtagtcccatatttaatggtgcaacctcagctcttataaactatctagtttaacatccataaataaagcacgtattcatgagtattgaacacaagaaacaatgctgctgtgctaagttctattgtgtatagattatagtaaaccattgttgaaatatcagagttctcacattctgtttactgtattccagcaattctgcgcaatgaagttggttggtttgacgacgaagaaaatagcgcagacatattatcaatgagacttgcaaatgatgcaacatttgtccgcgctgctttcagtaacagactttctatattcattcaggatacatcggccattcttgttgcacttcttcttggtatgttactacaatggcgtgttgctcnnnnttgtttccgaatccataccgaagtttatatctattatttgagaaaatgtaggatgaatttaagatttatcttttatgaatcttaacaagctggatgttaaaaacaagaatacaaatttatattgtatattctatatcatatttattcgcaatcaaagaaaaaactgattaccgaatnnataccgtttccgaccgttttcatcnntaatnnnngcaattctgcgcaatgaagttggtnnnnnngannnngaagaaaatagcgcagncannntatcaatgagacttgcaaatgatgcnnnatttgtcnnngctgcnntnnnnnncnnnntnnctatantcattcnnnntacnncgnnncntcttgttnnncnnnnncntnnnnnntactnnaatnnnnnnnnnncncnnnnnnnnnnnnnnnnnnnnnnnnnnncnnnnnnnnnnnnntnnnnnccccnnnntnnnnnnnnnncnnnncnnnnnnnnnnnnnnnnnnnnnnnnnnnnnnnnnnnnccnnnnngncnnntnnnnnnnnnnnnnnccctnnnnnnnnnnnnnnnnnnnncnnnctcnnnnnnnnncnnnnnnnnnnnnnnncnnnnnnnnnnnnnncttccnnnnnnnncttcnnnnnntcttctnnnnnnnnntccncccc

SEQ ID NO: 4668 - DNA, 527 bp, Zea mays
ctcgtcgggatgatgatgatgagcggtcgagcggccaccgcggggcggtacccgttcacggcgtcgcagtggcaggagctggagcaccaggcgctcatctacaagtgcctggcgtccggcaagcccatcccgtcctacctcatgccaccgctccgccgcatcctcgactccgccctcgccacgtcgccgtcgctcgccgccttccagccgcaaccctcgcgtacgcgactactgtctctctctctctctctctctctctctctatgcgcccgccatgtgtctttatttccagtatattccggttcacgtccgcgttgttggttgcctttgcatgcagtggggtgggggggctgcttcgggatgggcttcagcaggaagcccgccgacgaggacccggagcccgggcggtgccggcgcacggacggcaagaagtggcgctgctccaaggaggcgtacccggactccaagtactgcgagaagcacatgcaccggggcaagaaccgttcaagaaagcctgtggaaatgtc

SEQ ID NO: 4669 - DNA, 1571 bp, Zea mays
  misc_feature (689)..(690): n is a, c, g, or t
  misc_feature (724)..(726): n is a, c, g, or t
  misc_feature (764)..(767): n is a, c, g, or t
  misc_feature (784)..(784): n is a, c, g, or t
  misc_feature (796)..(798): n is a, c, g, or t
  misc_feature (802)..(807): n is a, c, g, or t
  misc_feature (810)..(813): n is a, c, g, or t
  misc_feature (815)..(820): n is a, c, g, or t
  misc_feature (825)..(826): n is a, c, g, or t
  misc_feature (828)..(836): n is a, c, g, or t
  misc_feature (840)..(841): n is a, c, g, or t
  misc_feature (845)..(845): n is a, c, g, or t
  misc_feature (858)..(859): n is a, c, g, or t
  misc_feature (867)..(869): n is a, c, g, or t
  misc_feature (875)..(876): n is a, c, g, or t
  misc_feature (879)..(883): n is a, c, g, or t
  misc_feature (887)..(896): n is a, c, g, or t
  misc_feature (899)..(905): n is a, c, g, or t
  misc_feature (908)..(910): n is a, c, g, or t
  misc_feature (914)..(914): n is a, c, g, or t
  misc_feature (917)..(918): n is a, c, g, or t
  misc_feature (920)..(920): n is a, c, g, or t
  misc_feature (929)..(940): n is a, c, g, or t
  misc_feature (942)..(943): n is a, c, g, or t
  misc_feature (945)..(951): n is a, c, g, or t
  misc_feature (953)..(958): n is a, c, g, or t
  misc_feature (962)..(966): n is a, c, g, or t
  misc_feature (970)..(976): n is a, c, g, or t
  misc_feature (979)..(989): n is a, c, g, or t
  misc_feature (991)..(995): n is a, c, g, or t
  misc_feature (997)..(1007): n is a, c, g, or t
  misc_feature (1009)..(1017): n is a, c, g, or t
  misc_feature (1019)..(1038): n is a, c, g, or t
  misc_feature (1044)..(1045): n is a, c, g, or t
  misc_feature (1048)..(1052): n is a, c, g, or t
  misc_feature (1056)..(1065): n is a, c, g, or t
  misc_feature (1068)..(1095): n is a, c, g, or t
  misc_feature (1098)..(1134): n is a, c, g, or t
  misc_feature (1136)..(1144): n is a, c, g, or t
  misc_feature (1151)..(1157): n is a, c, g, or t
  misc_feature (1160)..(1164): n is a, c, g, or t
  misc_feature (1166)..(1213): n is a, c, g, or t
  misc_feature (1215)..(1238): n is a, c, g, or t
  misc_feature (1241)..(1247): n is a, c, g, or t
  misc_feature (1249)..(1303): n is a, c, g, or t
  misc_feature (1305)..(1316): n is a, c, g, or t
  misc_feature (1318)..(1322): n is a, c, g, or t
  misc_feature (1325)..(1326): n is a, c, g, or t
  misc_feature (1330)..(1334): n is a, c, g, or t
  misc_feature (1336)..(1336): n is a, c, g, or t
  misc_feature (1338)..(1341): n is a, c, g, or t
  misc_feature (1343)..(1369): n is a, c, g, or t
  misc_feature (1372)..(1382): n is a, c, g, or t
  misc_feature (1384)..(1399): n is a, c, g, or t
  misc_feature (1401)..(1471): n is a, c, g, or t
  misc_feature (1473)..(1491): n is a, c, g, or t
  misc_feature (1495)..(1513): n is a, c, g, or t
  misc_feature (1515)..(1568): n is a, c, g, or t
cattgatttctcttcaattcgatagatgaacaaatgaatatcaagaactgtcattgatttcttgtaggcctggagactctgggtgggccgctgcgtcacggcactccttgatccagcggttgcaccggcgcctgccaagcccgagcttgcgcaactgcgcaggtgcatccaggtcggcctcctctgcgtccaggagaagccggacgaaaggcccgccatgtccgcggttgtcgagatgctaggcagcccctgctcggagcttgccgagcccatggtgccgacggtcgtcggcaatgcagccttggctacgctcctggaggccgatctctccagaccgacggtgtacgagacaatcgattttagataagagatgacgcgctcgcactgcgttgctgctaagcttataacacttgttttatacttcgtactgttgttttacactgattataattgttattaataacatttttggtttgtttggtcgaaaagacatgacggtactaagggctaacacttacgctatctccaacagatgctctatcttgtttccttattccaaacttctatttacaaacagtgtcatcaacagttttactagagataatcttaggtattataaccatcaaagaaataagcttatcttatgattcttaccctgtctttttttttttccgggggaggggaggcanncccaaggggttcgatttgaacttgaacccccccnnnaaaagaaaaaacctgcctgcggcccattttgcaagggnnnngccaaaaaaataacccnccccccccttgnnnaacnnnnnnaannnnannnnnnaaagnncnnnnnnnnnaggnnttcnggcccgccccttnntttaaaannnaaccgnnttnnnnnaggnnnnnnnnnngtnnnnnnnctnnntttnatnnanggggggaannnnnnnnnnnncnngnnnnnnngnnnnnntgannnnntggnnnnnnnacnnnnnnnnnnngnnnnngnnnnnnnnnnnannnnnnnnncnnnnnnnnnnnnnnnnnnnncccccnncannnnngttnnnnnnnnnnggnnnnnnnnnnnnnnnnnnnnnnnnnnnnttnnnnnnnnnnnnnnnnnnnnnnnnnnnnnnnnnnnnntnnnnnnnnntcctccnnnnnnnaannnnnannnnnnnnnnnnnnnnnnnnnnnnnnnnnnnnnnnnnnnnnnnnnnnntnnnnnnnnnnnnnnnnnnnnnnnnaannnnnnnannnnnnnnnnnnnnnnnnnnnnnnnnnnnnnnnnnnnnnnnnnnnnnnnnnnnnncnnnnnnnnnnnntnnnnnctnntcannnnntnannnnannnnnnnnnnnnnnnnnnnnnnnnnnnaannnnnnnnnnntnnnnnnnnnnnnnnnntnnnnnnnnnnnnnnnnnnnnnnnnnnnnnnnnnnnnnnnnnnnnnnnnnnnnnnnnnnnnnnnnnnnnnnnannnnnnnnnnnnnnnnnnnaccnnnnnnnnnnnnnnnnnnncnnnnnnnnnnnnnnnnnnnnnnnnnnnnnnnnnnnnnnnnnnnnnnnnnnnnnntta

SEQ ID NO: 4670 - DNA, 402 bp, Zea mays
  misc_feature (385)..(387): n is a, c, g, or t
tcagtaatttcctaaggtttctcaccaagattggctccattagttctcgtgcgtcagcatcttcacaggatatctttctggccttctctgtaagtgtaacagaaattggctttcgggaagcacttccaccagagacatggaagatattggggtggcgtccgatgagtgaaagaaaatcccatttttggacaaagccaacctccttttcaaggtcacgtacaagtagtgaccctgtcttttgtgccaaaatgaggtcacgcagacgaaggagaagggcaggcttcttttgaaggtccatggccttgtcaagaccaggttcacggtggtatggcttcttcttgggtcggcgtccatgaccagctgagaatgaggacatagaaacgtnnncctggtcttgacaag

SEQ ID NO: 4671 - DNA, 365 bp, Zea mays
cagtccgagaagtgggcgtcggggctgttcgccgaccagagcaccggggccgacagcctgacggcgtggagcaggaggaaccgggggatcagggaccaggacatcgtgctgtggtacacgctgggcctgcaccacataccctaccaggaggacttcccggtgatgccaacgctcagcggcggcttcgagctccggccatccaatttcttcgagagaaatccgatcctcaagattggtaggccacccatccggtccagcgcatccgggaactgttcgtgcgatgccagatgacgtgtgcacgtacagtacagctagctctgctcaggtcacgaatctgtatcaggacattgatgaattggttgaga

SEQ ID NO: 4672 - DNA, 877 bp, Zea mays
  misc_feature (808)..(811): n is a, c, g, or t
  misc_feature (822)..(826): n is a, c, g, or t
  misc_feature (828)..(848): n is a, c, g, or t
  misc_feature (850)..(870): n is a, c, g, or t
  misc_feature (872)..(874): n is a, c, g, or t
tctcggtggagttcgaagctattcaaggtgatggtttacttctgcttagccattattcacatgttcttgttggtaccaatcaaacggcacccattttcccttctgttattgttgttgttattcttattattagatttccagaatagatcgtctgatgcgagtgcgtgcatctgatgactcgtaggagacggtcgcatgtacaagcttccttcaggaaagagggagtacctcctcccagaaggcgagaagcatgattacgactggtaattaaaaagcgtgtagatccctagttttaactgtaacccagatgcaccccgactgtttttaagttgccttgtaaagcatagcagctcgttttcaggctcaagacgcccccagcgaccccactgttcccttccctggagatggaagccaactcatcccagatgatctttcagaaggagctgctgcctatgcttcagccactcaggacttcaagggtatgctcaatgtttgcacttgtacgaccttgccctttatatattcctgtactgcaccaagctagaattctctgttaggagtgcaattgtgcaaatgattccattttctcaaactggtattgtgaaactgggtttaatcttttccttgatctttctgtgctattgtgaaactggtacagttctcaagcaagcccgactctgcaaccgcatcgacaacgtccgaatcgcctacctccagctcctccatttctgtgactccgacagcgaggcccagctcttcgtcatcgaagaaaaaactcagcagagaagctcccactccatctaaacannnnggactcaaaannnnnannnnnnnnnnnnnnnnnnnnntnnnnnnnnnnnnnnnnnnnnntnnnctt

SEQ ID NO: 4673 - DNA, 487 bp, Zea mays
attcttttacttaaaccgtgatatactgtcatatctatttattttgttagcttaaatgatttcttcaaaattcaatatttgctaaaaaagatgcatatgaaacagcatcaccatctgaaactgcactggtcactcttatctctggttgggcatgcaaaggccgggataaatccaaagatggagaatatttatgcttaacatcaggtgcggcgagatgtctatcagatgatgtagatgatctgggaaaatgccgatcattctgtccatgtgcttcacccaacagctcagatctttctctgcagctacatactgagaatgattctaggccaggcaagcgaggaaaagatgcagtatctttttctcatactaatggaatctactgctctcaaactgctgacattgaagcaattccatgtagcaaaaaaccatgttgtattcctggtttgagagtagagagtagcaatcttggtattggttccttggctta

SEQ ID NO: 4674 - DNA, 751 bp, Zea mays
  misc_feature (582)..(583): n is a, c, g, or t
  misc_feature (687)..(689): n is a, c, g, or t
  misc_feature (691)..(691): n is a, c, g, or t
  misc_feature (706)..(706): n is a, c, g, or t
  misc_feature (708)..(712): n is a, c, g, or t
  misc_feature (737)..(738): n is a, c, g, or t
aagttcggcgtctcagtttgagcgagcaacaacttgtcaaagcggcaaaggatcatgccacagaaattgtgaggtatacatatgttactgatcgatgctctattgctcttattaataggaagagtttgcttcccttgttgaagagatcagcttcctctgttccaaatccaaataggttcacacagagaaacatactgaggatataccccaagggcactcgagtcacttcatcgaactacaatccgttcgttggttgggtgcatggtgctcaaatggtggcattcaatatgcaggtatatatgtttctgactgactgagctgttgatccaagtattttcctaatgacaatcatcaatcctatcttctttttcagggatacgggagagcgctgtggctaatgcacggattttacaaagcgaatggcgggtgcggttatgtgaagaaaccagatttcttgatgcagacagaaccacaagtcttcgacccaagagaaccccagcctgtgaagaaaacgttgaaggtgaaggtgtacatgggcgatgggtggcgaatggacttcaagcagacacacttcgatcagtnnatgtacaccttcaccttcaacgttttcttcacaggctggggttctcttgggtcgaagacttgtggttctgtctgcatcaagaaatctggtttcttccctaaccnnncnccattccctttgtanannnnngcattaaccacagcgctctccccgnncccttaaaaaaaa

SEQ ID NO: 4675 - DNA, 407 bp, Zea mays
tgagaaatcggacagaggaagtaggatggcgtggcagcagctctactgcttccatcggagatggaccgaaaagattgcgacaacggcgaaggagcttcctttttcataggctgaaccaccctccacacgtcgagctcaagatcagggcgtttctccctgctgagctccgagcagcgcagtgcgcagcccaatccgcgcaagctgctctgcctgtgccagcggccactcacctgccgagtgatccaacaccgagcgaaggtcgttgtcactcaccgcctgttgcaccaccctcgcgaggcgtagaggcgcccttccggtcaggaggcgcaggatcgtaatgccaaaggagtacgtgtcagactgcggtgtcagctcccccgtgccgaagaactccgggtccatgtatg

SEQ ID NO: 4676 - DNA, 1463 bp, Zea mays
  misc_feature (381)..(392): n is a, c, g, or t
  misc_feature (410)..(410): n is a, c, g, or t
  misc_feature (499)..(501): n is a, c, g, or t
  misc_feature (503)..(509): n is a, c, g, or t
  misc_feature (513)..(515): n is a, c, g, or t
  misc_feature (517)..(517): n is a, c, g, or t
  misc_feature (519)..(520): n is a, c, g, or t
  misc_feature (522)..(527): n is a, c, g, or t
  misc_feature (535)..(546): n is a, c, g, or t
  misc_feature (548)..(553): n is a, c, g, or t
  misc_feature (555)..(580): n is a, c, g, or t
  misc_feature (586)..(591): n is a, c, g, or t
  misc_feature (595)..(609): n is a, c, g, or t
  misc_feature (613)..(621): n is a, c, g, or t
  misc_feature (627)..(648): n is a, c, g, or t
  misc_feature (655)..(655): n is a, c, g, or t
  misc_feature (660)..(661): n is a, c, g, or t
  misc_feature (663)..(666): n is a, c, g, or t
  misc_feature (673)..(677): n is a, c, g, or t
  misc_feature (679)..(684): n is a, c, g, or t
  misc_feature (688)..(693): n is a, c, g, or t
  misc_feature (696)..(702): n is a, c, g, or t
  misc_feature (704)..(706): n is a, c, g, or t
  misc_feature (709)..(711): n is a, c, g, or t
  misc_feature (714)..(724): n is a, c, g, or t
  misc_feature (726)..(731): n is a, c, g, or t
  misc_feature (738)..(741): n is a, c, g, or t
  misc_feature (744)..(765): n is a, c, g, or t
  misc_feature (767)..(767): n is a, c, g, or t
  misc_feature (769)..(785): n is a, c, g, or t
  misc_feature (789)..(799): n is a, c, g, or t
  misc_feature (802)..(818): n is a, c, g, or t
  misc_feature (820)..(829): n is a, c, g, or t
  misc_feature (838)..(838): n is a, c, g, or t
  misc_feature (841)..(848): n is a, c, g, or t
  misc_feature (851)..(858): n is a, c, g, or t
  misc_feature (860)..(860): n is a, c, g, or t
  misc_feature (862)..(864): n is a, c, g, or t
  misc_feature (867)..(867): n is a, c, g, or t
  misc_feature (873)..(887): n is a, c, g, or t
  misc_feature (889)..(889): n is a, c, g, or t
  misc_feature (891)..(892): n is a, c, g, or t
  misc_feature (895)..(900): n is a, c, g, or t
  misc_feature (903)..(903): n is a, c, g, or t
  misc_feature (913)..(923): n is a, c, g, or t
  misc_feature (927)..(930): n is a, c, g, or t
  misc_feature (933)..(949): n is a, c, g, or t
  misc_feature (951)..(953): n is a, c, g, or t
  misc_feature (958)..(959): n is a, c, g, or t
  misc_feature (965)..(992): n is a, c, g, or t
  misc_feature (994)..(1004): n is a, c, g, or t
  misc_feature (1010)..(1012): n is a, c, g, or t
  misc_feature (1014)..(1029): n is a, c, g, or t
  misc_feature (1033)..(1038): n is a, c, g, or t
  misc_feature (1042)..(1043): n is a, c, g, or t
  misc_feature (1049)..(1049): n is a, c, g, or t
  misc_feature (1051)..(1051): n is a, c, g, or t
  misc_feature (1053)..(1063): n is a, c, g, or t
  misc_feature (1065)..(1100): n is a, c, g, or t
  misc_feature (1102)..(1103): n is a, c, g, or t
  misc_feature (1105)..(1105): n is a, c, g, or t
  misc_feature (1110)..(1110): n is a, c, g, or t
  misc_feature (1113)..(1118): n is a, c, g, or t
  misc_feature (1120)..(1149): n is a, c, g, or t
  misc_feature (1151)..(1156): n is a, c, g, or t
  misc_feature (1162)..(1170): n is a, c, g, or t
  misc_feature (1173)..(1191): n is a, c, g, or t
  misc_feature (1194)..(1197): n is a, c, g, or t
  misc_feature (1200)..(1200): n is a, c, g, or t
  misc_feature (1204)..(1207): n is a, c, g, or t
  misc_feature (1209)..(1214): n is a, c, g, or t
  misc_feature (1216)..(1217): n is a, c, g, or t
  misc_feature (1219)..(1219): n is a, c, g, or t
  misc_feature (1221)..(1246): n is a, c, g, or t
  misc_feature (1249)..(1249): n is a, c, g, or t
  misc_feature (1251)..(1257): n is a, c, g, or t
  misc_feature (1259)..(1263): n is a, c, g, or t
  misc_feature (1267)..(1270): n is a, c, g, or t
  misc_feature (1275)..(1287): n is a, c, g, or t
  misc_feature (1289)..(1289): n is a, c, g, or t
  misc_feature (1291)..(1302): n is a, c, g, or t
  misc_feature (1305)..(1305): n is a, c, g, or t
  misc_feature (1307)..(1315): n is a, c, g, or t
  misc_feature (1317)..(1318): n is a, c, g, or t
  misc_feature (1320)..(1323): n is a, c, g, or t
  misc_feature (1325)..(1340): n is a, c, g, or t
  misc_feature (1342)..(1344): n is a, c, g, or t
  misc_feature (1349)..(1351): n is a, c, g, or t
  misc_feature (1353)..(1369): n is a, c, g, or t
  misc_feature (1371)..(1384): n is a, c, g, or t
  misc_feature (1387)..(1397): n is a, c, g, or t
  misc_feature (1400)..(1400): n is a, c, g, or t
  misc_feature (1402)..(1407): n is a, c, g, or t
  misc_feature (1410)..(1414): n is a, c, g, or t
  misc_feature (1417)..(1426): n is a, c, g, or t
  misc_feature (1428)..(1437): n is a, c, g, or t
  misc_feature (1439)..(1456): n is a, c, g, or t
  misc_feature (1458)..(1458): n is a, c, g, or t
  misc_feature (1460)..(1460): n is a, c, g, or t
tgccatcgtggccgtcgtggtgtccggagaactgcatcaccgagatgcagctcccgagcatcctgttgctccacgtccgcgacctgccgtcattcctcgccgtcacctccgaggacgacccatttgcgttcatgctaccggagtttcacgagctcgtcgacgcgctcgaacgagatgatggctcctcaaagcccccgacatacgtcctcgccaacatctgtgatgccatggaggccaacgctctcgcgtcgctgatgccacacatggacatctttgtctttgggcacatgctgccgttcctgcacgaggcggatgatggcaggtgcgccccacctccttgcaatgcctttgaccacgacaagagcaggtactcctacctcnnnnnnnnnnnngcaaggacggcaagaacnggcgctgctccaaggaggcgtacccggactccgagtactgcgagaagcacatgcaccggggcaagaaccgttcaagaaagcctgtggcnnnannnnnnntttnnncncnnannnnnnacccccannnnnnnnnnnntnnnnnnannnnnnnnnnnnnnnnnnnnnnnnnncccccnnnnnnaacnnnnnnnnnnnnnnntttnnnnnnnnnattaannnnnnnnnnnnnnnnnnnnnnccaaccnctccnntnnnntcccccnnnnntnnnnnncatnnnnnncannnnnnncnnnccnnnacnnnnnnnnnnncnnnnnncacctcnnnntcnnnnnnnnnnnnnnnnnnnnnntnannnnnnnnnnnnnnnnntatnnnnnnnnnnnaannnnnnnnnnnnnnnnnannnnnnnnnnccactctcnccnnnnnnnnctnnnnnnnncncnnnatncttttnnnnnnnnnnnnnnntntnnccnnnnnnatnatctctcctnnnnnnnnnnncacnnnncannnnnnnnnnnnnnnnnannntgttnnttttcnnnnnnnnnnnnnnnnnnnnnnnnnnnngnnnnnnnnnnnatgccnnnannnnnnnnnnnnnnnntccnnnnnntttnnctcttncnannnnnnnnnnnannnnnnnnnnnnnnnnnnnnnnnnnnnnnnnnnnnntnntntctanttnnnnnntnnnnnnnnnnnnnnnnnnnnnnnnnnnnnngnnnnnntgttannnnnnnnncannnnnnnnnnnnnnnnnnnccnnnnaancttnnnntnnnnnncnnantnnnnnnnnnnnnnnnnnnnnnnnnnntcngnnnnnnncnnnnnttcnnnnttctnnnnnnnnnnnnnanannnnnnnnnnnncancnnnnnnnnnanncnnnntnnnnnnnnnnnnnnnnannntattnnnannnnnnnnnnnnnnnnnannnnnnnnnnnnnntannnnnnnnnnnccncnnnnnnacnnnnncannnnnnnnnnannnnnnnnnncnnnnnnnnnnnnnnnnnncntntat

SEQ ID NO: 4677 - DNA, 360 bp, Zea mays
attaacctgtttggtcacagatgggttcaacaagtactttagatcagtcacccaggtcctcgagagggtatcattgtcaggagtgaccttcggaccacccatgttaacccgatatactgtctccagtggctgtgtagacaaaccactgtactgctggacagggttgaccatttgtgcatcatcggtgatgagatcatctgggacagagaccacctcaattgcgttgacaaatgcaattccatttgacggcttgaaggaaatcacgagcgtgtcgcgggtgatattcagtgagtattccttgaacaagggtgcggtcttgtctggttgctggaagtcactaagcaggagaacatcttgggt

SEQ ID NO: 4678 - DNA, 453 bp, Zea mays
  misc_feature (382)..(383): n is a, c, g, or t
  misc_feature (394)..(396): n is a, c, g, or t
  misc_feature (398)..(398): n is a, c, g, or t
  misc_feature (401)..(401): n is a, c, g, or t
  misc_feature (404)..(404): n is a, c, g, or t
  misc_feature (419)..(422): n is a, c, g, or t
  misc_feature (427)..(428): n is a, c, g, or t
  misc_feature (433)..(433): n is a, c, g, or t
  misc_feature (435)..(443): n is a, c, g, or t
  misc_feature (445)..(450): n is a, c, g, or t
cgtcggcgaaggccgggccggaggcgacgagcgcgtcgtagaagtggacggatgcgtgcatggcgtcgtagtagatgccaatgtgccggttggggttgcggtcggtgacgttgaaggagaggctggcgccggccgggctatagtccgggtcgaggccgccggccacagagaaggaggccatgttgaagcgcgggcggtgtgggcgcaggccgagccagataacgaagacgacgacggcggcgatgaggaggaggcccaggaggagggagcatagagtgttggcgagggctgcggcgcagctgtcccgggtgcggcgggcgatgcggcgggcgtggctggcggtggtaggaggagcaggagtgccttaatattatctgtatcnntgttactgcannncngtnaancaggatatatgcatnnnntagtnntcagncnnnnnnnnngnnnnnngac

SEQ ID NO: 4679 - DNA, 544 bp, Zea mays
ggagcagggaggcggtgctccggtgcagagcagggtggccggtgccgggcacggcttggcgcgaggggaagcttcatccgagcaggagggcgactcgggggcgggcgatgccggttcctatgccgctgctggattggggaacgacgaggaggaggatgctaaggtgatctttgcttcggtgatgtctgcattccgggatgccccgttcttgatttcgttcttggttcgttgtaacaggaagctttgacggaggagttggaaaatgtcgctcctccggcgggtgattctggccgtggcgatgcgccggagagtggccggaacgaacacatttacttcggtaatgcttgcagcttgcatcccatcccgaagtgctagctccactgttcttgtttgccttcttgattctgagtttctaagaaaacatggatttctcagagcgtcaagggtttcgaccggccaggccagcaatcgcgcacgcgacgccgccatcgtcctaccgccgcctgccattccgaagccgaaagcagtactacccgacacgctt

SEQ ID NO: 4680 - DNA, 314 bp, Zea mays
gttgttttctgcaacagttcgaatttagaggaagcatgccatggttgacaacctctagtgtttctatacacttgatttctgtttccattacaggatttgccacgaacatttccaggacaccctgcattagatgaggatgggaggaatgctttgaggcggttgttaaccgcatatgcaaggcataatccatcagttgggtactgccaggtaaattgatgccaattgaaggaattttgttttttttatctagcctcttgttggcttaattgtattgaatgagatagattgtaatcctaattggtgcatgcaaacaa

SEQ ID NO: 4681 - DNA, 367 bp, Zea mays
agctgggcaggcgtcggtcgggtcgccgccgcctcatgccctggccccgtccccgccgatcgaggggatgattcaccgcgcgacgccggggatgttgacccaggtcaggcgcaggacgaggtcgccggtctcggtgtccctgagcctgagcaggatgtcctgggagaccttgccgtccttgcacgtgatgtggctgtcggtggcgaggcagctgcccttctccgtgtggatcgtcttcatcaccgtgccgtcggggacgtcgctcaggtcctgcttggcgatctccacgaagttgaggatggagaactcggcgttgcccatgctgtcgtccttggtgaacgtgtcatggtcgaagagttcaatcttg

SEQ ID NO: 4682 - DNA, 393 bp, Zea mays
accataataatgttcagttggacatagacacacaacgagtgtgtcatgtttcatgcccattaatggtgttccattaggaatgaaaataattagtcatcatcttaaaataacttgaaagatcctagacaatattttcaacctctgtcctgtttgaaatcaagttgtagtaatcagcaggctggagctcataaaagttgtcatctttcactgcaagaacgatgctttaatgtcactgtagaactagaataaatacaaggcagatttggtaaagacaaaaaaatgacatttaggtaccatgatctgcactaggcaactttctggattgtagagcaaagttcttacttgaaaaaaacttgaatctcatgtccaagttcatctgactcctgggattta

SEQ ID NO: 4683 - DNA, 316 bp, Zea mays
tacgacctcaccttctggaaccacatcgtcttcggcgtgccctccaccctcatcgtcaccgccatcggcatccccctcatcggaaagatcaacatctgaactcgatcgtagctcatatatactacactacatgcataattgtatgcctcgatcgtatatgtacgtacttcttagcttaatttgttatataattgctcctgctcctgatcgatcggacacgtattaattgtggttttggagcgaggtgtgcatgcaatgcaatgcattcagtgtacctaattcataagcagtgcgctgtctgctgctccaacaataa

SEQ ID NO: 4684 - DNA, 966 bp, Zea mays
  misc_feature (571)..(580): n is a, c, g, or t
  misc_feature (582)..(582): n is a, c, g, or t
  misc_feature (584)..(586): n is a, c, g, or t
  misc_feature (589)..(599): n is a, c, g, or t
  misc_feature (601)..(625): n is a, c, g, or t
  misc_feature (627)..(628): n is a, c, g, or t
  misc_feature (631)..(631): n is a, c, g, or t
  misc_feature (633)..(637): n is a, c, g, or t
  misc_feature (643)..(643): n is a, c, g, or t
  misc_feature (645)..(645): n is a, c, g, or t
  misc_feature (649)..(657): n is a, c, g, or t
  misc_feature (659)..(663): n is a, c, g, or t
  misc_feature (665)..(667): n is a, c, g, or t
  misc_feature (680)..(684): n is a, c, g, or t
  misc_feature (687)..(689): n is a, c, g, or t
  misc_feature (700)..(703): n is a, c, g, or t
  misc_feature (705)..(707): n is a, c, g, or t
  misc_feature (709)..(711): n is a, c, g, or t
  misc_feature (714)..(716): n is a, c, g, or t
  misc_feature (720)..(731): n is a, c, g, or t
  misc_feature (733)..(740): n is a, c, g, or t
  misc_feature (745)..(746): n is a, c, g, or t
  misc_feature (749)..(750): n is a, c, g, or t
  misc_feature (756)..(757): n is a, c, g, or t
  misc_feature (759)..(765): n is a, c, g, or t
  misc_feature (767)..(769): n is a, c, g, or t
  misc_feature (771)..(775): n is a, c, g, or t
  misc_feature (779)..(780): n is a, c, g, or t
  misc_feature (785)..(789): n is a, c, g, or t
  misc_feature (794)..(809): n is a, c, g, or t
  misc_feature (811)..(823): n is a, c, g, or t
  misc_feature (826)..(826): n is a, c, g, or t
  misc_feature (828)..(832): n is a, c, g, or t
  misc_feature (834)..(835): n is a, c, g, or t
  misc_feature (837)..(852): n is a, c, g, or t
  misc_feature (854)..(873): n is a, c, g, or t
  misc_feature (880)..(880): n is a, c, g, or t
  misc_feature (885)..(894): n is a, c, g, or t
  misc_feature (896)..(899): n is a, c, g, or t
  misc_feature (903)..(903): n is a, c, g, or t
  misc_feature (905)..(905): n is a, c, g, or t
  misc_feature (908)..(913): n is a, c, g, or t
  misc_feature (915)..(925): n is a, c, g, or t
  misc_feature (927)..(943): n is a, c, g, or t
  misc_feature (946)..(952): n is a, c, g, or t
  misc_feature (959)..(962): n is a, c, g, or t
cgcagcgacgtccgcagcgtgcacctctccggcatggggtgcagcgccgggctcatctccgtggggctcgccaggaacctcctccaggtcgctccggaaggaacgcacgcgctggtcgtctccacggagaccatcacgcccaactactacgtcggcagcgagcgtgccatgctccttcccaactgcctcttccgcataggcggcgccgcggcgttgctgtccaactccccggccaaggccaggttccgcctcaagcacgtcgtgcgcacgctcaccggcgcgcaggacaacgcgtacacgtgcgtgttccagcaggaggacgacagcggcaacgtcgggatcaacctgaacaaggacctgatgaccatcacatgcattggacaaatactatgggcatgtcagcttttcgtaagacggcatattagatgagctatatattgtgcaactaatgttcgcaactcacaagccacaattaatctcaaagcatgtggccaacgcattgcactacaactaagaagtaacatgtttaccttccatagcttgaacaggcagctcacgttgtttcgattgnnnnnnnnnnanannnaannnnnnnnnnncnnnnnnnnnnnnnnnnnnnnnnnnnannacncnnnnncccacncncccnnnnnnnnntnnnnncnnnctcccccccccannnnnccnnnccctcaactannnncnnnannnccnnnaccnnnnnnnnnnnncnnnnnnnntaccnnctnnacaccnncnnnnnnncnnnannnnncacnnctccnnnnnacccnnnnnnnnnnnnnnnntnnnnnnnnnnnnnccncnnnnntnncnnnnnnnnnnnnnnnngnnnnnnnnnnnnnnnnnnnnctccccnctcgnnnnnnnnnncnnnncctncnacnnnnnncnnnnnnnnnnncnnnnnnnnnnnnnnnnnccnnnnnnnacgaacnnnncccc

SEQ ID NO: 4685 - DNA, 1434 bp, Zea mays
  misc_feature (406)..(407): n is a, c, g, or t
  misc_feature (418)..(419): n is a, c, g, or t
  misc_feature (423)..(425): n is a, c, g, or t
  misc_feature (485)..(485): n is a, c, g, or t
  misc_feature (492)..(497): n is a, c, g, or t
  misc_feature (499)..(499): n is a, c, g, or t
  misc_feature (525)..(527): n is a, c, g, or t
  misc_feature (537)..(543): n is a, c, g, or t
  misc_feature (577)..(577): n is a, c, g, or t
  misc_feature (620)..(621): n is a, c, g, or t
  misc_feature (653)..(655): n is a, c, g, or t
  misc_feature (691)..(693): n is a, c, g, or t
  misc_feature (705)..(709): n is a, c, g, or t
  misc_feature (723)..(725): n is a, c, g, or t
  misc_feature (731)..(732): n is a, c, g, or t
  misc_feature (734)..(736): n is a, c, g, or t
  misc_feature (738)..(738): n is a, c, g, or t
  misc_feature (740)..(740): n is a, c, g, or t
  misc_feature (742)..(745): n is a, c, g, or t
  misc_feature (749)..(751): n is a, c, g, or t
  misc_feature (765)..(765): n is a, c, g, or t
  misc_feature (769)..(773): n is a, c, g, or t
  misc_feature (778)..(779): n is a, c, g, or t
  misc_feature (781)..(781): n is a, c, g, or t
  misc_feature (783)..(785): n is a, c, g, or t
  misc_feature (789)..(793): n is a, c, g, or t
  misc_feature (804)..(807): n is a, c, g, or t
  misc_feature (810)..(811): n is a, c, g, or t
  misc_feature (813)..(814): n is a, c, g, or t
  misc_feature (816)..(817): n is a, c, g, or t
  misc_feature (819)..(822): n is a, c, g, or t
  misc_feature (824)..(827): n is a, c, g, or t
  misc_feature (830)..(832): n is a, c, g, or t
  misc_feature (834)..(835): n is a, c, g, or t
  misc_feature (849)..(850): n is a, c, g, or t
  misc_feature (853)..(853): n is a, c, g, or t
  misc_feature (855)..(857): n is a, c, g, or t
  misc_feature (860)..(861): n is a, c, g, or t
  misc_feature (864)..(865): n is a, c, g, or t
  misc_feature (867)..(870): n is a, c, g, or t
  misc_feature (874)..(879): n is a, c, g, or t
  misc_feature (881)..(882): n is a, c, g, or t
  misc_feature (892)..(898): n is a, c, g, or t
  misc_feature (909)..(915): n is a, c, g, or t
  misc_feature (917)..(930): n is a, c, g, or t
  misc_feature (941)..(945): n is a, c, g, or t
  misc_feature (947)..(959): n is a, c, g, or t
  misc_feature (961)..(971): n is a, c, g, or t
  misc_feature (975)..(977): n is a, c, g, or t
  misc_feature (979)..(985): n is a, c, g, or t
  misc_feature (989)..(995): n is a, c, g, or t
  misc_feature (997)..(1003): n is a, c, g, or t
  misc_feature (1005)..(1008): n is a, c, g, or t
  misc_feature (1010)..(1014): n is a, c, g, or t
  misc_feature (1016)..(1028): n is a, c, g, or t
  misc_feature (1032)..(1033): n is a, c, g, or t
  misc_feature (1040)..(1042): n is a, c, g, or t
  misc_feature (1048)..(1057): n is a, c, g, or t
  misc_feature (1059)..(1061): n is a, c, g, or t
  misc_feature (1063)..(1065): n is a, c, g, or t
  misc_feature (1070)..(1076): n is a, c, g, or t
  misc_feature (1079)..(1084): n is a, c, g, or t
  misc_feature (1086)..(1089): n is a, c, g, or t
  misc_feature (1091)..(1093): n is a, c, g, or t
  misc_feature (1104)..(1104): n is a, c, g, or t
  misc_feature (1110)..(1116): n is a, c, g, or t
  misc_feature (1121)..(1127): n is a, c, g, or t
  misc_feature (1129)..(1131): n is a, c, g, or t
  misc_feature (1133)..(1134): n is a, c, g, or t
  misc_feature (1140)..(1143): n is a, c, g, or t
  misc_feature (1154)..(1161): n is a, c, g, or t
  misc_feature (1163)..(1164): n is a, c, g, or t
  misc_feature (1168)..(1168): n is a, c, g, or t
  misc_feature (1172)..(1172): n is a, c, g, or t
  misc_feature (1174)..(1176): n is a, c, g, or t
  misc_feature (1182)..(1185): n is a, c, g, or t
  misc_feature (1188)..(1188): n is a, c, g, or t
  misc_feature (1190)..(1190): n is a, c, g, or t
  misc_feature (1192)..(1193): n is a, c, g, or t
  misc_feature (1196)..(1198): n is a, c, g, or t
  misc_feature (1203)..(1203): n is a, c, g, or t
  misc_feature (1205)..(1207): n is a, c, g, or t
  misc_feature (1214)..(1219): n is a, c, g, or t
  misc_feature (1222)..(1223): n is a, c, g, or t
  misc_feature (1227)..(1230): n is a, c, g, or t
  misc_feature (1232)..(1232): n is a, c, g, or t
  misc_feature (1234)..(1234): n is a, c, g, or t
  misc_feature (1238)..(1239): n is a, c, g, or t
  misc_feature (1241)..(1246): n is a, c, g, or t
  misc_feature (1249)..(1250): n is a, c, g, or t
  misc_feature (1252)..(1265): n is a, c, g, or t
  misc_feature (1267)..(1267): n is a, c, g, or t
  misc_feature (1269)..(1272): n is a, c, g, or t
  misc_feature (1274)..(1276): n is a, c, g, or t
  misc_feature (1287)..(1287): n is a, c, g, or t
  misc_feature (1290)..(1290): n is a, c, g, or t
  misc_feature (1293)..(1295): n is a, c, g, or t
  misc_feature (1297)..(1297): n is a, c, g, or t
  misc_feature (1300)..(1313): n is a, c, g, or t
  misc_feature (1315)..(1317): n is a, c, g, or t
  misc_feature (1321)..(1323): n is a, c, g, or t
  misc_feature (1325)..(1325): n is a, c, g, or t
  misc_feature (1330)..(1332): n is a, c, g, or t
  misc_feature (1339)..(1345): n is a, c, g, or t
  misc_feature (1349)..(1359): n is a, c, g, or t
  misc_feature (1363)..(1371): n is a, c, g, or t
  misc_feature (1378)..(1382): n is a, c, g, or t
  misc_feature (1384)..(1390): n is a, c, g, or t
  misc_feature (1392)..(1395): n is a, c, g, or t
  misc_feature (1397)..(1397): n is a, c, g, or t
  misc_feature (1400)..(1407): n is a, c, g, or t
  misc_feature (1410)..(1410): n is a, c, g, or t
  misc_feature (1414)..(1426): n is a, c, g, or t
  misc_feature (1428)..(1431): n is a, c, g, or t
cggcgaccagctcgtcgcgacggggtccgtcatgcaccccttctaccaggtgcccaagggagacacgcccgtgcaggggaccctcaccgccaaggcccccgtcccgtcggacccgtcgtgggggcggttcgccggcgaggtgtcggcggggagcgtcggtatgcggctggtgctcagctccaagctgcagttccaggcgaagatgtgggacagcaagaatcaccacatcaaggtggagtgcgacttcactatgcaaggggatgggacgctccgtaagcaggacaaggactcccagtgcacgctctacttctagcgtgatcgccctgcttcttgaattgatgcaggccggcctcgctgacccctttcaactaaccttggtttcaaatttgattgcaagtaccccatnngagatacggannttgnnntttgtacggttacctccagtgactcgtctgtactggaatttgaatcttggctcacgaatncggtcannnnnncntttctacacacacctgtttcaacaannntatgggttgnnnnnnncactctttcctactagtcccatattttagctggnaattttcccatcaccgtcatcataggttcaccggacatatggnnaaagatatggcgttcgttccagccacggaggnnnacagaaatcagagaaaactagctaatctcctatatnnncaaagagactgnnnnnatgttcgaggatgnnnctattnngnnntntntnnnnactnnntgctcaccaactcncccnnnnngcagnntnannntctnnnnnaaacgtttatnnnnggnnanngnncnnnnannnnggnnnanncgccaaaggcggcnntgngnnngcnnccnncnnnncccnnnnnncnnccaaatttcnnnnnnntttccaaaaannnnnnnannnnnnnnnnnnnnactcccaaacnnnnncnnnnnnnnnnnnnannnnnnnnnnnactnnntnnnnnnncggnnnnnnnannnnnnntnnnnannnnnannnnnnnnnnnnncttnnatttttnnnacaaannnnnnnnnngnnncnnnacccnnnnnnntcnnnnnncnnnncnnnatccctcctcncccccnnnnnnnactannnnnnncnnncnnttctannnngttcccctcgnnnnnnnntnnacangcgncnnnctcccnnnnctntncnngcnnnactcncnnntctcccnnnnnnaanncccnnnncntntagnncnnnnnncanncnnnnnnnnnnnnnncncnnnncnnnccctcccccanacnacnnntnccnnnnnnnnnnnnnncnnncacnnnanaaccnnntcatctnnnnnnnactnnnnnnnnnnnatcnnnnnnnnncactccnnnnncnnnnnnncnnnnanaannnnnnnnctnccannnnnnnnnnnnncnnnncct

SEQ ID NO: 4686 - DNA, 382 bp, Zea mays
ccggccacccccgacatcttccaggagtcgccgccaccgcatctccgccattttgtgggccacggccacaacggcaccgatgtccccatgccacattgccaccccagccgcatgtggtggcatcgctggaggagcggcttggcgcggagatggacgaggcgcatgtgctgcttgcgcaggaccagcggttgacgcacatggcgctcgtgcaggaggtcgctgccgcgcggcgcgatctcggctgcaccgcgcacgagctcacctccgctcatgaggagagcgaccaatgccttcacgaatcacgaggcgtggtcactccccctcacgagcttacgggctgaatgcatcttcttttctatgcgttgcaattctgggtacttat

SEQ ID NO: 4687 - DNA, 408 bp, Zea mays
ggtgcgccacgcccacggcccacttgtcctgcgccacctgcacgttccaggcctccagggacacgttcgcggggaggccggaccaccagaagttgcccacggggcccaggatggctacgccggaaagcctgtgcgggatgtacttgaggcagctccacatgatctccccgcccatggagaagccggcgaggtagaacctgtcgccgagctccatggcgtcggcgagctgctcgatgtccagggcgacgctcttgtcggtcctagccgggtgcgggtcgctctccccgtacccggggcggtcgaaggagagcaggtagacgcccagctcctgggccagctcgggcgacacccggagcacgtcgtacctgcacgagtcgaacccgtgcatgaagacgatcctgtacctaa

SEQ ID NO: 4688 - DNA, 420 bp, Zea mays
tctgctcggtcctcttcctcctctccaagatgctcatctccttcctcctctacaagaaatgggcgcgcaagaagaggatcatcgacaacagcctcgctggcggcaagatggtcatcttccgctccgccaccatggccatgccgcagtctctcacccccaagtccttcctcgccatgctcatgggcctctccaccaaggacgtcatcggcgccggcggctacggcaccgtctaccgcctgcgcctggacgacaagaccgccttcgccgtcaagaggctcaaccggggcacccaccaccacgaggcggacgaccgcggattcgagcgggagctggacgccatgggagacatcaagcaccgcaacatcgtcccgctctgcggctactactacgccgccacgcacttcaacctcctcatctaca

SEQ ID NO: 4689 - DNA, 842 bp, Zea mays
  misc_feature (830)..(834): n is a, c, g, or t
ttggcactggacgtgacaatggaacagatgacttcgatgcagtaagagtggcagtccgcttgcttggggttgtaggtcttgaactaacagaggaaatgtttgcattgaggactgatgacctgctgttgctagacactggtgtagattgaactgcccggcgggagacagatatactccgtgcaggcctagtgggaaacgtcgaatacccattctctgtctcagaagtggaaaactgcaacaaacatatcatacagcttatgttaatataatcatgatccaccacgagatgagtagcgaagagcaagttagatgggtatgatcccacagttagactgaaagaggtatcattatcaagtttgctatctcaaaactacacaataatagattttcaaatcgattccactagtccaaaagattaaaatgattctagcaacttcttgaagcgaggcacaaattactcttgaatttaccataacctatgaaatcggtgcttgaaattcatatctttgcagttgtagataccataaagcatggataaataatcattgcaacttgcaagtatgtgacaaatatatatatagaccaatagatgagccacaggttaatttgatgcatgcaacttgaatgcagcattttgttattccttatgtacgtaaatcaccaatatgacctgaatgaattcatatgccactgataataagccataaaacatatatagtcttcacaaaaaatcgtgacactgcatacacaaagaatcaagaaacatgttggatgtaaaaatatagagcattcaataataacaatttttaccgaccactagatgctctagnnnnnaggaggtg

SEQ ID NO: 4690 - DNA, 374 bp, Zea mays
ctttcctccctggcgcagttacaggccaaaaactaagcttctctgccgaaaatgcggagcatctatcggctatggatacggtgagccagctggtttgtgcagttttgatccagcaagttcatcttcctccagtacatcccagaagtatttaataaagatccaagcactccaaccttcagacgggacccagtaagtcagatatggaaagagagacaatagatgccagcttagagaactccatcagttacctatctgacgactgcttgctttctatatttaacaagctagaaagcgagtcagagaggagtgcttttggtttgacctgcaagaattggttcaaggttcggaaccttggtcggaaatcactaacattc

SEQ ID NO: 4691 - DNA, 483 bp, Zea mays
atcccttgattttttgggaccacaccgccaccaaaaattgctccggtgttcactttcccccgcgtgactctcatccaaacaatatagaaaatatggctatctcctttcatccctccttatacatccaactaaacacaccacaagttgatctttccaccgccaccctaacataaatgttttgtgtagtgtatgttacaattatcttgatttccttgttttgtcgactccttggtgatcgatgtgcctaactggctaaagaatgatatagtttgtaaagatttacaagagcaacacgttaggttgtttccagaaagaatatcatttactatatacactatgcataggctatcaacctcgaagggacgcgcagctcgcatgtaattccggcgattgcacgtctttacaaaataagataattatatcatggtctcaaatttgtcgagtttcttcactctttgcatagatctgaccagcaatgccaaa

SEQ ID NO: 4692 - DNA, 445 bp, Zea mays
ccttcgccgccgccgccatgggtaacgatatccttgtcctcgtctctatctctactttgcgtgcatccttccaatagccgtttactcagattgatctatctgcttctggcgcaggtaaggttcacggatcgctggcccgcgctgggaaggtgcgcgggcagacgcccaaggttgcaaagcaggacaagaagaagaagccccgcggccgcgctcacaagcgcatgcaatacaaccgccgcttcgtcaccgccgttgttggattcggcaagaagcgcggccccaactcatcggagaagtagatctagctatggctttgtgttttattccccactagtttcctcactgatggcaacttgctgaagacttatgctattatctgtatcgatgttactgcaatactgttaagtacgatatatgcatcgtttagttgatcaagttgcctgtg

SEQ ID NO: 4693 - DNA, 683 bp, Zea mays
  misc_feature (582)..(584): n is a, c, g, or t
  misc_feature (589)..(589): n is a, c, g, or t
  misc_feature (603)..(603): n is a, c, g, or t
  misc_feature (612)..(619): n is a, c, g, or t
  misc_feature (626)..(628): n is a, c, g, or t
  misc_feature (630)..(631): n is a, c, g, or t
  misc_feature (633)..(635): n is a, c, g, or t
  misc_feature (637)..(637): n is a, c, g, or t
  misc_feature (640)..(643): n is a, c, g, or t
  misc_feature (645)..(646): n is a, c, g, or t
  misc_feature (650)..(653): n is a, c, g, or t
  misc_feature (655)..(655): n is a, c, g, or t
  misc_feature (657)..(659): n is a, c, g, or t
  misc_feature (666)..(668): n is a, c, g, or t
cttgcttcgtcgcacttccattgatctatgtctgtaatacccactttgtaagaaaatctaaaaggagagattatattcctttacatgtatgtgtgttatccctatttatcatttcatgtggacacctcacctatacaaataaataattaacaaaagacactcaaataaattatgcatcatgctgagtttttacttgattgtgtatttgtggatagtaaaataaatgtgttactaaccatatattaaaatattaagggacacatagaatttaaactctaatttggagaaacatagcactagctttaataaaataaatattgaaaataaataagttcacccgtgtcatgtttaagggggacatgtgatagggaaacaaattagaggagtttaaattctatgtgtcccttaatattttaatatatggttagtaacacatttattttactatccacaaatacacaatcaagtaaaaactcagcatgatgcataatttatttgagtgtcttttgttaattatttatttgtataagagaggtgtccacatgaaatgataaatagggataacacacatacatgtaaagnnntatantctctccttttagnttttattannnnnnnngtattannnanntnnntnaannnnanngcgnnnnancnnncttcatnnncttgacgtaagaaaa

SEQ ID NO: 4694 - DNA, 478 bp, Zea mays
gctactgatgaagaggaactcatttgtttatatcttcaaagtagtccaggtatccatcttgcttcctaaaatcttctcgacttccaaattcaggtagtaaattctgatgaatgctccatatttgtaccagctcataattcttggaacaattgcaatgacggtcttcctgcgcacaacaatgcatcgacgtggtgtcgaagatggggtgatatttctgggcgccatgttccttggactagtcacacatttgttcaatggttttgctgagctcgccatgagtatcgcaaagctgccgatattttataagcagagggacctcctcttctatccatcatgggcatatgcatcgcctacatggttgctaaagataccaatatcattcttggaatgcgctgtgtggatcggcatgacttactatgtcattggctttgatccaagcattgaaaggttctttcgccattaccttctgcttgtacta

SEQ ID NO: 4695 - DNA, 360 bp, Zea mays
aacgccgcggagacagtatttgctcttccccatgccctcacccacccaagaagcccccgacaggttgcccgacggtggatggacgggggcgttgctggttgcggtgggtggagacgacggttgaacgaagcagtggcagaaaaaaaaaggttatcgacgggggttaagcagaggccacgaattggcggcggacggtgcagcgaagtggcacgtcaccggcggccgagagcggtggtgctgaaaatgccgttggagaaatcccgtgctctcgcgaccacgccgagggcgtggcgtgaggcggcggcaagttgtcagctgtcacgacactactacgatgactctgctaccatctggtttctg

SEQ ID NO: 4696 - DNA, 1436 bp, Zea mays
  misc_feature (563)..(574): n is a, c, g, or t
  misc_feature (576)..(583): n is a, c, g, or t
  misc_feature (585)..(588): n is a, c, g, or t
  misc_feature (590)..(602): n is a, c, g, or t
  misc_feature (605)..(613): n is a, c, g, or t
  misc_feature (615)..(618): n is a, c, g, or t
  misc_feature (620)..(624): n is a, c, g, or t
  misc_feature (634)..(636): n is a, c, g, or t
  misc_feature (639)..(639): n is a, c, g, or t
  misc_feature (647)..(649): n is a, c, g, or t
  misc_feature (651)..(660): n is a, c, g, or t
  misc_feature (662)..(668): n is a, c, g, or t
  misc_feature (673)..(676): n is a, c, g, or t
  misc_feature (684)..(686): n is a, c, g, or t
  misc_feature (689)..(696): n is a, c, g, or t
  misc_feature (704)..(706): n is a, c, g, or t
  misc_feature (709)..(713): n is a, c, g, or t
  misc_feature (715)..(717): n is a, c, g, or t
  misc_feature (719)..(721): n is a, c, g, or t
  misc_feature (725)..(735): n is a, c, g, or t
  misc_feature (738)..(742): n is a, c, g, or t
  misc_feature (744)..(753): n is a, c, g, or t
  misc_feature (755)..(758): n is a, c, g, or t
  misc_feature (762)..(775): n is a, c, g, or t
  misc_feature (777)..(784): n is a, c, g, or t
  misc_feature (786)..(786): n is a, c, g, or t
  misc_feature (788)..(793): n is a, c, g, or t
  misc_feature (796)..(800): n is a, c, g, or t
  misc_feature (802)..(805): n is a, c, g, or t
  misc_feature (811)..(818): n is a, c, g, or t
  misc_feature (820)..(825): n is a, c, g, or t
  misc_feature (828)..(834): n is a, c, g, or t
  misc_feature (839)..(841): n is a, c, g, or t
  misc_feature (843)..(844): n is a, c, g, or t
  misc_feature (848)..(850): n is a, c, g, or t
  misc_feature (852)..(852): n is a, c, g, or t
  misc_feature (854)..(858): n is a, c, g, or t
  misc_feature (860)..(861): n is a, c, g, or t
  misc_feature (863)..(872): n is a, c, g, or t
  misc_feature (875)..(875): n is a, c, g, or t
  misc_feature (878)..(886): n is a, c, g, or t
  misc_feature (891)..(903): n is a, c, g, or t
  misc_feature (905)..(907): n is a, c, g, or t
  misc_feature (909)..(909): n is a, c, g, or t
  misc_feature (915)..(916): n is a, c, g, or t
  misc_feature (922)..(927): n is a, c, g, or t
  misc_feature (936)..(941): n is a, c, g, or t
  misc_feature (944)..(951): n is a, c, g, or t
  misc_feature (953)..(954): n is a, c, g, or t
  misc_feature (956)..(966): n is a, c, g, or t
  misc_feature (971)..(971): n is a, c, g, or t
  misc_feature (973)..(975): n is a, c, g, or t
  misc_feature (977)..(990): n is a, c, g, or t
  misc_feature (995)..(997): n is a, c, g, or t
  misc_feature (1000)..(1004): n is a, c, g, or t
  misc_feature (1006)..(1007): n is a, c, g, or t
  misc_feature (1014)..(1016): n is a, c, g, or t
  misc_feature (1019)..(1033): n is a, c, g, or t
  misc_feature (1041)..(1053): n is a, c, g, or t
  misc_feature (1055)..(1057): n is a, c, g, or t
  misc_feature (1059)..(1059): n is a, c, g, or t
  misc_feature (1061)..(1063): n is a, c, g, or t
  misc_feature (1065)..(1068): n is a, c, g, or t
  misc_feature (1070)..(1070): n is a, c, g, or t
  misc_feature (1072)..(1072): n is a, c, g, or t
  misc_feature (1074)..(1076): n is a, c, g, or t
  misc_feature (1078)..(1088): n is a, c, g, or t
  misc_feature (1091)..(1092): n is a, c, g, or t
  misc_feature (1106)..(1111): n is a, c, g, or t
  misc_feature (1113)..(1124): n is a, c, g, or t
  misc_feature (1128)..(1138): n is a, c, g, or t
  misc_feature (1141)..(1149): n is a, c, g, or t
  misc_feature (1153)..(1160): n is a, c, g, or t
  misc_feature (1162)..(1172): n is a, c, g, or t
  misc_feature (1174)..(1176): n is a, c, g, or t
  misc_feature (1180)..(1193): n is a, c, g, or t
  misc_feature (1196)..(1210): n is a, c, g, or t
  misc_feature (1212)..(1219): n is a, c, g, or t
  misc_feature (1224)..(1240): n is a, c, g, or t
  misc_feature (1247)..(1249): n is a, c, g, or t
  misc_feature (1261)..(1261): n is a, c, g, or t
  misc_feature (1265)..(1266): n is a, c, g, or t
  misc_feature (1270)..(1271): n is a, c, g, or t
  misc_feature (1279)..(1293): n is a, c, g, or t
  misc_feature (1295)..(1299): n is a, c, g, or t
  misc_feature (1301)..(1301): n is a, c, g, or t
  misc_feature (1306)..(1311): n is a, c, g, or t
  misc_feature (1314)..(1319): n is a, c, g, or t
  misc_feature (1324)..(1330): n is a, c, g, or t
  misc_feature (1335)..(1337): n is a, c, g, or t
  misc_feature (1339)..(1347): n is a, c, g, or t
  misc_feature (1349)..(1361): n is a, c, g, or t
  misc_feature (1364)..(1373): n is a, c, g, or t
  misc_feature (1378)..(1380): n is a, c, g, or t
  misc_feature (1383)..(1392): n is a, c, g, or t
  misc_feature (1395)..(1400): n is a, c, g, or t
  misc_feature (1404)..(1406): n is a, c, g, or t
  misc_feature (1409)..(1411): n is a, c, g, or t
  misc_feature (1415)..(1418): n is a, c, g, or t
  misc_feature (1420)..(1426): n is a, c, g, or t
  misc_feature (1428)..(1431): n is a, c, g, or t
  misc_feature (1433)..(1433): n is a, c, g, or t
aagtttcctcgaggatgtgctccaggcgcacttcctctcgtggccaattccgatgctgcggcttcttttcctccggcgccgacgctcgcttggcctcgctgtcttcctccccacccggaccagaagccgttcctggcttcctatcctgggattgggagcggtgcttgttgtacaaggacatgaggagctgaaccagcttgatcgccttctggagcttcttccgcatagggcgctccccttccagctgtggtatagccttccccacttggatttcatcacggcggcccttgcccatttcgccgtcgtccttcaacttccgtgcagcgccatcgctgtacttccggctcggtttcttcttcacatgcattggacaaatactatgggcatgacagcttttcgtaagacggcatattagatgagctatatattgtgcaactaatgttcgcaactcacaagccacaattaatctcaaagcatgtggccaacgcattgcactacaactaagaagtaacatgtttaccttccatagcttgaacaggcagctcacgttgtttcgattgctnnnnnnnnnnnnannnnnnnncnnnncnnnnnnnnnnnnntcnnnnnnnnncnnnncnnnnntacaccaacnnntcnccataccnnncnnnnnnnnnncnnnnnnnctccnnnncccccccnnnccnnnnnnnnccatcttnnntcnnnnncnnncnnncacnnnnnnnnnnnctnnnnncnnnnnnnnnncnnnnatcnnnnnnnnnnnnnntnnnnnnnntncnnnnnnttnnnnncnnnntactannnnnnnncnnnnnnttnnnnnnnacttnnncnncatnnncncnnnnncnnannnnnnnnnnccntcnnnnnnnnnactcnnnnnnnnnnnnncnnncnctcttnncccccnnnnnntcactttcnnnnnnccnnnnnnnntnnannnnnnnnnnntttcntnnncnnnnnnnnnnnnnnaccannnttnnnnnannccaaccnnnacnnnnnnnnnnnnnnncccaaccnnnnnnnnnnnnnannntntnnncnnnncnanannncnnnnnnnnnnnccnnaaaccaccctcccnnnnnncnnnnnnnnnnnncttnnnnnnnnnnntcnnnnnnnnnctcnnnnnnnncnnnnnnnnnnncnnnctcnnnnnnnnnnnnnnccnnnnnnnnnnnnnnntnnnnnnnncctcnnnnnnnnnnnnnnnnnccccccnnnctccccttctcncatnntctnnctcccacnnnnnnnnnnnnnnnannnnnancctannnnnnttnnnnnncccannnnnnnactcnnntnnnnnnnnncnnnnnnnnnnnnntcnnnnnnnnnnactannntcnnnnnnnnnnatnnnnnncccnnnctnnncccnnnncnnnnnnncnnnncntct

(The sequence listing continues in the following parts.)
